United States Patent Application Publication US 2008/0114160 A1 - sequence listing, part 71

SEQ ID NO: 26005 - DNA, 8085 bp, Oryza sativa
gcgccgccgtcatccgtcgccgctttccgcgcctccggttgccgtcgccggcgaccgtgcgtgcgcgccaccgccctcgccataaccggtcggccggtttgaggccgagccgagccgaccgggcgtctcctcctccccatgagccgccgctcggtggggcccgcttgccagccgcccctctctctccttgagtcactgacccgcgggtcccgcgtgtcggcgccacccctccttgtgctgacgtcagccctggggcaatattgcgcaataaattgattaagggtttttcttttatagtaaaaacacagagaatcttctaaaaatcataactaattcatccgagctccgattaagtccattcaagtctcagtaaattcataaaaatgtatagaatccattaaaaatggttttgcttcctgtttcagtagtcttatagcatgttttgcttgtgtgctttgtttgtcgcgtagatttcggtcgtttcgtcgattcgcggtttcttgaagacgttgctgtggcctcatcagtgcgagagcaaggcaagtcatacattgcaattgatcatattgtacccaatttacaaatgtcccgcatttctattaaatattgcattgttttacaatatcatgtgggatgggtcctattactcagctatatgttgtttcccttacgccattaataacttgggtattaaaatgactagatgttggtttaggagatgcttagccatgcttagttcaactagtgcacaaagggggatcacattaaagcatagacttgattattggcatagctttgatttagtgccaccgtaatggtgtgggttaattaaaatacacatcatggtgggctgtgggtgcatggtcttgctagtcgcacccatggcatttaaggaccggttcgcgggatgccctggaagaatttatcgtacttaccacaagccagcgtgggcaacggctgggcttgtagtgtagcttttctctagccgacgtacccaggcgagggtgggcgtgatggagttgggtcggccggggcgtccggttgatcggcttccggattcaccgcggcatgaaaggggggctgcccgttgcctgctggggacgggggcgaaccctaaggtgtggtgcgatcggttagagagggttatgcgaagggtcctgtcacggcctctttccggtatgtcgtggtggcatgtcggcgcacgggaacgtgtcgtggggctgtgtcttgtgggtacagttgtacacctctgatcagagtaaaactattcgaatagccgtgcccgcggttatgggcggtcgaccagattcaccgtgattagtttcaccctagttagcttttggaactggttagttcaggtggtggtttgggcctgtcgcaacgtggtgtaacgttggacagtgattggttaatatggattaattactgcaactgttttactgctttcaactactgctttgaaatgccggctttatgcaaaagaacctttagcctcccttggatatatcttgcatcatacctcctcttccggtatgacttgctgagtacagtgggtagtactcagtcttgctctcttttcccccacaccagcgttgaagtccttctcagttgaagatgtctcgaagaggttggtttcgtcgctgccgtcaaggatgcctgtggaatggagtcgcccgctgcagaagtcaagccttcaggcttagctcgcttttatctttttccgctgcatttgtaatcttttatatttttgtaagacgtggatctgtatgtcaacaattgtcgtttgtgtaccctggctggtcctggacaggggtttaatgcacattcagcttagaaattctggttcgtgaatttctgggtgtgacaagttggtatcagagccgaccttgaccgtaggtcaagccaaatggaaaccctaagagctctcttaaaccttttcatctgcatatgctttttgcacttggatttgtttcgggaaaaatttggggttttgcctcttttgattttgggagaaaatcttggtcgcttatttaatcggatctcttgactagggacagtccaaggttttagcaaaactttatttggaatttatttggcagccagtcgggaattgttaggtggtatgcattaagttgtgtttagattcgatgggatgcagtctttatgcgcatcattattatcatgcatttatatcatacattaagttattgtttagtcagttgcattagtgtcttttgtctgggttcatgaaaaatgttctatgcataaaaatcatcatgcttggctagttgtttgggccatttgttgctttgtttaaatttggatttgagcatgcattgattcctatcccttgtctaccttagaagtcagacctgttcttcgatcgcaagcgccgctccgagcttcagagtcgccgcccttagctttatcgtcttcttagtctgtttgcgtgctagtttttgtgtttaggtttgttgcttgtgggttagtcggcggtcgatatcatgtgtgagtggtatgacagccttaattaggaattgtgtgcctctttttcagtgttttaatcaagattaagataatggcacttaatttcataagaaagattagtttccgagccatctgttttcttcctttctcttatttctacctatcccctccagatggtgaagacaaggaatgatctccgtgactccaacggcgccagtggcagcgaagagcagacagatgaagctcataccagtggtgcacctggtagcagttcatctccgccgcccgagaacccaacagtcactcagatgatgacaatgatgatgcaacagatgcagcaacattaccatcaaatgttgcagcaggtgcaacagaaccagcagtttggtcctccaccatcacacgtgtccaaactgttagactttcttcgtatccagccacccactttctcaagcaccaccaacccaatggaggccaacgactggctccgtgctattgagaagaagctgaacctactgcaatgcaacgaccaagagaaagttgcttttgctacacaccagttgcaaggtcccgcttctgcctggtgggataactacgtggtgacccgtccagatgcaacgaaggttacttgggtagagttttgtcaaaactttaggaaggcacagattcctgaagggattatggcacaacagaagagagagagttccgtgcattgcaacaaggaaccagaacggttacagagtacctgcacgagttcaaccgcctcgcgcgctacgctcccgaggacgtgcgcaccgatggtgagaagcaggagaagtttttgtttgggctcgatgatgaattgaccaaccaactaatctccggagtctatgaggactttgagaagcttgtggacaaggctatccgccaggaagacagctggaccgaaaaagaaagacagctcagatcagctttcctcaggggaacaatcagaagcctcgtttcatgacgggacagctaggtgggccttccaccctgatcgtctgtcagcaccgtccctatcgcccgagtaacttcaacaactattacaatggtggcagtcacaacaatagtaagcagcacaaccacaactcgactccacccccactaatggcaccagctcagtcagatccgccagctgtgtcagctcagtcagaacagcccaagaagggggctgtaggaaagccaggaccctgcttcaactgtggcaagcacggccactttgctagcaagtgtccgaagctgaatcgcactggacccaggttcatccaggcccacgccaatcatgtgtctgcaatggaagcacaggcagcaccagaggtcgtgttgggcacgtttccagtgaactcatatccagcaacagttctctttgattcaggtgcctcgcattctttcatttccaaaagatttgctgggacacatggattatcggtagtggaacttaaaataccgatgcaggttcatacccctggaaatgacatgaggacagcacattattgcccctcggtgactatagagatcagaagatcaccgtttctatccaacctcatccttctcgaatctaaagacctagatgtcgttctcggaatggattggttgaccagaaacaagggagtgattgactgcgcaagccgcaccatcaccctaaccaacgacaaaggggagaagatcaccttccgttccccagcgtcgcagaagtccgtagcgagtctgaatcaggctgctattgagggtcagacagaaacagtggagaaaagtcccaggaagttggaggatattcctatagtacaagagtatcctgaggtgttcccagaagacctcactacaatgccaccgaagagagaaatcgagttccggatcgatttggcacccgggactgctccaatttacaagaggccgtacagaatggcagctaatgagctagcagaggtcaagaagcaggttgacgaacagctgcagaaagggtacatccgaccgagtacttcaccttggggtgctccggttatctttgtggagaagaaagacaagaccaagaggatgtgcgtggattatcgcgcccttaatgaggtcacaatcaagaacaaatatccgttgcccagaattgatgacctgtttgatcagctaaaaggagctaaggtgttttccaagatagacctgcgatcaggctatcatcagttgagaattcgggaagaggatattcccaagacagccttcaccactcggtatgggttgtttgagtgcacagttatgtcatttggactcaccaatgcaccggctttcttcatgaacttgatgaacaaagtgtttatggagtttcttgacaagtttgtcgtggtgttcattgacgacatacttatctattcaaagtctgaagaacaacatgagcaacatcttcgtctggtactcgagaaattgaaggagcaccagttatatgccaagtttagcaagtgtgacttctggttatcggaggtcaaatttctgggtcacgtcatttctgctcaaggcgtggcagtggatccatcaaatgtggaatcagttaccaagtggaccccaccaaagacagtttctcaaatccggagttttcttggacttgcgggttattaccgtcggttcatcgaaaatttctctaagattgccaagcccatgacacagttgctaaagaaagatgaaaaattcaaatggtcagctgagtgcaaccaaagttttgaagaactcaagaagaagttagtctctgcaccagttctaattttgccagatcagacaaaagacttccaagtctactgtgatgcatctcgccaagggttgggatgtgtgttgatgcaagaaggcagagtggtcgcatacgcttcgcgacagtaacgtccacacgagaccaattatcccactcatgaccttgagttagcagcagtggttcatgctctgaaaatctggcggcactatcttattggcaaccgctgtgaagtatacactgatcacaagagtctgaagtacatcttcactcagcctaacttgaatctccgacagcgaagatggctggagttaattaaagattatgacatggggatacattatcatccaggcaaagcaaatgtggtagcagatgctttgagcagaaaaagctattgcaatgccttatgcactgaagacatgtgtggcaaattgcagcaagatcttgagcacctaaatttgggcatcgtggaacacggatacgttgctgccctagaggcaaggcctacgctcgtggatcaagtcagagcagctcaggtaaatgatcctgaaatagctgagctaaaaaagaatatgagggtcggaaaagcccgagatttccatgaggatgaacatggcacaatctggttgggagaaagattgtgtgtgcctgacgacaaagaactgaaggatctcatactcacagaagctcatcaaactcagtattcaattcatcccggtagtactaaaatgtaccaggacctcaaagagaaattctggtgggtcagcatgagaaaggaaatagccgaattcgtcgcactctgcgatgtttgtcagcgagtcaaagcagaacatcagaggcccgcaggactgctacaaccccttcagatcccggaatggaaatgggaagaaatcggaatggatttcatcactggtttgcccaggacatcgtcagggcatgattcaatttgggtagtcatggatcgcctcacgaaagttgctcattttattccggtgcacactacctatacggggaaaaggttggcagagctgtacttagcaaggatcatgtgtctgcatggggtacctaagaagatagtatctgatcgagggagtcagttcacatcaaaattttggcagaaactgcaagaagaattggggactcgtttgaatttcagcacggcttatcatccgcaaacagatggtcagaccgagcgagtaaatcaaatcttggaagatatgttgagagcttgtgcacttgactttggtggagcctgggataaaagtctaccgtatgcggaattctcttacaacaacagctatcagtccagtttgcagatggcaccgtttgaagcattgtacggacgaaagtgccgcacaccacttttctggaatcaaacaggtgagcgccaactgtttgggacagaagtgttaaccgaagcagaggagaaagtcaggaccgtcagggaaagactgcgaatcgcccagtctcggcagaagagttatgctgataatcgccgaagagagcttactttcgaagcaggggattatgtgtaccttcgtgtcactccgctccggggagtacaccggttccaaacgaaaggcaaattggcaccacgctttgtgggaccatacaggatcttggaacgcagaggtgaagtcgcttaccagcttgagctcccatctaatatggttggaatccacgatgtgtttcatgtatctcaattgaagaagtgtttgagggtacctgaggaacaagctagctcagagcacattgacatccaggaagatctgacttatgtggagaagccgattcgtatcctcgagaccagtgagagaaggaccagaaacaaggtgatcaggttttgcaaagttcagtggagccaccactcggaagaagaggccacctgggaaagagaagatgaattgaaggccgctcatccgcacctctttgccaactcttccgaatctcggggtcaagattccgtttaaggggggtaggtttgtcacgccctgaagttcccctcccttgctctaaattcataaaataaatcgttcgaagaaattgtttaatttaacctagagatgaatccctaattaataaatgcaaataataatcggaatcggcatgtggaatttttcttggattctacatgtcaaaatatgctaacaggatttttagtggaattttcagagccttggaaataattttaatcaattaaaataagcaaagtgcaatattaaatccctggaaaaatcctttttcctttttatcttttcttttccctccttttttctttttcttgggcccggcccattttctcccgcgccggcccgctcctccctcctactcccgaagttcacccggcctccttctccctctcgggcgctgacaggtggggcccacctgtcagccctttccctaacctctgggcgcccacgcccgcgccaaccgccgccgaaaccaccacccatcgcccgccgcctcccccggctttccgcgccccgggccacgtcgcccactttcccgcacgccccgcccttcccgcgcccacgccccactcccgctcacccccgcgcccgcgagatggccgggattcgatttgaatcccgcctctctctctctctcctcctccacctcctccactactccggcgaaattgcgtcgttcccggccacgactcgccgcccccctcctatttaagcacgcccgcaccttcctctctctttttcctttctcggccgagccctcccgagctctccatcgctcccgcgcctctcatcccgccatccgccgctcgccgccaagctccggccgcactccgccaccgctagagccgtcgccgcaccgcgccgtcgacgccgccgggttcg

SEQ ID NO: 26006 - DNA, 1474 bp, Oryza sativa
tgctgaatgtataaaaacaaataaacaaaaatggagaaaagagatagaattagaatcagatgaaaggatattatctagtagagtacgagttttagaaaacagaataaataaattagaagtagaactagagaacataaaaattaactatgatattaaggcattaccagaaaataaggatatacaaaataccgaatttaaagagcaagtgatgacattaaaagacagtaatactgctaaaataattcaactaaaagatgccataactaattttggaaataaatatatagtaaaattgcctttcaaagaaattttgggagtaagaatactggtaaaggtaaaattatcacccaaggtatcatataaaattttagcactcgtagacactgggtgtacaaaaaatattattcatgataagtacttcataaaatgtccagagatagttcatacaattgatgataataatgcagaagtctctacagacatgtccggaataaagaaaattcataatcagttagcttataatgttgaagtatacattaatggaactaaatatataatagatgagattacaataagaaacttatccatgataagtgatgccatgataattggcctaaggtttttacaacaatcggtacaaaccacagtaatacatgagcaaggaattacttttatcccatgtcaaaacaatgtgccatatatctcagaggtacgaaagcgtggtggaaccagaatcaaacccgacaaccttgaagcactcagccttgagtctgaagaatatatatatatatatatatatatatatatatatatatatataggacactcatatggggcaccatggtgcccgggcaccatggtatctaatgcacaaaatcactcaaatttttcaaaattttcaaattgtgagtatatacctagttataataatttgattcatacctatacttatcaacaaaacaactcaaatttaactttatttcacaatccatgattacatacctaactaattatatgtatggatgctatatacctagaatcaaaatctaacaaaaacaagttcaaattcagttcaaacttgctttaaactagttagtaaagtagttaatgttaatacctaagtaattgaaaaagtttcatactcatttgaattgggtatatactcaatttcaacaatggtgcccgggcaccatggagcaccaaacaaatttactatatatatatatatatatatatatatatatatatatatatatatatatatatatatatatatatcacacacaacacaatggagagatatcctttagaatctcacacacaagtggaaaaaatgaattaagaaggtttcttggaggctgggttgaattaaggctcctactgtcctccacatactacattatgcatgaccgacacacacacatacatactccatccatctacttttgatagtcatatttctaaatctgaaaaa

SEQ ID NO: 26007 - DNA, 1082 bp, Oryza sativa
tcccccgtttgctgctgccaacaaacaaatggaataacataaaaacggagtattcgaattaacttgcaacagcaaatgcatttatgtcggattcctctctaattgttgtgtaggcatatcagatgacagcctgacagctgttttatttaagcataggatgccaaaattgctactgtgaaattattatcaacactttgctgattaataaagttaagtttgacaaatgaaggttcttggagcttacagcccaatccctctgttgataaacatataaaagatttgataaatatagttcaatgaaaggatgtggtgcagaatagttagattctgaagtaccaagatcatctcctggatcatagtcgtcatttgctggcaatttagcaatctgtgtcacctcatctttagacagatcaatgccagaataaactctagcattgcgagaaagggaatgctgtagttactctcatgacttatgccatggctcatcttctctccactctcaacagaatcagctttagttaacccacaaatctttgagccactgtcagctctacccactaaccgagatgccacatcttggctatcacctgaggttctttctcggccaacatcttcagggacaaactcatccatcattccaggtccagggcttgactcaccagtattgcccatattttcagtaagctcgggagctggttccacatctccaacaacactatcagttttatgctcagaaacatcaactccatgaatttcggcttcatgactagcacccataccaacactccctccactaactcccaggcttagttggtccctagcaaaagcaggagcagtttctgcattgaggacttcctcccctccattcatactactacctcctatctcccttgcattactttcagcagcaggctgtacaaaactgctttgcggtgcttggttgctatagttaagatccaatgcctcactcattccaccactcctgacagcactagacggcttgtgaacgtcatcaacatcacatggatggtattcaacactctctgttgaattttcctctgcactgtggactgtgtccatcg

SEQ ID NO: 26008 - DNA, 1655 bp, Oryza sativa
  unsure (1)..(1655): unsure at all n locations
gaaaatttcctcagagaatagtacgcgctaatggttgagaaaattgggggtaaatttttttcaaacaagctgatagttcaacagttgcccgaattgtcaaaagtgaggtattatccagaaaagcatcccatataggttgcactatagttcagatgcaaccaaagcgccaagtatagaacggagctaacgaacaaaggttgtaaccctttaataaaggagatgacccgagacatgccgttacccataatcaatttatttagggtcagggggccggaagcaagtaattgcgtacttaaggataggccctaatcaaaatttgtaggggaaatatatgnntgtgtgcttgcacacacaaacttccaacttttccatcacattgttccaatttcaatcaaacttccaattgtagcgttaactaaacacacccgtacacaaagcatagcaacagattaaattcctaaaagattggacaggacacgagcaactgcagtcatacacaaaccacaacaaatgggcaaacagatcctcagcttcggatgatgatttgtattaaaagcagacgattttcagcacggtaaacataaattcagaggttcaaattttgctcatatctccctggctcgcacttgaaaagaattcttatctcctagcaagccctagaaccaagcataaattaaaacaaaaggtacagaatgtcgagcacacgttctggatataagaatgctatatctagtgcgatttgacatagtcctgcactatgttaaggccctcagactcttcaccatagtcctgggaaatgaaaatgaacagccaaacattacaaattgccatcttcaaaggaataattccaagtgttaaggtgagggatcgattagttaccttgacaacgacgcaggagcagcccacaaccttccttgccttgccctcagagtcaatcttgcaaagctgcaaatgacaatatgtattgttaaaaccaggacaagaaggcttttcatataactgtnaattaaaagaaatacacagaacaaaggaaggtggacaatgataaatcataaatatacgtgccacagaaatgttcaaagtttccccacaaataaaacgaatatactacctccatccctaaatatatgacggtggttagttgaaaaatgaactaaccaacgtcatatagaaaagaacagagtataagaatatcaatattaacatatagtaggcacattctcctttaaacactggtgaaagaatgtctactcatcaattgaacctacatcctatatggccctcagtgacagagacaagagacaagagggccagtggcctggccccctccaacaattttttttcacataatcatttaagtagttaggtaattaagctaagtgacagtgtattcggccccctccaagagtcttaggcccctcccatgtttaaatcctgactccgccactgatgggtgatggccatataggcaccagttaacacaaacaaaggacaacaattaacaaggtatagctattaggacataggcagcagactaacacatatcaagaaaaacaattgacaaagtacttagaagaatcctgtaactcacccctggggtacgagctgaattcgccctaagtagatggaaaagaaaatcaaannnnngggcgcat

SEQ ID NO: 26009 - DNA, 664 bp, Oryza sativa
ccgctctggccctgatgaagaactctgttttttacgatcgaagtaagcacattcaaacaaaatttcatttcattcgtgaagccggggagaatggggaaatcacaccgagttacatcggcatagaagggcaacttgcagatattctgacgaagccgctttctcgaatcaagtttcaggagctgcgggaacaaattggtatgtttcctgtataatcggcacatcaagcttagggagagttttgttagcagtaatcttgtgtgccacggttagttagttgattagttatctgcatgtttccgtttttttctgaataaacgcatgagctcacgtgttgtgtgatagccatcgtgtggagtctgttatgagggtatccgagtttagctcgttgcccgcgtcttgtgctgggagctccgatcacgctctgtggttgtggggatggacgcacctagagcatggcgtgagaagtggtcttggcggctagttgtttcccctggattcgctcctttatatatgtaagtaaacagaaaaaccactgagaaaagcgctgcccaaaatttgttttgttcctctggtttgcgaaattgcaggctttaggcacaggacgcatgcgttgtgtcgtctggtttcctgctagccatcgcttgggaaaatccttacataatta

SEQ ID NO: 26010 - DNA, 1086 bp, Oryza sativa
  unsure (1)..(1086): unsure at all n locations
caagattccagcccggtctgaaggagtgtcaccttgtggccatgaagagaattcttagatatttagtgcacactcctaaccttggtctttggtatcctaagggagctaggtttgatctcattggctatgccgatgcggattatgccgggtgcaaagtggataggaaaaacacatcgggtacttgccaattcttgggtaggtcccttgtttcttggtcttccaagaagcaaaactccgtcgccctatccaccgccgaagcggaatatgtttcggcggggagttgttgtgctcaacttctttggatgaagcaaaccttgagagattatggcctcaatgtatccaaaatcccactcctatgtgacaatgagagcgccattaagatagccaacaaccccgtccaacactcccgaaccaaacatatagatattcgccatcatttcttgagagatcattccacaagaggcgacatagacattcaacatgtgagaaccaacaaacaattggaggatatctttaccaagcctctagatgaagctaggttttgtgagttgaggagtgaactaaatattttggattctcggaatgtggattgatctattgtatgcatgtttgcttggtataataggttttgcatagcaccttgtgacaaaatggtcattcaactcatggatgggcactggtcacttttgtggagaacttgaatctatgtgtatggggatctcatttttcaatgaattttggtcctagcacaacttgaaatagattcacacattccctatctcgagggtgaattatcttgtctcatggtaattccctctcttttgatccctcggatcatccatttgacttgtggctattgttttgtgtgattgattgtgtgctagtcacaagttcaattggagcatatagtgctcgaccatccctccattcctaaatcctatccaaatctttgcgaaatgtgtttttgtcaaaaatttcccggagctagtcccctgcaaaattcctttaaaaagtttggaaaactgtttcttcaaaattccttgcaaaatgngttttcagaaattttcgctttctgaaaatttttga

SEQ ID NO: 26011 - DNA, 1650 bp, Oryza sativa
  unsure (1)..(1650): unsure at all n locations
gaccatcaatttttaacggtattggggtnacaatggtggggtggtaattaaatggtnccaatgatatatattgatagatnntgtttcagancagtatagcgtttccagtgtatgctctccacatagattctggtgtatgtgcatgctgaagctcattcctctcttattacaagttcggctggtgcatcatcaccacttgcacaaacaaatgcagctagcatagattggttaggtggtgagccaatatccaaagtggaatcatcatcccagattgctccacatgctcctcggccttctcttagtactaatgctgctggagctgccgtggcaatagcagattcacacttcacaggggttcatttcaacgtggaaattcatcagaaattcgtttgcagtgatgatgagtaatactctccggtctcgacacaagcaaccagcacttgcattagatggatggggctctggaggtggtgtgcaactgggcgtcttcgaagatatccacatcctctagcttctcaggcttcaggcaagccgggatgtaggaggtgtagacggcatccatgttcggcgtgtctttcacgttgtgctgaaccacctcgagaggggtcttggcgaacgccgggtagaaccgcatatggcaaatgtaggcgaagatgaagcttattgggatgaggggcacaagaacaggggagtacaagaacttcttcagcaggatgacaccaaccatggtgatctggtaaatcagtagagctgcaatgatccttgtgtgcatatgtggccacattcgcccgttgctctcgtagctgggaacataaactcggagaaccttgcgtaaaagaaaggttaccccgtcacaaagtttatctagcaatggctatcatcagagactcaagagtattaaaaaggattgaaagcggatttcagaagttcatgctgaagtaggtttcataacctacattcgacaatgggaaactactaattaatttgtcctttccaattcagtttcaatattagtgtgttaaaacttcggttaaagcaagtaactcttggctcacctgatttttcactataatccatccaagagcaaagtaagcaacaccaaatggaataatcagaggtgcaatgacagagtagcacagcactattgtaactatgagcatgtcattcggaaccctggtgttatatcctaggtcgcctggagcccaagctgctctcacttcatcctcggtcttgcataggtacttcctcttcaggtggaaaatgataagagggaccaagcgagagagctcaagcccataaccaacaaagaatctggcaacaaaaacaaatgaaaagttactttctgaattgtacagacgtgtaggatggaaatagctgacaataccaggtacataatgtgagaagaaagcattgcttacttcagtgcaacaaatgtaaggaagaaagttgcacttcctggaaagctgctggcaagcatgttcacaatcccaggagggttattgattatggttgtcaaagcactgaacaatgtggaactaatagtaaccccaaagaagacattgaacacaatgaagtagaagtactttccttgttgttgcctaactgtatgaccctgtgaagggaatcccctccagcttgagaggaacatta

SEQ ID NO: 26012 - DNA, 703 bp, Oryza sativa
agtttttgtgggtaaacgggtgaaccatgcccgtatacccgttgggtataggttttgacccaataaaaaacccatgggtactaaatggagaacaaatccaactctattagtgtcgacgttttatgtcgtgattccggtatttgcatagtatggggatcgttggtactaggatatacgcgagactgaggtaaaagagatggagacggggatttttatacaggttcgggctcctgaattgtcaggtaataaccctacatcctgttggccgaagccggtattgctcttattcaccataatcataccagtacaatatttggggtagcctatctaactgttgtcgacatggcggtttgaaggtctgactcatagtcgacaatagggtagtcttcctcctcgagtttgtgctcggcgagatcagagatagcgcctttcgtctctcctgacagtatccggaagacaccgtaggggactagccgtgcctatctctgaagtcaatatccggcgtcttgtctttgcgtatgttagcttgtatgttgaatctttggcttgacctattgttcccgtgtatgttgattgtgggtggctttcatggggggtggtctcccctcttctcctagggggcccttgttttatacccataggtgttccctttgtccagttggaattagggaaaccaaatatggatccaatccgagtagtcctg

SEQ ID NO: 26013 - DNA, 10866 bp, Oryza sativa
gatggagatcgccgcccggccctcccctgttcgtcttggcggcagcgcaaggagcggaggagacaacgagatcgagacagttgatttctttttcttttacacgatatactcgactactccgccctttatctcaatatcaataattttttttgctactctcactgttctaaaataagagttgttttgcacttttcacatccaatttttgaccgtttgtcttatttgaactttttttttataatttgtatttttattgttattacttcctctggttcaggttataagactttttagcattgtccacattcatatagaatttcaggttataagattttctagcattgtccacattcatatatctatatcaggttagaaagtcttataacctgacatggaggtaatagatgataaaatatgaatagtattttacgtgtgactaatttattttaatttttcataaacttttcaaataaagagaattgcatgccattactttcaccccctgacacgaaatagccatttataaaattatgaattgcaaatttaccactgaaaacaattgggcagcgttaggctgcagcgcggtggctgcggcaggtgtcgacatcgactgtggtgcttgcggtggcttgtggcgatagctgcagcgggctgcatcaaagcaggtacaatagcaggttattttctttcttttgaggaaagtccacgggagatttggctggcagggatgtaatcatcgtttcaacctcctagacgaaaaccttgcatcctgccagattggtagaacttgtcttgacaaaatttgtacggggagatgtgttgagtagattggagcaacgtctacttctcctttttaaaaactttgcatcctgtaggagagtgaaggttggttttttggatgggataccattgcttctggatcttgtttctataccttatttgttgatctgcgggcctcggctgctagtagacgagtagttaaaagaggcggtgaaataacgaggactagaaaggtgatgcttccgacttgaaagaagatgaatgtcggctgggttgggcctcccaagccaatcttcattggagaaaccacctcctgtggtaatctcggcgaaacctccaagcaccaagtcccttatctgacatgctgctatcgatgggttagagctctaggatatgttacactagatacaagaggggagcaagctaatttagcataccacgatataactaatctggcgacttgtagtaagtggctaactttagtgcatcctcctggttggtccttgatgtggcttgtggctatagcttgcgattcaaagaaaattcaaggaaaaaaatatatgtaaccatatatgtagtggaaactatcattggattaaaaaatgaacgcctgagtaagattttactcatggttgactttgagaataatttttttacttttggtgatatggacaaatctcagacgtctatttttaagatccaacagtaatttctaagttttcactatatttgtggtttgcaatatatatttacccataattcaatacctttccctcgtaatttccactacatatatagtatttttacatgcagatgaccaatcaagtaaaacttggagactgtaagtgaggtacgagcagataagaagatcggagtcaaacatcttctcttaacggggaatgaatttccatcttatcggtaaaagtaccattccgtaaaaaactagttacatggttttcagctgttacaaatacaaataaatgaggtatatcttatcagttacactgaaaatattattatatttttaaacatatttgatatatgacctgaattgaattaaagcttatttgaacggatggttagaaaattatcatttccactgccacgaaaaatgttatgcagtagtaatactaatctactccaatggcatgctcagattagcaagatggtaatattgttaaaattttgacatgatttttatgtatttactaaatttgacgataaactaaatatatgtatttttataactttattagaaaatggtatgattgaaaatgacattaatcatatgccctaaatttactgacgtcttgtttggcaacttgagggaaggggattgggagtttacacggaattgatggtgagattaagatgtgaatttgatttttcatcctagtctcttgtttggtagaggtggtggaaattgatagggagtttagttaaagattagatcattaatgaaaacggatggctgagatttgcttagacgaagtaaaggaggaattccctcccaattatctgcccctacccaggtattgaaaaggagggagtttattcctcaattccccatcccatcccaccaaaattcccatatctcccaaccaaacaaaacagttaatagccttatccctctaaactaccaatcccttctgaaaactccctccaaccaaaaagaccgtaaaaagaaaaccaaccaaacagaccgtaaaaagaaaagaaaaggagagagagaaagaaaagggataacgcacggcgcacttcgaaacccctcctaaaccacgcgtgacccaatcgcaatggcgacgccgccggaatccctctcaccggctgcagcggcggtggaggatgattgggaggaggcgcgggggctgctgtacgaggcctacaacgagctgcagggcctggcggcggagctgggcggcgcggcggcgcccgcgccagcggtggtggtcgtcggccaccagacggacggcaagagcgcgctggtcgaggcgctgatggggttccagttcaaccacgtcggcggaggcaccaagacgcgccgccccgtcgcgctccacctccgcttcaacccgcgctgccacgccccgcgctgccgcctcctcgccggctcgggcgcgggggacgacgaggacgaagaggccggtgtcgccggccgcgcaatgccgctcgccgacatccaggtaccgtgcgcacacgtgttcgtggaaatgccagtgtcgtgtgttgcgcctatccgttccaatctgatggcatctctattatgacagcattattcatgtaattgctggtgtcatatgctagcaggaggttttgtggtgctaggaaatgatttatttgcgaaattggtgaaatataaaactcgtttaagaagaaccaggaaggggggaaatgagggcatgaggtgtatgaatgtaatgtaacgcacttcatttgtttgtgtgattatcctttctgtagctatgttatgctgtactaggctagcttaactaactctatctgtctactatgaattcaatgttgtggtttcggctagtatgatatcggtattaggtaacttaatgaatgagatcgaagggagggagccgtgttactgatattttcttaagaaaagaggattctagcctctatgggctagtacaccaactatgctgataaccgctagatgccaggagtctaacctttgccgattaaatgatgaatagatgctatattcactataaagggtagttatgtcaatactcaatataaatagttttgacgccaaactgatacgagaattttcccagttgttaattatttattattgtcaacctgaaacatcaatattttattttagctgtttcatttgtaagaaacaaatgttcacttgttgatttcattattatcaacttacagcttagaactcagagaagattcaagttattggactgttcttgcattaggtgattgacattttataggaatatttactttcaggcatacatagaagccgaaaacatgaggctggagaatgatccttcccaattttcagaaaaagaaattataataaggatagaatacaagcattgccctaatctcaccattattgacactccaggcctcatcctaccagctcctggccgtaaaaaccgagttttgcaggtatttccccctattcttgcttgctgtcagttaaggctgattcttttcagcctttaaggtcttttgtttccactgaaacttcactttctatgaccctactatgaactcctttttattatattaatatttaataaggttatccattggtaatcttgcgacctgcagagccaagcttgtgctgtagagacccttgttcgtgcgaaaataaagcataaggaaaccataatactttgccttgaagattgtagtgactggagcaatgcaactacaaggagagtggtgatgcaggtttgcactttaaaactagcttttcttatcaaaaggtgctcaatgacattctcatggtctcttgtgattccacattagttgtaccttatttactgggttactatgtttaaacaaaaggcgtgcttactatatcaagttcaaacttcaaacgttcaacacacaattattttgttaacctgtaagcagtgccagtaagctatgttttgtgtttccctttttcatactgcaggttgatcctgatcttgcaaggactgttctagtctccacaaaactggacactaaaattttacagtttgcacgagcctctgatgttgaagtctttcttcaccccccgacctgtgctctagatggttccttactgggggattatccctttttcacatcagtgccttcggggagagttggctcctgccatgaagctgtattcagatcaaatgaagagttcaagaaggtgagacatcacgtgccagtatcacttaacatagagatttatgttctgccaaagtgttcgaataattttcttttgctggcaagtttgatgggtgttactttgttaagtcactgtgagttttgtaagcaatatgtgggcaagccaattggtcatctggtcctatttgctgtgaaatttttacattatcaaggaagattacctgattattaaatgataaattagaaacaattattaatttgttttatatggatgcaaatctacattttaagtattgtaggttccagaatttaaaatttgcaggtaacttttagaatatagttatatatgtgaaaaacccatgtaggtttaaatatttttgtaggcagttgggttttactccgtagttaactattctggagttacactatatgtttcatgatagcttgtggatcttgtaatacatggaaatacccgatacttcccaaactctataaatggctacccttaaatatgctcccatatttctgcgcacttttatatgatcaagacatcacaggaagaaagtgttacaaacacataatcctacttcactactgcttatttcttagtttcagtaatgtaaatagactgatcacccttaaatattactgttcgggaaggacatttgaaatgtgacgaataacttctttgttgaacataaatgctgccagcattcttctctgttgtcacctgtttagtcagtttcagtatgctttttcgctgatatgaactctactaatctggtaacttctgtcttaccttcatccttgaattgcctctaatggttactttcattctgcaggccatctcattgagagagttggaagatgtcgcatctcttgaggacaagttgggaaggggacttacaaaggaggagaaaaacagaataggagtgagtaacttgagactatttttggaagaattgctgaggaagaggtatccttgctcattatagagctggcatgtgtatgttttttaattattcttcgtatcattgctttgaagtaatgcatactaatatggccaaggtacattgagagtgttccattaattattccacttcttgagaaggaacatcgtggtgcaacaaggaagctgcgtgaagtcaatcaagaaatcaggtgattcatgatgcctatcattcatagcacacttaaaaggatggattaatttcctccttaaattacttgtatttgtttccatataataaatttttctttggtgaagttgaaagcttataacgaaaacaaggctcaaatgttttattcttactgggaaaatcgctgccaactactagcacctaattgcaaataactgtcctggtggactatattagttgacattctagtaggctagtagcaccctcataaagattcaagaaccatcacgctaccatggtttatgttatctttcttcagtcccaatgcagtgctatcagatgcaaccttgaggccgggagctgcaacagtgcaacctccaattccttggcttctatgctatgcttcgccaaaacattcaatcatgagccaattacaagtgaaaattattccttgctttccagattgaccaagtgtagcagcagtaaatttattcactacttatttctggaatcacttacaaagttgagtgacagcctcaaaatctcaaccaatttatctccggaatagatccgatttatctgaaatctcatgctaaattatttgagcaatgccagaaccaaagaacaaatgatgaatattacacgggatattacaacaagaacatcaactgaagattggaaatttgttagccatacaatgccaaattgaaatttaactttgtactaagccttgccctgatgggtttgtttgagtcttcttagattcttttccttcttaatataatgatgcgcagctctcttgcacatttgattaaaaaaaaaagatccatcccaggcatcagcaataaatctttactgttcactgagtgaaatttaagcctcctaatattgaatggcaaggctggaagaagcaaaccaatgaccctcccagaataaaactcaaacatgttatttatttttcctttttccccttgtgtgcctttacacggttccaccatatatttatccctgttgttaaacatgcctgatataccctgctgatggtatatgtatctggacagtgatttggatgaagcaaaaatgaaggagaaagctcgcctgttccatgattcattcttgtcgaaggtgcttactactctgaaacatatattattgttgatgcagatagttggatactgaaacttttgcaatgaagaaaagttcatgcgttgtcacacatatgcagccaatgcccactggatctattgctcagcagctggttgaaataaacctgaatactgatttactgtttcttgtttcagttatctttgctattgaaaggcatggtggtggcaccgcctgatagatttggtgggtgttttatcttgtgcggctcggtaccagaaaacttgaggttcttcttagttggctgactttctgattttgtcaataatttattgaaactgttattggagtgtaggagaaactttaattaacgagaggataaatggaggaacttttactggaagtgagaatttcctgatcccaaacaaattgatgcctgtaagttctgtttttttcctctgtattgaagatgccctactattttctgtaggttcttattttgagcctttaaacaggatgtaatgattcttcactgtagataaacattttaatagattgtatctaaattggtggttcttgacgagcctaaagtttgttagcagtgacagattgatttatgtagcagtagagtcatttttctttcagataaagacaaaaagtctaccatatctatcgtcttttcagcctgttaaaacaaaattatccactgagtgtttgacacactgtcttttgaatatgcactcattataccttttcttttcttagaatgctggaatgcgtctctacggtggcgcacaataccatcgggcaatggctgaatttcgtctggttgttggaagtattagatgccctccaattactagggaggaaattgtcaatgcttgtggtgtggaagatattcatgatgggacaaactactccaggtagtctcattccatatatcaggcatactttgactatatttatatagcacatttactcattttcaactttttttgttaggactgcttgtgtgttagctgtggcaaaagcacgtgacacatttgagccttatcttcaccaggttggttagcttacctcatgggtgggcacattaataatcacatttagatggtcctgttcagctttcatgattgttattccacacttgagctactggaatagtacttgcttttgtgtgattatgtcaataaaatcatcaaccgatttttttcatgcacgtcccatcattttttggatcaagttcagaactagagtgtgccagggttccacagaaaatgtgtgaaatcaataaaaaatgtaacatgatgtataaacaaatttagtaattgaattaatttgttgtggtctgtatgaggggtgatatttcctctgcttaatccctttctgcgattaaaatctatccttaattatgtgcagctgggttttaggttattatacataatgaagagactgattccgatatctgcttttctgttggaggtactaattaatcctgaagttattcagttcaactagtattctgctcttttcttttgtaataccgtgatagaattccaacagaaagatggtgagaactgtagcagccatgatgtacttgtgaagcgtgtcaaagctgcatttgataggtttgctgaatctactgagcaatcatgtcgtgaaaggtaatactgtaagagcatccttgatttcaatacctttataattgtttcccttctagtgtacaactcttgttcaagtggtcttgcaaactcagttcaacaaactctttgatatcaaatgaaatgcatttccctagttgattattgtgctatcaggcatacagtattttatggtgttggcaaactagttagtttttttttaatagtggttctacttagaaatgtatcagctgaattataatatcattgaataataaagtgcaaatgaagtgaactgaatgagttatccgtatctttgtcatgtcttccctcctttttgatctcatggcattaaattttgtgcgttccagagcatattcatatttgaaaaatgtgattttagtggtttgtctcatgtaaatatgacacagaatttagtgttgtgtcaaagtaaaactttctgttattgtccagatttctcctgaatcttcatggcatgatgcattcatgcatattgtttgtacctgatggttcatggcatgatgcattcatgcatattgtttgtacctgatggcatgatttatctgcatgttgaaatgtgtaatgcagatgtatggaggatttggtgagcaccactcgttatgtcacttggtcccttcacaataaggtacagttattaatattaatcagaactagtatctttcgagggattcgtcgcattcctaatgatttgctacattgtatagaaccgtgccggattgagacacttctttgattcctttgttgcacaagagcaattatccgtgaacacacttactgcccactcgactgggctgcatgagcaatcctttggcttgaatgacaataagcaggataggccaaagggagacttcaaatcaagtaattcttcagaagcaaattcacccactgttgcatcagagactaggcttgttgatctcttggacagcacactatggaacagaaggctggcaccctcatctgaaagacttgtgtatgcactggttcaccagattttccatgggatcaaagagcattttcttgtcaccacagagcttaaggtctccctgcagtaaatcctgcactccttaacgagtatatgaagtttattgtttatatcttgttttgctcatcaaaattgcagttcaattgctttctcctcatgccgattgttgacaaattaccggcgcttctaagagaagaccttgaatcagccttcgaagatgatcttgacagcatatttgatgttactcagctgcgccattcacttgggcagaggaagagagatctggagatcgaattgaagcgggtactagtcttttgcgtattttttttttgcacatcaagcattactacctcagtattcttatttgcaaatttgctggtttcagatcaaacgcttaaaggagaaattcgcagagataaacaagaagctgaattctctccaggttagacagtaagctactctaggagaagcagagcaactagctactctagtcgagttagattatttctatgctgtaataataataatcccttagtgtgtaataataatagtctagtgtgattatgacttctttgttggatcttttcatgtgtaaatatacatatattaacccttccaatgtcgtttcccttccttgcaaaccgactaacaaagaacttttacgtgatgtttactgttcaattattacccttactttgctgtgagatgggttcactcaagctgaagcaaatgcaaatgaaaagctgcttatggtcacatcacatgcatggtagcgactgtttcaacccaaatccatcaccaaaaagcagcaactcttcttccccttgctcgcaacctctcaacccatcaccctaaacataggtattacccaacaccacccctctctctcccgcgcaaaccatggtggcttgctccccgcattggacaccgccaagaacgcggcgtcgtcgacgacatgaccggcggtgacaaggaccaccgccgcggcggcagcggcggcgggaaggagaccttcctacgcagcctcgaccgcgtgccgtccggcctgcacatcgacgccgacttcccctccgacgacgatgacgacgacgacgacgaggaggtccgcgtcttcttcgcctccaccatgggcgaccacaagatgtacagcttccgccaccatcaggccgccgtgctggaggaggaggaggaggacgacgacgacgacgagttctccaagtatgacatggacgaggacatgtcgatacaggagcggcgccgccgtcttcaccaggggctcggcctcgccagcagccgggacctcgcgctccggcgacat

SEQ ID NO: 26014 - DNA, 93003 bp, Oryza sativa
cggcgaagcccatcacgcggcgccggtccgacggctgcctctccgcgcgggacggcggctcctgtggaaagccaccccgccgtcgtcgccgtcggtgcgtcgtgttcgatccttgccggcccggcacgccggctgcgacgatgtctccctcgtcgagaagtttcgaaacgccatggctaaacgtgatctccccaccgccgccgtgcccccgacgacgccgccgccggcggcggcagcggttgcggcagcgccggtggataaaggccgcaccgacgacggcggcggcaaggaccgcgacgacgcgaccaagaaccaggagagcagcaaggaggtcgccgtcgtcgcggcgcccaaggatgccgcccccgcgtcgaacacccagaccggcgtgcagctggggctagaggagatcgagaagttcatcggcaacacccccatcgtgaagcacctgatgcggcgcggccagagccagcatcacagcggccagctcgcgtcgccctccggcggcgcgccgcccaaggccgagaagccggcgggcggcaagaagaagggaggctggctcaagaacatcaagtccgtcgccatcggcttcatcgacagcggcggcaacagcaagtcgaccacatccacgaccacctcctccgccggcgccaacgccacctcgtcgtcgtcatcctcggcgtcgtcgacggagcggctcaaggtgcaccaatccggcaagtcgtgcaaggagctcaccgggctgtacatgtgccaggagatcatggcgcacgaggggtcgatctggagcatcaagttcagcaccgacggccggtggctggccagcgccggcgaggaccacgtggtgcgcatctggcaggtggtggaggcgaactccccggcgtgcctgccgaacgacggccactcgggccccctcccgccgcatccccccggcgccgcgccggcggacgggacgtcgtcgtcgtcgacgccagcgctgtcccagctgtccaagaagtcggtgaaggggaagagcggcagggacacgctgccggagcacctcgtcgtccccgacaaggtgttcgcgctcgccgaccagccggcgtgcgtcctcgagggccaccaggacgacgtgctcgacctcacctggtccaagaccgaccagcttctctcctcctccatggacaagacggtgaggctttgggacaccaccaccaaggcctgcctcaaggtgttcgcccacaacgactacggtcagcgtcgccattgattcgtttctttgtttcgaaatcgatatctcttgacaataatccatctcaagaattgaattgaattgatttgatcgatcttgcagtgacttgcatccagttcaacccggcggacgacaggttcttcatcagtggatcgctggacgccaaggtgcggctatggagtatccctgatcggcaggtcgtcgactggaccgacctcaacgagatggtcaccgccgcctcctacacccccgatggccaggtatctactctcgctagtctaatataaagtgaattgtccgttttttctcatcagcttaagctttttaagttgaactagttggtgcatacaactcaatattcactgtcatttcatcttccatagctcaacaattccgtatccattttacttctctttttttctctgaattctgatgtgtgaacaattcgaatcaagggcgccatcatcggctcgcacaagggtagctgccggttctacaagacaacaggtagtacagtacattctctgttcttcattgactcatcagatgatcagactgacatccagttgcactgaagtgatcaatttgattgcggatttttttgggttttgttgcagattgcaagctggatcaggaggcgcagatcgacatcgagacgaagaagcgcaagtcgcaggcgaagaagatcaccggcttccaggtacatgaacacaatgcatcacactttgactagctgctgaaatttaagagcttggcaagaacatggcctaattgttcatcttggccatggccatggacacctcagtttgctccggggaacccctccgaggtgctggtcacctccgccgactcgcagatccgcgtcttcgacggcgtcaccatggtccaaaaattcagaggtgcgctggcggcggccatggatgagaaaatctcagctctaattgaaaatcagagagatcaattaatggtggtggtgtccgtggtggatgtcaggtttcaagaacacgagcagccagatctcggcggcgtacacgtcggacgggcggtacgtggtgtgcccgagcgaggactcgcacgtctacctgtggcgcgcggcgcgcggcgcgccgccggcggcggcggccatcggcagcatcggcggcatcggcatgaagcccaagacgtggtgcaccatccgctccttcgagaacttctactgcaaggacgtctccgccgccgtgccgtggccgctggccccctccggcgccggcggcgacgggtcgacctccggcagctcgccgtcgcggcggcagggcggcgtgtcgtgcaccgacgacgtgtgcagcatgccggcgaagagcggcgagctgggcagcgccgggacgccgctgacgcactccggccagctaggctcgccggcgccagaaggcggcaagggcggcgccgacggcaatgcgtggggattggtggtggtgacggcgagcttacagggcgagattagggtttatcaaaactttggaatgccgttcaggataagaggccagggtaacctgttctactgactactgaacaaatgctgccatgcgtatgaacatttttgatgattttattttttttcgtaatttttttatccattttcagaactgagaagtgtgtgtgcttagatctagtacatgtgcaatatgttcagttgactaccatatgtaggtagtagaattatggattaatttcgccatgtaacaagttagtgaattagtgggatgtacatccaactctacaaaatgaaattcattacatttgtctttgtaccaaatttgcactacacacaccataattatatagcacatgatactgctgtgtaaaaacaactagattagcaatatacttatatatttttagaaatatcttaaatcgtttaaaatctctgatggctggttgacattggccattccattcttcaacatcttcctaaaatcctagtggccgccatcggtttcctcttgaccttgtcaatgccgataaacataaactttcctcatggttaaaggggagttgagagaaaagagaggaggagagcagtggctttccagtttccccactaaacaacaacgctatccgaattcaaatcctattttccaaattcaacaagaattatactacgttagattgttttgaccaagacgtgtttattttaggctttcattcacttttatattttatcaataaaatacttcccattggccaccaaatgtgtggcaggggagaaggaaaaaaattaatgagggcaagattgaaatgtgtaccccgggacttaaggggatctatgttatgggggaaacaaatcctccaacttaactgcacgctgcagttgagtcactgacatgtcgatcccatttttctatagcccacatgtcatggtttaactgcacaacagttataggatcccttcccaatctacattatagtggggagctactagtaacgataaaatcagtttgtgattcaatagcatgaacattgcatctgaaagagtcattcacaatgcatcaaatgcatcaacttggtatgttggtgcaatttggtacaagaatttaaaaaatgtgcgctctagctagcgcaacaaggtgtgtgcaatttagtgtaggaactttataagttagcgtacaagtgcaacaacttgcaatgtgtgtgtgttttctatacaacaagttaagaagtcatgcgataacttaattatttcaaagaattttttgtaatatacattgtcagggctatggataccacatacccaatagtaattgactaagctcggcggaacccaccatataccaagtcttatatggaattatacttcgtatatagaaggagatctggataaggcatggcaaaaaagagttctacatggaaactataaagactactcggattgtatccatattggtctccttagttctacttgaatagggggacatatatgggtataaatacaagaccccctagggaggggaagacaagtccagacaaatcaagaagctcagttagaatagacacaaatacacaccgccagacatcgacatcaaagatcagcctaaacaaacccaatctggtgcgatcagtggccaacaaaagggatctagcgctatctccgatctcgtcgagtatgtattcgaggaggaagactaccccatcatcgactacgagttggtgttccatgccgccaagtcaacgatgactagataagttatcccaaatattgtacttgtttgattatgatgaataagagcaataccggctccggtcaataggagtagggttattaccttccggtgaaggagcccgaacttatataaaaatcatttgtctctatcacttttaccttaatctcgcatataccatggtaccaacaatccccataccatgcaaatactgtaattgtgatctaaaacgtcaacaacactgattgtatttagcttattttggattgtaagtactacttcagtgaaatccagaagcaagtaaaacacttgtttctcttagctagaagaacatctccggtccacctccaccatcaccggcaacagcttgcacctgcggcacaaggtgacaaagaagagacgccatggatggatggcgagctcagctcagctctgaatgggggaaatggcgaaagaatgtggtatgtagtgaccttttcttgagcttggagaaaaaatggtcggcgtggaggaggtcgtatgatctagggtaggtgctgaaggactcgcaccagtcatggtacatgccgaacagccctcgctcgtagatgatcggcagcgtgtccggcgagtccaccgacaccacgttcatcacccacacattcatgtccttcaacgctgccgcgaacctgatcaaggaagaagatgacaatgccattgatgcgatgcgagatgagatgtttggatgagagtggattttaaactgtcgagggaatgtccccttatttactttttttcttataaattcaatgcaaatagttgtaaaacattataaattttttttgataataatatagaatataacaacatctatcagtacataaaaatcaagttaaatgcaacctacagataaaaaattcgggtgtaatatctcgatgagtgagctgagtttggatttaaaattttgtgaagtgatatatctatatatcctgtatgggtgttgtcaaaaaaattttaagatttttttttataatcgtttgaatggttttttaaaataaactggagggatcaagatagtttccaatcgtgtagtggtgtcgtacccgccgtagacggctagcttgtccatgacgttcctgacgttgctccagtcgatgctgacgccagcgaggtacgagctattgacgacgtggccccagtgccacatcccataaccacggagtccggcagggcgtaccttcctccagcctactacactctctcgaaagaagagaagattcatttgctgacatgtctgagtggtataaaggttccatctagttactcatcaaaaattaggaggtttgtttcacttcaagaccttaaattgatagtaatgaagtcgcatgattgccacgttcttatcacacagcttttggtgggcaggcggtgcatgcacgcccgcagcgtgatgttccacgtggcgtcggggtcatcgtcggcgtcgcagagcggcagctccgtctgctgtagcgaattctgtccaattcaaaaaaaaaagaattatatgtgacgcggtaaaaaaaatcgaatcctattatatgtgacacagtactatatatctctatcctctctatctctttctcttctctactacttaaaaaattgaaacgtttccgtcagccgtaataacgaaaaaatgacgaaaaaaactttaaaacaaagaaaaaagaaagtccgattcaatttacttccgtcgtccgtgaaaatcttatcttatcttaatctcaatctttccgaggggaccgagcggcgccctccgttcctgcctgcgcgatgaaacgccggccaaagcaaaaaaaaaaacaaaattgagcaaaggaataaactagattgaagttcccaaaattaaaagaggataaacaatattgaaactccccaaactcaaaaagagggaataaaataaattgaaatttcccgacaaaattccccaaattcgaagggccctaatttcaggtaagaaccctaagagtcaaaatccaaatcaattaagataagggtttgggttacttgccggacttgaagcccctaagctcaccggagctttccgggaagggcaccaccgcaccttcaccctcctcacagtcgcgtcgggttccccgtgcgcgcgctatcctggagcaccccttcaccgtcccttgccgaagacgggaagcgtcggcttggcgttgcccctcccgccgatgaggtccaggccgctcggcgctcgtcgccatttgcgtgcccgcctagcaggactgccaacgccatggcaccaatttgcgccgccctcgggtgcgcccccagctggcgaagcaggagccgctcggcggtcgtcaccgcacgcacgcaccagctcaccggaccgccatcgccgccttcgccgtcgttccgctcgctggtccccggagagaaattggatcaggagagagggatttgggagctagggttttgcccctctctcctggtcggcgcttcatccagcgcggggacgatcggagctgtgcattagatcggatggcttagattcgcccaacgtcgagctgccgtcgccgctgattacgctacgcccaatgggccgtggaagtgcattgagccgtcctcacatatgtgggctgcgctcagctgctcggcttgcgggccgtcgaattaacttggctcgccgaagatgggctcgttgaagtttgggccagcttgggaagatccgggccaaaagaaaatttgatcaaccaatgtggctcagatttttttaaattaaagtccgtcggataaacttctaagtaggctcgaaaaaataaatctaaaactaaatcctaaatcctatactaattcatcaaattagactcggttctacctatttgttcatatatcaaattagacttgatttttaccgatttgaggttttcaaggtgtcacactatcaaaatggtgtttttcccgttgcaacgcatgggcactattgctagcagagtataaaactaaaaatagtttgaaaataattatctataagcaacgatgacgaagaaagtttgtggagaattcgtacttttgaagcatggcaggtgttattaggttgatattacatatttatatgtttgtcaaatacaacccacaatgcataccacacacattcctgaaggttatatttctagttactatgaataaggtaatggcagaggtgactattgatataatcatgcaatcttaggtcccatagacttagaattttctttaagaactgcctttctctgtgtttctttactgagattttgcacaatgctctgaacaatacggtacggacttggttgctggtgctgatcaaatattggtcacatggtgctgtacaccgggatatgttttgctgttggtcctcttgcacggctattaacaatcctgaagaggatgatagacaaccttttttttgaaaatttcattccgaaattatggaatccatttgacaaatcaaaataatatataatcgcaacttcacaaagagataaaaaaacgcaaattacattggttactaaaaaagtactatgacttgaatgtagaagttgataacacataactagcttagagcgttagacacccagttatgttcgatcactaagctagcttatggttcaatcgtgatattgatggtggcatggctggcagtgctgccattgacgtcgtcgtcattgctgacaggggcgacgatgctggtgtccttggcgatgggggcgacggttggcagctcaaggttcttatcctgcttcttgggtgtggtccggtagtagatggcatagaggatgagttgcatgatagcaaagagcacgccaagaccattggggatggtgatgaagatgtcgaagcggatgagcgcgtataacgtccagcaaaggccgttgaggaagctcaccaccgatagcagcaacggcatgtactccacgctcttcgtcttcacaaccatgatggtgagtggtgaggagtacatgatggtgccaaagatgacgcagaggataccgacgatcaaagagcgcctctgatgggtgtgcgcgcccaaaagcacaccgaccgctaccgccgccatgaagagagcctccgtagcgagcaccactcccattttcttcttgttcttcttgtcggagaagaggaagaagatggtaaggtagacggcctctatgacgaggctaatgccgttgatggtgacgacgaggatgctgttgggatggacgatagggaggacgtagaagacccaaagcatatgcaattgagtagcgtggccaggtacgggtccgccttgaagttctgcacattcttattcttgatgatccgccagaaaatgggcaccggcgagaggaagaggccaaaggagatgacgttgccgacgatgcccaccacgttgcggatcaagtccggggacaccatctcgccggctggtggcggcggacgtcgatcgccttcctgtttgcttggtttgcgcgctgaaaatatttcaggctgaaattgctcgcctgatcgtacacgtagcggttggtgttggtttggttggtagctcgttgaagcggcgtagggctggatttatacacgtcgcgtacgtccgaggtacgctctggaatctggatagggtcggtgtcggagtcccggtgacggggaacaaaattaggaaagctcgttccgtgtcggccaccatttccgagtcggaataagttcatctgaggtcccttaacttatcaacgaattcgattttcgtccttgaaccccaaaaccagatataacgggtccctcaactatcaaaaccggtgcatataaggtccctcggcggtttagatggtggttttggctgacgtggcagctacgtggcgaatttgactcggtcacgtggtgcttacgtggcaattcgaccaaaaaataataataaaccttgtggggcccacatatcagtttcatatacaaattaataaaaatggtgggacccacgtgggccccacaagtcattctcaccctcatcttcttcctcctgacctcaccatctgcggccccgccaccgtttccaccgtcctccacgccgctcactgacctcgacggcgtcctcgctatgggtggtggcgggcgagctcccgcttctctccacctgcttccccgccgccgctgtcgaagacgacgacgccgatggcgacgggtttgaggagggcaccgggccaccgatgcggctattgggcgtcggcggcgcgggagcagggcggtggcggcgcgcagggccacagggtgcaagcggcggtggcgtcaaggagggcgtcggcggcgcgcggggccccagggcgcaagcggtagtgactagtgactggcggcggtggcgcaggagcggagcgtcgggacgcaagcggcgccgtggaggagggcgtcgtcggcgtcgggcgcccttgatctggtcggccgccagcttccggaagcgaacggtgagcacgtcgccattttctccttctcccctctccacgacttcacagggattggaaactgcttgctgcagttgctgttcgattctatttctacaattctactcacgatacaatccattatttccctcagtaaatcccgttgaaatttgaacaaaattcagtgccaaaatgttcgctcacatcacacacgctgcagcatgacaaacaaatgttcgctctacacacttacgaaccaccggatttcggcggcggctgctacggcgacggagtgcagattcatcaccctgacgaggctgctaccgtcctcgccgtacctgatgaggtggccgtacatccgcagccagtggtcggaggcctcgtcgacggtgcggtaggtccagatgtgtggtctgagccagaggcagtcgacgtgctcaccccacgtgcctcgtcttccatgctgatagtggctgcgggggggtcttcgtccggtgctccagccgcgggcgaggctgacgcagccgcagccgcagccggcacacgacgccatcgaaggtccgtgacgtgcctgtcgtcggaccggataccggcgacgccgaggccgggcaagcactcgacgaggttagcctcagctcggtcaccgttcctgcctcagtggtaacagccgaagcaggtagaggggctggagatcatcgaggtcgccactggcgagcggctgtcccgccggcttcgtgcgccgccgctccggctgccgtcgccccactccgcccgccgcccaagtccacatcgtaggaaagaagagagagaggggatagcaggaagaagagagcagtgaggatgacatgtggggcccacgtgggtccaaccttttttttttgaaactgaccatgtgggccccacaattttattatttttctagatcgaattgccacgtcagcgccacgtcagataaagaccaagtcaaaatagccacgtaagcaccacgtcatccaaaaccgccctctaaaccgccgggggaccttatctgcaccggttttaatagttgagggacccgttgtatctggttttggtgttcaaggacgaaaatcggattcgttgacaagttaagggacctcggatgaacttattccttccgagtctgagcagcgtacggcccatgggccatggccaaacggacagatcagggcccgctgggctaactatgcgtgggatggagggagttcatgtttcgctcttgttcagttgtttgtacgccatttgtttcggttgaggtccccaactacccatcggttgatctagttttattataagctgtaacggcttattagcgattaaaaaagatatgtaagtaaaatttttttgtatatatgttcttagtgatcgaaaagccaaagtagaaaaaaattatgttgaaaaagaattaaaatcaaattcaaaattaagttttaaaattcaaattttggctttggcttataagccatagggcaaacaataaggccatgtgatttaacgaaaatggtattttgcgggcgcgttgagggagaatactccccagatcgaccccagtccagccctgcacgaggccttttttttttttttggctgtcaccattcttgtaggagagaacccattctataccatcgagtttgttcgagtccaacgatttgccatcgacattatatctttctatagtataccagcgacttttatcaattgttctacgatataccattaagttgagccttctttttaaaaatacctaaaatgcccttatagacatataaggttaacaattgatttatcctattagaagtttcagaaaaatatgaaaacttttacgttgcctctataaacaacatggaaattcgtatagaagtttcaagttgttacatttctattttttataaaaaaatataacttatttgttatatgtcatataaaatactttttattgttgtttataatataaatcatatttcataaactacataaggtatttttgtggtattatctcttttataagcatattttctctcatatacgacataaaagtattttttttctaaaaattaagtatccagaaaaaacttgaaacttgtatacaaacttctatgttgtgtacataggccacagaaaaattttcatatttttgagaaacttctaatagaataaatcaattgttaattttttgtctctagggtattttgggtatttttgaaaataaggcccaaccaaatggtgtattatagaacaaggtgataaagtcgttggtatattatagaaagaaacaatgtcgatggcatatcattgaactcggtatagaatggattctctcttcttgtagtgtttattattgctattatttgaactagaaggtagcccgcgcattcgcgcaggcattattttagtttgaaaatttgtccaatgtataaattcaagttcaaattgaaagtaagatattttttcctttttctaattgagcgttcatcggcactctcttttcctaagaaatttgcagaaactttgatttctaacgaatgtattttacttgtaacattaggctagtgctttcttaagattggatgcttgggatttttggtcagtgtagtgctgaacttctaatacttataattgattgtccgactggatttagatcgatccttttgtgccttgtaagctgtatatacacggacgaacaccgtcgctagatcggacatgacggatttttttccctacaaacggatgggagtttgtgatagagatagagaattggacatattcaatttttttcgcttttttttaccgcgtcgatggaatcggattcttttttttcgcctgatttttttttttcacggacgacggaaacatttcttatttttttaatagtagagattaataaaatacttaccattggccaccaaatgtgtggcaggggagaaggaaaaaaattaatgagggcaagattgaaatgtgtaccctggaacttataaggggatctatgttatgggggaagcagatcctccaacttaactatagatgcaagtcactgacatgtggatgttattttgctatggcttatatgtcatggctcaactgcacaacagttaagttgtaggatcctttccttatttacattatagtgaggagctacgatagtaacgataaaatcagtttgtgattcaatagcatgaacattacatctaaaaagagtaaattgcattcacaatgcatcaacttggtatgttgctgcaatttggtacaggaattaaaaaatgtgtgctctagcgcaacgaggtgtgtgcaatttagtgtaggaactttataagtgagcgtataagtggaacaacttgtaatgggtgtgcgcttttgatacaacaagttaagaagtgatgcgacaacttaattattacaaacattttttaatacacgttaaattttaagtactactattttgtcaatatactgtgtgtatttttaagcatgtttataatttcgttcagacaactgaaagtgaattaaactttactatgtagaaaatattatatttcggttgagatttgagaatatgaagaaaaaaaatcaaaccagatgtgcaaataggatgtgtaacgtaattcttagagattgaattcaagattataaggtagtatctgtaggattgctatgtgatgacatattgacatcgtgaaaaaaactcaactagtattttttaaccaaaacaacgtgtacctagccaagttgttgcagcataatactaaattactaagttcttgtactataccgtatccttttactgagttgttgtatggtggttcaatttactctcagcctcatcggatggccaaatgctttagctgatcagccatttaagtaaaataagctaaccaatatgcattgaagtttggctaaattggaggtagctttggctgatcagacaaagcatttggccatccgatgaggcgctctctaaacaatactgtggtggcgtgtacagtagctctatcatctcatccgcccattctagaactaatggtataaatgcatgacaactagcaaatgcaccgcgctgttcacctctactggttccggatcccatttgcagaaatcaaaactgctcttcaaacgctcaattatggtttatgctcttgtgtgacttaagtgtacttgttaacaatatcacaaattgccgcgcaaactaaattgtcactcactatgcaaactaaaagttgtttacgttttgggctaaagcaaaaaataaatcaattcacatgccggtagcatgagaaatatggtgcgagcggaacaaatgagcatttcagaatcaggaaaaatccctgccgcggctgctagacaatatacaggacgaaatcaagctatggaagatatgtggaacaacaaatatcacgagattatctgcctagaacattttcattgttttagtagtagcttctttctctcccctctctctctctttcaccattttggtgatcttgtaaatactttttcatcccctacttaatataagaccagctttgctggcttcgttttttttaaaaaaaaagttgtttacgttttgggctattctggccttgtttttctttttttttcttcaatagaaaagacaggaactatgtccatcaattaagggtgatcaagatccacataagagccaaatgtaggccgactgggatttaagatgactgttcaggccttgttgtctccaataatttgtccccaatttgtttcgttcaatctcgcttggaaaagtttgtattaaggatattctagccgatcacgtgtaatcagctggaatatccctaatagtttgaacatgcctcaattctacacaaacctactgaattaaccatctctcttttgtaaaacttgtatacaaaactcaattatgacatgtctaatttctactcaaatctaccatcatttttttattacaacgtgccacaatatttgccaaaactctttttctggtgctaagcactactagccatgatcatcaacttcttccctactagctcgccgtcgtcgccgccttctcgacttccttgggccgccacatcgtcttctcggcgcagagcatcacctctccctgcttggacaccgtcatcctcacctcccagtgcaacgacctcaggatgctctccacctccgccgccgtgtcgcggccgtcccgcacgatcagcttcccctccggccgcaggatccggtccacctcgaccatcaccggcaacagcttgcacctgcacaaggtgatagagaagagacaccatggatggctagctcagctctgaatgggggaaatgacgaaagaatgtactccctccgttccacattataattcgctttgacttttttggccaaaaaagtcaaagcgaattataatgtggaatgtaaggagtagtatgtagtgaccttttcttgagcttggagaagagatggtcggcgtggaggaggtcgtatgatcgagggtaggtgctgaaggactcgcaccagtcgtggtacatgccaaacagccctcgctcatagatgatcggcagcgtgtccgccgagtccactggcaccacgttcatcacccacacattcatgtccttcaatgccgccgcgaacctgatcgaggaagaagatgacaatgtcattgatgcgatgcgatgcagggtgtttggatgggagtggattttaaaccgttgaggggatgtcccgttatttatcttttttcttttaaattcaatgtaaatagttgtagaacattctaaaaaatttaataatgtagagtataacaacatctatcagtacttaaaaatcaagttaaatgcaacccacaaataaaaaattcggatgtgaacagtacaatactattcatatgttaaatttagttttttaatatctcaatgtttcggctgagtttggatttaaaattttgtgaagtgatatgttgtatgagtgttattaaaattctttaagattttttttataatcgttggaatgtttttttaaacaaactcgaggcatcaaaatagtttccaatcgtgtagtggtgtcgtacccgccatacacggctcgcatgtccatgacgttcctgacgttgctccagtcgatgccgacgccggcgaggtacgagctgttgacgacgtggttccagtgctcctcgtccgccgcgaagtcgtctggcgccggcttgccgtagacgccgacctggctgtgcgacagccagtagggcgccgccgacatccgctccggccacagctccggccaccgcgcgccgcggacggacttgttggtgggcaggcggtgcatgcacgcccgcagcgtgatgttccacgcggcgttggggtcgtcgtcggcgtcgcagagcggcggctccggcttctcccggttgctgtagcagccgttgctcgtcggcttcttgaagatcaccatggccgtctcgtccacggtgtcgttcgtcttcttcaccatcttccagcacatggacttggtgagcgccgccatgtctgcgtgcggcgcagcgcggcgcggcgaggagtaagagcgaggcatatgagatgagaagaattaatgggggaggggagctcaccgtgccagatctggacgtcctccggcgtcttccggtagaccggcgtggcggaccagacgaagaggccgccggggcggaggaggcggttgacctcgaggaggagcttgccgccccagatgtgccatggcacgcggcagcgcgcgcagtggacggcgtcgtaggcgccgccggggaaggggaggcgcttggtgcccatgacggcggagatggccgggatgccgcgctccagcgcgaactgcacctgcgcctcgtgctcgtccttgggcgccagcgacatggtgagcgcgtcgcggtcgaacaggaagccgccgaagctggccacgccgcagccgacgtcgagcacgacgcggctgcgccgcccccacgccaccgccgggaccgcctcctcgatcaggtcgatgtagtgcgccgcgccgtttatgaactgcgtcccgccgccggggaacgtcaggtgctcgccggagaccttcacccagttctggtgccccttgtacgacgccagcttggtgtgcggcacgttgtggtaccagatcttgtcgcggctgtacggccacgggatcggccgccggtagccgccggggagcgggacgaggcacgtcggcgccgcggcggggcagtgtcgctcacggtgctcgtagtgcttggtcgtcttgagcttcttgatcgccgcctcgttgtccaggcacgggatgtagtcctcgccggtgctcacgttgcagagcttccacccgtgcgccaccgccaccgccgccgccgccgccgtgtcgctgccgttgctcttgttcttgtttctgtcgcgcgccttcttctcggcgctcgactccgacgcctgcgtcgggaacgagccgttctgcgccaccgccgacgccgtctcgttcagcagctcagcctggccgctcgggaggagctcctgctccgccgccggattgatcttttcggtggcggcggcggcggcggcggcgctgttcgccggcgcgtcgtcctctgttgtttgggagactgtgccattgctgctgtccacggctgcgagtgtcgtcgtcgtcgtcgtcgtcgtgttcgagtcgtcgttcatgtcgctgatagtttggttgttcgatgacgcgccggtggccgtgtcgtcgtcggtggtttgcgcctcgccgccgccgccgccgtcgtcgccattggtgggaacttgttcggagctcttctccgtgaccttgccgtcctctgccaccgtctcgacgccgtccatcttcccgttctcgtcgtcgaatgacgtctggttcttcgacggcgtgccgccgtcgccggtcgccttcgcgtcggtgggcgtatcgtcggagctcttgtcagccttagtctcggtggaagcctcatcggcgttctcgccggcgtccttggtgtccctgggctcctccgccgtgctgttctttttccccttcgtgtccgtcgacggcgcctcgtcggcatcgccgctggcttggtcgccggtgtccttgccgtcggttggcgcatcgtcggcgctctgcttgtcgggatcttctgggctcaccacctcgccgccctccgtcttgccgttctcgtcggagaatgtctggttcttcgacgtcgtcgtcgtctcgccgtcgcctaccttgtcgccggcgggcttgccggactcccccgcccccgtgcctccggtggtggtcttggcgaccgcatccgtcgccgtttgcgtgtcaacgccgccgcctttcacgccggtgtccccgacgtcgtccgtcgtcttcgccgtgtcgccggcatcttggactttcttgccaacgtcgtcggctgcctcgtccgtagttcgcggcgtgtcgccgccatcgccgccgccgccgcgacccttgacgccgtcggtgacgtcgatggacgacgcgtcgtcctccttgaccaccgccggcggcttgtcctccggcgacacggccatcgggacgtttcccgtcgacgacatcatccacgcgccgacgaggcagagcgccacgaacaggacgatggtcgccgtcgagcaggacgacggcgaagaacggcgtcctccgccgccgccgccgccgttgccatccagccgctggtaccgatcccgatcaaacaacggcatcttgtgacaggctcacagctagctcatgcagtaggcacttcacactctctgcacattcacacaggaaaggcttattagcctcttattttggagtgaacaaattatgtgtaaattgatctgggatttgaaatccaaattccacatcagtaacaatctaatcacactgatcaatatagcatattattactccagtaagaaactgtctgagtatcttatttagacagtttatttgtttatgttatgtggacagagacactgtctgaaatgttgcaaatgctaatgacaagaaacaataatggaattcctgtttacagatcagattgtttgggttattactacctacattatacaaaagaaggtgatctattagttaaacatgcgccaaaattcaacaaaattaagcacaaatgaaacgaacatcctagcataattagcaaccaagaaacagtacaacaaaacaacatcctggattgaaactgacctgatgagtgatgaattgaacacactcaaaaaaatctccaaatcaattgatcctcaaaccaatcgaacggttgcgaaagcgagatcaaatatgcaccattacttatatatgcagctagcagccacagtactagatcgatctcgagctgttgctttgcttgggagaagagaagaagaagaagaagtgaagtagagagagaaagtgaggcagatgaagagagagagaaattcaaaatgcaatctaccccgtttctatttcccaacaagaagcaaccggggcatggacgcatgcgtcgtctccttgttcctctcgttggctaatcttttattagcgcggggagtttgtgttaagggaggattacgcgggaagcgaggagaaaatggggtgacgtccacgaacaccactctctccgggtttttggcgccatcaccatgcaaaattgcaaactatgcagaaatggatcgaattaattaattagctggatcaaatcaatgggaaattaaagagaagttttcattcacgaacaagggtcgagtgcttctcaaattttggcgattgaatggggaatatttcttatatatggccacatttgaaacgcaggatataataaacacaaaaagaaattagaaaaaatgcaggaattgaaggggtgtgtttcttttatcttacaggaatgaaaaacaaatgaaaaatgaagataatcccttcaataacagaaaacaaacaaagaaaaaggtttccaaaattgttggacgtcttcttcttttttcctatgaaattggctatagaaatgcaatcctatgaaaaatttccattcccttcttacgaacatataaaaattccttagaaaactgaatcctccaaaatttgtaaagcaatcctccaattcgaagggaccttagagtaaagatatatcgttgttgagatatgaaagtaggtgtaaacataattatatttttggaacggacgaatacattgctggaaattccatggtgcaggatgaaagatgcatgtacttactggtgaagtgtagctgactctacaggagttgacgcgtcaaggggaagcttggctggctaatcctttccatgcattatataccgttttctttttcatgcttcttatacacttcgtgtgcaactaattaatagagagtaaatttcataaaactgcaactttagtgacaaaactatcagtttgctgcaacattagcgacatgtttcagtttgctgcgacaatagtgtgggaaattatcacaaaactgcaacttttacgttatatgctgctacagtactagttttgtcactaaagttatagtttttggaaatttactcattaataaatccgctggttaggagtaagcatgcaaaagttgttcttccacctgttgcaacatgctaacatatcctgtttttctttagcaagagagagcaacgactttcagcctcaaaattgcttgctcatagtcattgcatcaccaaactttaagcatctacggtttaaataaatactaaaatggaaaaataataagacaaacaaattaattatccacacgatcttgacaactatacactgaaaaagttttgaggttttagtcttcatgacgatacctccaacttcctaaggagtaaaattcgtgtgctcgtcgctagatgcaatcaacaaagattatataaagggatttcaccaaatctcaggtattattctcaactaacctcgttaagaccaccacagcaagcaaaaataagtcttggagctctactcacttattggtggaacatctggttagggaggaattggaggatttagatcagcgagcccgtcgtaaaagctgtgttatttaacccttgtaacctctcaagtctcaaaagttgtaacctcatctattctccattttccctaaaccttttgtattatctgacttttactctttctcagttatatccggcagagcacttgtcattgttggtttcagaaaaagataatgtattagaaaagggaaagcgaccaatttgattctattgcaaaaacaagcaattaaagcctagacatggagttttcatcctatggaaaaaaaatacaatagctctaccacaatatttaatccaatcctatggatgcacatggtcattataatttcaaagtctagtttaaatcatatttcatatttgtaacctaaagtaaaaattccatgcaactggactcccaaaattatttccaacagattattcagcatcgatatcaaaatcagtaatgtgagctatgactgtgtgacagaaacccacggttcatctttccaattgagcacggaatcctgactcctagcagtttgaatgattttctccaaattttggtcaaatttactgttttaattttgaattctcaaaaaccatttaataattaactcgcactccacttttatccaacatcaaaaccttcaaaagtttacaatttttgtacatttttatcgcaaacgtgaaccctgtagagtgcagacacgattctcgcgtgtttacttttctacttcttctgtcctaaaaatatatatggtactctcttcgtttttagtatacgacgccgttgactttttaagatacgttagaccattagtcttattaaaaaaatataattattatttattttattgtgacttgatttatcgttaaatgtttttttaagtatgacttaaattttttatatttgcacataaattttgaataagacgaatgttcaaatgtttatcaaaatatcaacggcgtcatatattgaaaaatgagcagtatgagatttaacatattttagtactatatagatttgaatagatctttcttcatatttatatagtatcaaatcttttattataggttgctatatattctacaacaaaagatttaatcttcccaaactcaaacaaacggaaaaaaagaagcaaaccactccccaaacggccaaaccccccccccccccccccaaacccttcctctcccctcgactccggcgccgacatggccgtcgtgcaccgcatcctccgccgcgggctctccgccgcctctcccctcccttctttccgcggcctcctcctcgtctcccctcaggtaccacctattcacgctcccctcggcgtccattacccgcgccggcgcacggtttcttgattttttttatcggtgatgtttctttcgctttccccgcgaaggagctcggcaggcgtccggcgagctcgtcgtcgtcggcggcggcggctgcgggggacgtggaggctgagctgcgcgccgcgcgggaggacgtcaggcagctgctcaagtccaacccctgccatcccatcctggtaccctgtacaaaaatttttagattatctgtctagctgtcaaattttgcatctgtaaacaagttcgttatcactgtgatatgtagtgaactagtgctaacaatatggtctatgtgattgcgtgtttagttaactggtagattatgctgttcgaaccaataattttagactttgaggggatgactgatgaggaatagctatttttttttagtattcgctatatttgcgtggttcatggttgtgcatcttcttgatcaaacatgcatatttatgacatgtctgctgagttaccattggtttcaggttcggttagggtggcatgacgctggcacttacgataagaacatcactgaatggccaaagtgtggtggtgcgaatggtagcttgagatttggagttgagttagtacatgcagctaacaaaggtagtggcgcgtctggtccattaagtatcagttggttcctgatgcatatatgatgattcttacagtagttctctgctgcaggtcttctgaaggcgttattcttggtcattcccatcaagagcaagtatgcaggtgtcacttatgcagatatatttcaacttgccagtgctacagccattgaggtccttctggcacttctaatctaatctaatgatatctatcattcaaatagttcttccttatttagtggtgatatgactgctttggctttcgcatttcaggaagccggtggccccaagatccccatgatctatggaagggctgatgttgctgatggtgaagaatgcccacctgaggggagacttcctggtcagtaacttttaggttctgtagaccaaatttgttcataaccatgatttgtcgtctataaacaaaactataatgctgtccctttagtgtcatgtcataccgatctcaagttactattgcagtgggtcatcatcttacaacttcatttcccagatgctactttcttctaattcattaaacttagaatattgatatgttctagagcattgaaatttaattgatatgcgtttcaaaacacagaaataaacttacaaatttactctatttgtcctctccttttatctcaatttacgagttacatgcaatgcaactgagatacctgattgatgtaatccttttcaagcttgtacacctctcactttaaggaaccacccatatcaaaatctttatttgtctgttgtatgtactcacaccaaagtatgttaacgtagtgtcaataatagaggacataaatataattgtaaattttttcttgctactaactcattgtaggtggcctgttatttttaaacagataatggtctgcctataataggttgttgcattcctggtaatgtttcccaggtccaacttatttagaaggtttaggcagggtaccttattcatgtatctgtggattttagtttgtgaaataccaaaattggtgtgaacagactaaaaaaaaaagaaagaaacaagttatgaaatattgctactgtgagctctataatctggtgtaatcacattttggatacgcaaatgtgcaagaaaaattactccagttacaatttaaggaaaatttaaagctgcccatgctgcgcagaataaaaatcaggcatgtgatcgtgctttgcctgtgaaactgatgaaatattgcttccctagtcttgctgcaatttcagctgtttggtttttgtaatcacatggcattgatatatttcctgctctgtcgtatactgacgatgatctaatcctctttccttttaatgttgtttctgttggtacaatgttgttccctgcattttacatttccaccctttcagctgctgacccaccttcacctgctgaacacttgcgagaagtattctacagaatgggcctgagtgacaaggtacttgcaaactggttgattcaatattccaaacaacttttctggggggtttgcattggctagtctcatctgtttcgcgatctgcaggaaattgttgcgttgtcaggagctcatacacttggtcgagctagaccagagcgtagtggatggggtaaaccagaaacaaaatacactgtatgtaacttacagcagttggtattgttctgattttaagaacaccttgtccattgatgcattttcgagtattgcatgctatttagttattactatttttagattagcacaccttcatgaagttcttctgatggtgaatttgttcttctgatggtgaatttgttatctggctaattgattatttttcttgactggcaaaggaaaatgggcctggtgctcctggagggcaatcttggacatctgagtggctcaagtttgacaacagctacttcaaggtaggatgcacaattttctatattaatactaagcattatagcagtaatagaacttatgcaagtctgcatacatattcaggaaatcaaagaacgccgagatgaggatcttctagttctccctactgatgctgtgctctttgaggactcatcattcaaggttagtgaagttgctcatcagctagtgttgtaaagaattgcaaatcaaaagtgatgctctaaatttttttctttttttgcttgcttgtcatgcctgaagatccatgctgaaaagtatgctgaggatcaggatgcatttttcgaagactatgctgaagctcatgccaaactgagcaatcttggggcaaagtttgatcctccaaaggtaaatgagattaaagacttcctcacttccattattggaatggagaaaatgtccagtcaacttgacttgcttattatcgctgaaatggcacagggtatttcacttgaatagctggcgtcagctgccgatgaactgcattttggcgagtgataaacaagataataccttgtttgttcttgctactatagagcatattctggttttactacccatccagaaatttaacttattgtaaatgtgatgctggtgctgtgtattgagctgtgttactgcttgccatcttatctattgtactatattataaagatagctcgaaaaagagcaaccaaatttgttcaggtcaacaattagatgcatcacaacctcagttagataatactaggtttttatataacgaagatagtaatgtgaattgtgagttcctacattatttctaacatacttatttagcattaagatcaaactatagttgcgagttgtgagttgtgacacccaacatgctagcacgggttccttcggtttctcatggaggaggaagatttgtattgtacgcgaaatgagaaagctcattagtatatgattaattatcttaaaaaaattaaatattaactattataaacttgaaaaaatagatttatttgttttttaaacaacttccatatatataattatttttttaaaagaaagtaacatttaaccgtttgaaaaacgtgctaataaaaacgagaaaattgaagtttgaacttaagaaaaagaagaggcctaaataactcaacctaaatactccctccttgacgccgttgacttttttaaatatgtttgaccattcgtcttattcaaaaacttctgtgaaatgtgtaaaactatatgtatacataaaaatatatttaacaataaatcaaatgacgggaaaagaattaataattacttaatttttttaaataagattaatggttaaatatttttaaaaaagtcaacggtgtcgaaaattttgggatggagggagtatgtgtcttccactcttctcccccccaatcaaacgaactagttaaagaattccaaaaaaaaaacacacacacacacacacacaaaaagagagtgaaattttgctattggtagattcctcccctgaccacggagcagcgaaccactcccaaaacgccaccaaaaccctcctctccccacctccgccgccgccgacatggccgtcgtccaccgcctcctccgccgcggcctttccgccgcctctcccctcccctctcttcaggtactagtaccacctacgacgcctccccccctccctttcgctgttcattacccgcgccggcggcggaccggttcttgatttagcgatgtccctttcttgatgatttttgttcattttctcccccgtgaaggagctcgggaggcgtccggcgagctcgtcggcggcggcggcgggggacgcggcggctgagctgcggggcgcgcgggaggacgtcaagcagctgctcaagtccacctcctgccatcccatcctggtatgctaatatatgctttgctgctttagtgttcttgtgcaaagattgcgggtttgtatggttcgaagagtataatgggattttagattgtctagctatatccatggatttcgcatctctacaaaagattgttctttgtgtgtttagttaactggtcgattatgctatttaaaacagtaacttttacttcgagaagatgcaactgctctagttcacctgtgtgcaagaagactgtaacacgttctatgcacaatattcgctagatttgtgcagttcatggttctgcatctgcttgatcgaacattgcatatttatgacttgtctgctgggttaaccttggttgcaggttcggttagggtggcatgatgctggtacttatgacaagaacattactgaatggccaaagtgtggtggtgccaatggtagcttgagattcgaaattgagttaaaacatgcggctaatgcaggtagtgcttctgttctgtcattatctattgttcgtgattcatggttatccttacaataaccctctacttcaggtcttgtgaatgctttgaagctgatccagcccatcaaagacaagcatgcaggtgtcacttatgcagatctgtttcagctcgccagtgctacagccattgaggtccttttgtcactttagtctaatgataactatgaactatcattcaaacagtatttattatttaatgctgatatgattgctttggtctgttttaaaactcaggaagccggtggccccaagatccccatgatctatggaagggttgatgttgctgcccctgaacaatgcccgccagaggggagacttcctggtcagtagcttttgggttctgtagcccaaatttgttcgttaccgtgatttatcatctggaaactaaaatataatgctgtacctttagtgtcatgtcacactgatcccaagttgctattacaattggccatcttcttgcagcttcatttcgcaaattctactttctccttattcattaaacctagaatattgataactttcagagcagaactgatatgtgttccaacactcagaaatgaagttacaaatatactctattggtcctcttgtttaatctcaatttatgggttatcatgcaattgagatacctgattgacataggaaatcgcgcatatccatctttatttgtctgcaatctatttacatcaaaatcaaattatttagatgtagtgtcaacaatagaagacattaatataaattgatagttttcttgctaacctactgtaatagtcctgttttatttcttctttaatgataaatttattttcttaaatggacaatggtctgcctataataggctattacattcgtggtaatgcctctcagattcaacttatttagaaggtttaggcgtggtatcttatccatgtatctatgggttttacttcatgaagtactaaaattgatgctaactggctaaaagcatgaaaaaacaagtttcttatgaaatattgccaccgtgagctctgtaatctggtgtaataacattttggacatgcaaatgtgtaagaaagattaccccaattgcaatataacagaaaaattgtaagctgcacatgctgtgcagaatgaaaatcagtgctatgattgcacttaacctgtgagattgataaaatatagctccccaagaattgcagcactttcagctgtttgtttttgtattcacatgacattgatatatttcctgctgtgtcttatagtgtactttgatatttgaaatctagtgctgatgatgatctaatcctctttcatatgcatgtgctttctgttgcaattttgttccctatattttacatttccaccctttcagctgctggccctccttcacctgcggaacatctacgagaagtattctatagaatgggcctgagtgacaaggtacttgcagattgcttcattcaatattccaaacaactttttctggggatttgctagttacatctgttttgtgatctgtaggaaattgttgcattgtcaggagctcatacacttggacgatctagaccagagcgcagtggatggggcaaaccagaaactaaatacactgtatgtaacttatatagttatatcagtagtaggttattgttctgattttagtaacgccttgtccatgattcattttggagtattgcatgttatttagttactacgtattttttagattagccaatgggataattaagttgtcatcactggcaatgcttattgatcttgcatatatctcttccttgtaaaagctctgtattgaagatctttatatgatttattactacttcaccgaagaaaataaagagatgcttctgcgctgttgtgttagttgaccatattatgcttcatctctaatcgcggatgacctatattagcatcaatgctacaaactttcctactacagtgcttatatgctttcaaatatgttcttgtgggtagtagacttgcagtattaactatatctagcatgcactccttcatgaagttcttgctgatgaatgttctgaatgttgaatttcttgtttggctaattgattaatttcttttgactcgcaaagaaaaacggacctggtgcacctggagggcaatcttggacatcacagtggctgaagtttgataatagctacttcaaggtaggatgcactattttctttatcaataccaaacatgatagcagttacaatttacaaaacttatgttagtctgcataaaatttaaggacatcaaagaacgccgagatgaggaccttctagttctgcctactgatgctgtgctctttgaggactcatcattcaaggttagtgaagattctcatcagctcttgttgtaaagaactgcaaatcaaaagtgacgctctaaactaaaaagttttgcttgcttgccatgcctgaagatctatgctgaaaagtacgccgcagatcaggatgcattttttgaagactatgctgaagctcatgccaaactgagcaatctcggagcaaagtttgatcctccaaaggtaagtgagattaaagactaacattactggaattaaaaaatgtgcagtcaacttgacatggttatcactgaaatgacacagggtatttcactggaataagtggcgtctgctgccgatgagctgcattttggcgaatgaacaagacgataccctgtttcttcttgctactatagagcatattatggttttattaccgatccagaaatttaatccattgatcggcaaatgtgatgttggtgttttgtattgagttgtgctctccattagaaataaaaatagcggtggccattttcgtttccaggaccaaacattttggcacattacaatacaatgttttagatgatgtctgcattgagctcttacacaggatgatcaaaatatatgacataatttattactgaatccttttgtgatatttcccaagtaggactgtacataaccagcaatctcaagtcaagttacttttcatagtttatttggatcatctgcttccagatcttcttcctttattaccagataacttggtcatcatccatataaaattacatctgccaatcctactatacatatttattttatacccacaactgcactgaaatgttctcttcatcgagaaaacatacagcatacatcttttatcatggtgaaatatacattgctgaggacataagatttcatttccctcttggaaaccccaagatagccttgatcatggctcccaggttgcccttgagcactcccctgaggatcttgagcttcgccggcgagtacggcgggtacctcgccgccgcctcgccggcgaagcggcggaccagcacggccttcttgtggctgaaggcctcgaagctgaacctgccatggtaggctcccatgccgctctccccaactcctccaaaaggtaggtactggtttgttagctgcagtggtatttttgcagacacatcagaatcagtcacacttggttagcaatgttgtttgcatcagttaacatgtaagtcatgatatgcttaaaatgcacaattaaggatcagattaatgatgattattactctctgtgttcataaataaaagtcaaaacgtaccttaaagtactctttaactcactggcttatgtttttatataataaattgatatcagtagaattgctatgaaaaatatttgcatgcagttatagttaatgatatttatgaaaatatggctaaaaaggaacgagaaattagaatcaatcatttggttagcactattgttttgcatcagttgacatgcaagtcatgaaatgactactaaatgcacaattaagggacatattagtacggattttgcgagtaaatgaaaagcttggatgcaaaattagaagccagattaatgctgattattacgtggacggctgtgtcgttgacaagcattcctcctgcagagatggctgcctcatattgttcctggagcttgctgtccttggtgaagaggtaggctgcaagtgcctttgtcatggagttgatgagagcaaagctctcatggatcttatcaacctaaggacagcagcatcatgtgagaacagagatttgtccatcatgtattaatttcccaactaatggtaacattgtcaatctacagaaactcatctgtagttgactacaaaaggtcatttattagctctaaccgttatgataggaagcaaggggccaaagatttcctccttcatgatccctgaatcaagaggaacatccatgaagattgtaggggctatctttctgaaaatgttgcaaacaaataaaattttaactgatcatccaaaccatgtattcagaagcatttgtcagagttgtaaaatttcagtcaacttacagctgatgttcatctctctgacctccgaacacgatcttatcagagacattttcatcgtccatcagcttcttcagccggttaaaatggttggaattcacaattcgcgacaagtcagatgatcgcagcgggtccctcccgtagaacttctccaaaactttctctagagcctccagctgagttcgtggcacggttgattagttaaaaccatttcaccacatattcttttaaatattcaatataaaatgagtttttttcttaccagctttggggcgaatgattttgttgttatgatgaaatcaggagaaatgcaggcctgcccattgttgcaaccccatttcccggcggctatcctcttggcagtaaccttcaaatcaaattaaagagaagattgcgacatgaacgaacagggtatcctatataattgtacactcgaactctaagtaaccttcaaatcaaattaaatattgtcatatgaacgaatagtgtgcactatatgattctacatttgaagctagcacgttaggatttctatcttatcatcttattaacacgtgtttctatatgtgctctacgtgattctacacccgaaacgatgcacgttttactctatcgtgctataggcacatgaatatgacacctatctccctctagtcataaataagtgtcattccaacatctgcgaagtcgacataaattaattttaaacatggctattgttcaaaaatatatgttttaccatatgaaaaatgaaagacaaacttgttataataaaaaccttcatactacttcctctgtcccaaaaaatcttgatgttttaaggtttgtcaacaaaatttgcttcatgttaaaatgatcaaattaccccaatttatttgattcggctgtcatttatttaagtcagcacacactcagcaggttacaaagaaaatatatgcatacaattaatcaatgtatttttttcaaaactcattggcagatgacctgaaggaatagacggcccacttatctaatcaagtttgctagtctaatgacatttttatgggataatactggaaatattgaacggcttgttttctgggacggaggaagtattacacttacgcaactaattttggatgctacagaaaagaataaagtggtcaaagttatatcttattaactttatatcttatttgtgaccgaggggagtaggtctcagtgtcccatgggggtagcaaatcctgaaacaccaaagtttatggtgcaaaatgcaaattcatagaggggaattgtgttgtgctttgcttacatggaggttgacattagagtcgacaacaaccgggcattttccgccgagctccaggaccaccggcgtcaggtgcttcgccgccgacgccatcacgatgcgtcctaccttgccattccctgcaatttcacccagtttcgtcagatttcagagccactgcaagaggagctaagcttcgatcacttctcgaactccatcaatggcgacaatgagaatcaagaactaagaacctacctgtgtagaagatcttgtcccatttctgctcgagcagggtggtggtttcggcgacgccaccctcgacgaccttgatgcagctgccgtcgacgtagcgcggcagcagctcggccagcagcgacgaggtcgccggcgccacctccgacggcttcagcaccacggcgttgccggcggcgatcgctccgatgatcgggtcgatcgacagcactgaaatggataagcaaaagtaatattagcttgatcaatgctactggcaataaaataaaatgctaactcgatctaaaccacagataacatgaggaaattaaaagaatatctatgcatgctggttccatctaggcatatagctctagttacatgattttaccctcgacgaaaaaaaacagttaaaattttggaaaaattgttcacttcaaaatattttgttgcattctatagaacagctgtaaaattaaggatagagcagtaaaaatttaagtgcacgtatctatggtttcacaggaaattaagggttggttgaactcaaatatcgtttttcatttgagaaatattctttttcttttactcagcatgatattgtaccaccactataaagggtgcagatctttttctattttcactttgcctgatcaacatgataatttctcttttagcgttgtcttaactagtgcctagtcgatttttctacacaagcttagattttaatagtacaatcgaatttgatataaagcccatggttataatcaaccaacccatatggttataatctactctcttcattccaaaatatttgacgccgttgactttttttttaaatgtttgaccgttcgtattattctaaaaatttaaataattattaattcttttcctatcatttgatttattgttaaatatacttttatgtatacatatagttttacacatttcataaaagtttttgaataagacgaacgatcaaatacgcttaaaaaaatcaacggcgtcaaacatttagggaatgagggagtatatattttaataatgcaatagatatatgttcctccaatatcatgatgttgtttatagtagaaaagcattttcgcattctattcatgttattatttttctgttgctgtattgcatagaggcatcatggaagttgcatgctgcaggtggttgagagtttgctgtcggaaccctctgcttctgtctgatacacacctcaaaactgaattctttttgagcaattaatagataggttgagacttcgcattggcatgccaacactatggtccactagtaatcaaacgattacggcaaccagctagtcagcgtctcaaaagatgcttatttaattctgaatttattgaagctcaagcagtcagacgtcgatcgataaagatggatcacaatttcagaaccacacttaaacttttgtttgcaatgtactccgtaggagggaaatcatgtgtactgggtggcaaatcaccaaccatacacatcacatcatgcaagccatatgcatgagtcaagttcttggattgagcaagcatgcaatgcaaaccactagaacgagacacatcacacatgtgtttagagacatcgagcagaaatgtatatacttccctaaaaaatgtagacatgtatgtgtactcttgaaattaatggatataaatgttgaatctaagaatttatcatgggtgggcctgatgtacttgttgcaatactcaattctacttcctccgtcccaaaaaaaaaaaaactcaacctagaagggatgtgacccctcctaagacaacgaatctggaggggtcacatcctctcctagattaagtttttttggacggagggagtaactcacaagtggattgagtgggttggagttttcaaattcagattttttttaatgaagcccaattcatggaaatgtatatgatcaatttaagcaaagagagttttggagaaatctaaggaaaaaatggatatatttttaaccagtatttttgtcatcgacagaataaccaaacaatttagaattatatcttgggagtatttttggtaaaaggaaaattagcccctggcccgtgaaagaacaaaaatggagaagatgggcattaatttcgatgaggaactgcctccaattccatactattatgtcgtcacaacttgttaatttggatggtattttggcaaaaataaattctatgacaattttaatatatgttcactgataattttattttttggaatatatacttatatttgtgagagcttgtttattatatttgcctaatgtgagctcatttgtgctcacgcgcatgctcgctctctctcttcctagtaccactgggaacttttttttttatataaaaccatgcaatgcattggcacaacatatatagttttagaaaatagtctatttggcaatagcaaccagaccgtggccataatgcgtaattaattcgttcaacgctatttaaaagttccatctcttacatgccgtaatgtgtttccagtctaggcctcccttcctgtgtggtccaactgccatatctgttctaattgtttcatattttcagaatatattactatcttttcaatatagaattaaaatcagtgtcaaatactgaaatatcaaaagattgttacaccaaacaaaatcatcatagtccactgcaaaatcaaatgatactatattattattgcgggattgtttgaaagcaaccctgaccacaaaaaatattatgcaagtatttttttaagtcaaatctagttatatatgaaaccattgtgtatggttttatcgcatatagtctcagtatttgaaaattttaaaatgctgagattttccttaaaattttaaaaatgcttgctgactattatttaaaattttaaactctagccgggtactgtgaggagggattgagcaagtgaccaacattaacgaagctctcatctcacaattaattccaatgagacatgaacgtcaatggcatgtcatgcacagggaacacggattatgtgtttccatcggaattgcgtgtttgacttctgctactcaacggaaaaacaacattctagaacaatattaatattaatatagtaattgctgcaaacaaatcgattgagttaaaaatgttcaaggcacgcagtaaattaattacttttctatgaaagaaagatcaaatcatatgtgaatgttaatttggttttggtccaacttacagaaagggtagttccaggccgagatgacgagcacgacgccgagtggctccgccgccaccctcgccgtcgacgggaacgtcataagcggagcagtgacctgaacgccatgtacacacgtgtgctaattaattactccctccgttttaaaatatttgacaccgttgactttttaagtatatgtttgaccgttcgtcttattaaaaaaattataaaatatgtaaaactatatgtgtacatgaaagtatatttaataacgaatcaaatgatataaaaagaataaataattactttatttttttaataagacgaatggtcaaacacgtactaaaaagtgaacggtgtcaaacattttgaaacggagggagcggttaattgggaagcagctaggatatagacatagggtactaatacactctaattaatgacttgttagataaggtttagataactaatgactctaattaaggtttagataactgatgaacaaaattttgtttttttaggtagaagagaggcgccatcgctacactttatagtgttatatattttgtggcaattttgatactattaagatgtctgaaggagcatcaggtgctatagtagttggctagttgccactcctctgtaatcagcctccagaaaaatatcgactgttacactaaattatgattgttttactatgcgctccttaggttcttaggctagttgaaaaaagaacctatacaatatgatctttaattaccaagtggtgaaaaaaaagagaacgaaaatggccttacgattctcgacaatgatactacgtagctgcacatatcatttcatagctaatagaggcaccttgagtgatgaatttttttttaaaaaaatgcgtgcaaaattttttaacattaaaaagaaacaagtttactcaaaacatgtaacataattttaacgcggatgtcaccatgtaagtgtggcgcaggaagaagaaaacgaccatctatttatcaaatgtctggattttatttggcaaccacttttttcaagcagactagctacacatcgaacaactctgaatgcctattttcttttcttggggtgaaataagaaatctaacttcggactttaaaaagtatactttagtgtgaattttgtcaatataaaaacagaaataatttataggagcataaaaaaaacttattttgtttttggagtaaatgatatttaggctgtgttcggatggctgtgttgcgaactaatcccttgcatgcaaaacaaaacgattaattagcgcatgattaatgaagtattaacttttttaaaaaaatagattaatatgattttttaaaagtagctatcgtatagaatttctatttttctttaaaaaacacaccatttagtaatttaggaaacgtgtgcgttaaaaacgagataggtgagttgggaagtcacgaagtcacaataaagacatagccttaatgaagtgataacagccataatatccacaccttttggggcttcatccatttcttcagattcttgagggcaaacttgcaggacgacttcaccagcgcaatctgcaaattattttatttttgtcatctatcagcagagcagacagagtggcaaactgcaacagcatatgcatatgcaattgatgttcagaatcgtcagatcaggaaattgatcagttcctttcctcagttgtacgttgtgcgctgtgagcgtttatgtaagcacagttaacatctaaatcagcatcattaatcatggtaattaaaactgctaacaagtggcaataacgacgtactaatactgatcaacggccgatatctgtagaaactggtcgactgtacgtctcaggatgtatactgtgccgctattgtcaaggctaagtacgatgaatcaaacacaaaccaatattcagctaatcaattttgtacttttcaaattatttaccaccatcacaggattacttttactctacgctttgaaaaatacattttctcaaaaaatattatgtatattgtgtgaacaacttattttaaatttcaaatgttcatttgttaaaatatttaatctataaccaatttagttcttttcaaactatttaccattacaacaggattatttaccctacgcactaaaaaaacattttcttaaaagatattctgtattgtttggacaacttattttgagtcttttatgtttatttattaaaatatttaatttatctttataataagtagacaatccgcagcaacaattcactcaagtaatctgcttcaaactaagcgagacagaaaattaaggacggaaatgtggcagcagatcagagtagttaaccaattcggtatcagtaagccagtaaccaactcgatcataacagaacagagattacttgggtggattattttatcttattttataggaagaaagaagaggaagaagggagagattggatttgcctcgtggacgtaggactcggtgtagggcttggcgaggtcggcgtggagggcgcggcacacctccggctccgccttcgccgccatccgcaggatcccgcggagctgcgccgcccgccactccgcgccccgcgtaccccccggcgggaacctcccccgcagcgccgccacctccggctccatccccacgctcctcgccgccgccatctctctctctcactctctctcgatcgcctctgatcgccggcgatggatggaaaggctttgctgctgctgctgctgctggtgatggtggcgaaggatgcggaggcgtgtggggggtatatataaacctctcccctgcacgcagggtttaccagacggtttgaacgtcaaaatgggaccccgggcgaatttgacgaaattcatgaatatcgagcgaatttgtggtgggaaaaacgatgggactttgtaggttgcgatttaaatcccggtgatttgtttcgaatcaaaatgtcagaacgaattttttttaaaacacataataaatgtggcacacacaacacacgtgtgtttacatattttgagcacatgcataaaattggaccgacatatttttgagattaaaaggcaccacggatatctcgctatcgattgatacgttgtctaccacttatataaggaataattagctgagaatattcgtgtcaagggtaaggctttaagctgggtggaccggttcaatattgtttttaaaccgaaaagttagaatatcgaatgaattttgtagaaagcgattacttgcgtcaaaatctgactagtttcttgttaaattacaaactatataataaaattttaatcaaattaaggacttttcttaaaaaaaatgccgcatggcattggatataatttttttaaggacattggatataattttgacacgctgaatatgtatacaacacaattaacattatatcaacaatagaaaagtttaaaatacatgctagcaagtcacataatattataatgtccatagtagtatcataatgtacatgatatcaaccaactaaagtaacgagctttcggtctattaaagccatttatttttcctttttccttagttgaagtgccagcatatacataaatttaacacatttaatatttttttcgtttttaatcaatattgatgtaattcactctattggttttgtgacggctgtatcttttgaggatttaggccatgttgtactgtaccgcatttttttttttgcggggagtactgtaccgcatttgtaaattactgggatggaatttccgagatttatttatttttccttggaaagaattagttgtcctggtgaattaactttcttttggataaattcacattagaacttatttgctttcaatttctgaagctcggttgtttacggtacagaggaacaacagaagtaaaggaaatttcttgactgcatttaaacatggaacccaacaaaaaaacagagaactaaatgcacatgcaaaaaataataattattggaatcgagagcgttgtggaagatttcatttagatattaaaataagacctattctttttaaaattaagcacacgagctttattgttcgttcaaaaacataatgaccactagctccaacaacaccacaaatttctatagaacacaaaaaaagtttgttatcttgatgtctcatttgacaatgttgagacggaagagccagaactaaaacttttaataaagccgactccccttacatatttaaaaccatatatctactatacaaaatatcaataaaattattccggcgtcataaatatttatgcggtgcaatttcaattggattttagtgaggttactactaatttaccgttgatctcaattttttttaactgtgttataagatatatttgcggggtgggtgagtgtggtatacttgtgggtataacaataataagaaacctatggggttagctgaccccacaagtctctagggttggctctgctaatgaaagaatgactagagacactcaatgacacccaaagcaagtactccctctgtttcaggttataagacgttttgactttggtcaaagtcaaactgctttcaatttgaccaagtttgtagaaaaaactagtaacattttcaacccaagacaaatttattatgaaaatatatttaattattgatttgatgaaactaatttagtattataaatattactatatttgtctataaacttagccaaacttgaaacagattgactttgaccaaaatcaaaaacatcttataacttgaaacaacttgaaacggagaaagtatctattgtttttctatagccctgaaagattataaccgaaacctagtgctgagaagcaaaataggacgcctcgccaagagcgtcgccgtctcccgtcctagggcagaagaggttttcatattgaagagtagagaagattttatgtaaaatatcttctcttcataagaaaatagcttaattgtttatgcttagaaaacatacgagatgaagatattgcataggtagtcgttgtagccttgtgccttctcagatacacacaacgaacggacatactcatgtgtgaaaggaaagacacattatgcattacacaaatatcaataaaattattccactgcttataaatatttagcattacgtacacatggatacactttcaatagaattttagcgaagttagagggcgttttcatcacgattcgtgataatagtgtgcgtgtagcggtatgtgtgtgactaggcacacatgatgccaaaagcaactagtagtagctaacaaaagagaagattcttggtgacattagttaggcatgactagaaaacatagaccgtgtttagatccaaagtttggtccaaactttagtccttttccatcacatcaacatatcatacacacgaaacttttcagccacatcatcttcaatttcaactaaaatctaaactttgcgctaaactaaacacaaccataggagaagaagtccacaggtcgtccccttgtgcctcatcagatacccacagaacggccgcactcaagcctgaaagggatgacgtcctttcagcctgaaagggatgacgtccagatttctcaacgatacatctcatgtccttcactccccaataaatcgcacaaaaaattatgcatctcagaaatgtttagtaggtgtccaaatttttcagtcccattggagaatattacagttacgagtacatcaaattcagacagctagctaaagagaagagaaatgcacccagaatgggaaaagatacagccaaacaaatctgtgcacaattgagacgataactatcaggcgacaatggtgtagagataattccaaaagatcattagaaggctaaatatattggttccagtgaaaagggaaaacactgtgaaacagacatatataggatctcatcaaaacaactaaccacaggatcatcttgaattaatgtgtaatacaagaacaagagtgatacatcaaacatttgtttccattgcatccaagtagtacgaaaattataaaactgcattatggctttcatttaaggtaacagggcgacagggacatggaaaattgtcgaattcattcatacgaaaggaacttctgcaccacatgattcatgtttggtctttggttcctttctttctccaggcacagaacagcaaactccagcaccagtagcacctcggagcgcacaaagttgccattcaatctaggatcaacaacaccatcgatcaatgtttggtcaccggttttaatcttctctgttactgtccacactaactgcctcaatgcagcaccttcatctgcactgccatttgctggtagctcagacattcgaagccccatgactaactccagaagcaccactccgtaactgtacacatcaaccttttcagttatgggaacaccagaaacccattccggagcgatgtaacccctagttcctcggatctttgacatgttgggatcagtctggtttctctgtagcagcttcgcgaacccgaaatcgctgattttgggctcgaaatcctggtcgagaagtatgttctcaggctttacgtcacaatggatgatccaatccatacactcatggtgaaggtaagctagccctttggccacaccaactgcaatcttgtacctatgctgccactgtaacagtcccttgctaccaaacaagaacatggccaatgaaccgttctctacatactcatagaccaacagccggtgacttccctctgaacatacacccattactctcaccagattcatatggtagatgcttccaatcacacttacctctgtctgaaactcggcctcaccttgcttcacatctttgagcttcttgatggcaactatgcgattgtcatctagaatccccttgtacacagagccatatcgcccacggccaagctcatctttgaaattcctagtagccctccgcaattctttgtaggtaaacctacggaaatgatctgttacaaccctgtagccttcctccgcagcccatatcgctgatcgtgctgagtgtgtttttgccatgaaccaccagccaaaagcaatgaagcagagctccacaagaaagaatgcagccaggaaacagtagtagtagtaccacatcatgcccgttcctttgttgctctgtgtagcgtaattgaacgtttgtgtttttgatgcattgcaaacatggcgattggcaagttcagaaacatgtgcttgtgaccgggacagaaagctctgaggaaccttgatatatgctgcaccagggtatcctgaaactgtcttgccattgaagagatcagacttcaagaagcagccattagggtacactttgtacacgaatgctacacaggagcaactcgccaaacacattgctctacaagcgtgcagggatgttgacatgacatagttcatatcaaagccccagaagtcagtctgaggaatgcgcacaaagctcattttctggccatcattgctgcaagtgaggttgaatgctggcttgcatcctctgctccaatcaccaggatcactgaccacataaccaggagggcaagagcagccaatctttggtgtgtatgcacatatcccgttccaaccacaaaggccgtgtatttcacagggttgggagaaagccatccaagaattgtaccagctcccatctgactcattcaggctgtaaagccgaagatttccatcatagtccaacgtgagtctcctcttaatctccaaaccccaatctgaggcatagaaagttgtgttatcgctcgccataaatttccccagcttatcaagaacaccactcctgctacggttgtaagagatcctatagtttgtccagctactctggtcagggttaggccagtagaggttaaagatgtctggtccatcataagcaagtgataaaacgtaccgatcatcaaaccgtaaagtgtagtaacttgttgggtgtgagggatcagttgataccagctttgcggtggctgtaacaggctgcatcgggagcagagtgttggttggatgatcaaagctttgccataggatgcttccaccttgatccttcaccacaaggttcccagagtccatgagctcggcacggacagcttctgcagagctactgatttgccagacaaccgtgccatcatagtctgtgagaaccatgcttccatccttgttcagcatgactttcgacccgctctcatgcacagggcggtcttgatttgcgctccaggcgatggtcttgtcagctgaattggtgaaccagattgacaaggtgaacacagtggatgaaaggttgtagaagccgaacgagaaggtgccatccgttgaccgcagtacattagaggcatgcttcgcggagagggaagaccctttatgcaggtaattagcatgaccagccactgcagaaataggagccagaaaggaaaagaatatgaggtttagtatcaataaagagcttggcatgatatgctttcaaagagcaagatccaaggagaaaaaatgctgctactgtatcatgcaggaggaggaaaggaatcagttgcatgtatgcatagttccatagttctgtacaattgcaattaaacaatatgaacaagcacatggcaagtgattaggtacctaattaagattaataattcaatcaactggggtaccttggaatacagtccaatatgatattccttctctcatctgttttttcatcctatgatagatgactagatgtcacccgtgatcagtttggcagtccaccaagttgaagatttcaggtcttactatatgtttgcttaaatctattatatatttataaatttaggccaagcacatgattacctcagaatgctggaaaatatatgtttttcttgattgagaatagtaataatatcattaaaaaagtgggtgccagtgataatttggtttatctaatttgacacaggttccaattaatttttccttaattcttgtttatgaattgacaattatgcaagtagtttagtatggtttattattggtgtacttttgcattcagttactctctaaaacattatataacaatctagatctgggtatatcggggtatttttaaggaagataactcacctgggacgaatgatttagatttcggcataccattttttatgattacatgtagtgcaatactacaatctcactgggaagtcatcaagtcaccccaaggtccaaggagatcatttgaagaataaccaagttttttgaacagtagaatgaaaaatcagatggccaatccaacttgaatttaatacaacataattttgcagtctccactagtttcttcaattgatagtgcaacaagtccaggaaaatgctacagaaaaaaaagtttacacttagcatgaattaagaaaaataaatgatgcatctcgattttagttattcaaacataaacccattgtaaggaaagaaaatgcacaccaaagaacactccatcatttccctgtaataggattgtgatggaattgtatatgaaaagaaaaaaaaaaactgcacacggagactaatcaccagcattacaatgggcatttgaaggtgcctgtgcagttcctgttatttctatagactactgaatgaaacatcaatttgatggaacgaaaagcatgctatctagcatcccaaagaaaatattcttcttcagacttcagagatagaactaacagcaacaaaggtattgctgatcaagaatcaggactgcaatatagctgcaacaaataaagtgcagattaatcgttatccccgacaagcatgtatataggccactcaaatccatatagcaagtatgcaagcctgaatcaggggaggcaccatgcatcctagaagataagaccgaagaccaaaaaattagacaagaaggccatggtcatgataggtggaaacacaaaataaaacaaagtcttattgactacaacagagcacacaatatcaggtagtatatgatttaggtgtgtaactaacagattattttgtatcaagttggagttaaacaacacaaacccctggcacaagactaattaagaaagaattatactcttttcaaattatttggcattactataaactgtcttctcaataatatatgatatagttcactcatcaccgtcaacaactattttttgacttcaaagatgagaagttgtaggctttccacacatgcaatgtgtcaatcatcagctaaaggaaacacgagttttctctattggtttgtgggatcatgcaagtttaggggaacatcgtccacctctaacatactttattggcgatcttttttacctttttatggtcacttgataataccataaatatcaaggcaaagacaatatcttattagttatcagacacatcatggacatagattattcaaacaaatacaatccaagaaaaaaatcaaacaatttggagaaagttgaatggaataggttattttagccacttttgagaagatataaatcatgatatcatctcttcttgctagactttacacaaccttagggattccaacttttgaccaagataggtgatggaaactactgatgggtgacaaaaactgctggtaaaacaaagaacatggcttgacatgttcattagggcatagcttaaagtctgaaaggatagacacaagatcgaaacttatggtcatcgtgagagaataactataatcatatgaccagcatgaagaataactatcatagtgaaacagcattcttgtgttgaacatttagctttatctaacttcagaaacatgccaggaaaaaaggtttcggcttcaggaattcaactggccaccagcacgacaggatgaaaagaacatgtaccactactcaaaataacagctcaaaatgtaaatttataccaggcagattgtactaagatgagaaacattgcatcagacaagtgaggctcacagtatttatttccttcgaactgaaactatgcgggcagtgtatttggaagccctgcaaaatgctgtcgtctataaaccaggtatcctccattggcaaactcaagaccctgcaggtagcaaagatgataatccggaatccgaataaaaactgaattcgaaggcattttgttcaaaaccgaagattagaaaacgaacattttctgataaaaagaggaaatcgaactctagaagaagagagacccccaatctgaagggatttcgtcagtctgctccctgctgcgaatggccattccccattccccccacaaacgcggcgccgccgtgagacggtgctggccggatggagacagcgccgcccatgcgagcaagcggcggaggacaaagatagcggcagcgcactggcgtcgtgccgggctcgcctcaactgccgacggcggcgagccggcgacggcgtgggcgcagccgcagtcgcggaggaagccgccgccttcgcctcgccggcggctcatatatgggccgatttagctacaggccttaagaaattacagcccagaaagcccaaaaacgtaagcaaatatttccgactccgagtctttgaacattttttttatttttacagaaattttgaaaaaacaaaaaagttttttaaacattttaataaaaaaatttcctgagcccgcttagccgaacggcccgaacccaagtttgactcggtttggcaccatcaattttgccattaaaaggcaagaccaaaccggaaaaaggtccaaaaaaaaaaaagtcaaagcagtcaaaccaccgcgcggagaaggagatggacgtggaccctccttctccgctgccgccgccaccgccaccgccaccgccgccgggacgccgcagcagaacaaggcggtggagcttcctcccggcgtatacttcaacccgacgcgtgaggaggccatgcaccactacctcaaccggtggatcgccggcaagacgataccggagatggaggccgggttcgtcgccggcgccgacgtctacggcgacggccccgacgcgctgcggcggcggcaccggccgggatactggtgcaactgcgtgtacaagtggttcttcctttgccaccgcaagcgccagagctcgcgcaggaccaccggcaacaagcgcgccgagcgcgtcgtcgccgccggtgggcggtggaaggtggagcaggggaagaaggtgctcggcggcggcggcggcggcggggagagggacagcttagggttctactccagtaactccacgaagaagacgtcatggattatggaggagtacacgagctccgccgctgatggcgccgccgccgcccgcggcgaggaggacagaatggagcccgtgctctgcaagatctacctctcgccgcgcgcccccgccggcgagaagcgggcgctgttcggggaggacggcgtggcggtcgggcccgacggacgcaagaggaacgcccgggtgacggttctggcgacactgttcgacgacgtcgcggcactccttggacagccggtcgccgcgccgccgctgccggcgccaggcgaacagcttggccatggccatggccatttcgatgatgtagcggctcgtttcggacaggtcgccgtggcggcgctgccggcgtcgggcgatcttggccacggcgatttcgatgacgacgccgcggccctccttggacaggtcgccatggcgccggcgccggcgccgggacatcaccaacagggttatgtcgtcgcggaggcgccgctgccggagtcaggttatcttggccattatcaccacgacggccatctcgcgcaggcggcggcggcgccggagcaagatcattatcttggctatcacagtcacgacgcgcatgtcgtggacgcggaggcgacgccggagcaaggctatcatgacgacgcgcatgtcgcggtggcgccggcgccggagcaaggcgatcttggccatgaccaggggcatctcgcggcggcgctgacgccggaggaatgtggcgagatagttggcgcatacgaatttcacccggaaatggtgcagatgctgtccattggcttcgccgcgcccgacgaacagttgttgccgcagctgctagaccccaccggcggcggctacgacatggctagctccgccatcgccgccgttggcgacgtgaacgcatatgccgccgcggcgcccacgccgcgaattagacccaacgcggcggaggcaatggcggcgacggcgacggcagagacaatgccaccaccgctggacgccgtggcggccgagctatccgcgccgccgcgtggcttaccgccggagctcgctttcagtgccttgccgtcggtgcagcaggagccatcctgtgacgacggcgacaacttcggcgagctcgtggcggaggcgatgccgccgttgatcggggagaacgccggcgtcgatgccggcagcgacgagcctctgccggatttggccggcatcatgacggagttggattttggacatgactttttcagcaatcagcacagagaatgaaaaaaaaaagtcatttgatgttaagagatggtttacaatttgtttgtttggaaagagatttgattcttttaagttcttgcagtagtcatcgaagaactctgatccctgatttattgctaggactgatttttgttgtggtgacaggttcaatcaaacactggccttccagattatttgcattgaatccgattgtacagtgtacgctccatgagtatttttttttctacaaaaatattggcctgataagtatataattctagcattatgttatgattcatgacagcaacacatagcatttcacaagttacctagatgtgatcttgtcaaagaatagaaaaatgcatagcaactcctgaaaagaacaccgaacatatcagggaatagaacattgtaacatgtacaggcactgctttgttttctttccctatgatactgataataaacatgttcagattactcaatgacactaaggaatcagctaacaaatcatatacatagcatattagactacataatgtatagtcccagccaataacagattgtggaactaattatattcagtcttacaagtatacaggaagaactttgtgccaaccaagagtgggactgggactgggactgtttcataggaacatcataattttatttcatatgaacatgatgatgtttacaggtaactagattttctcttttctaaagaatacattcacctaataataccgtgtagagcctccctttgatgttcatccttctgacggttggtccttctatcatcctaatggccttttcccttgtcgctcattttgtaattgaactgtaacagactgcggactgctcattctgataaccaatgatgttggggaactgaggccaacaataaccgtcctcaaatccatgaatggtattgtcactgtttgaataaacagagagtaattatgggtatatatgttcaggtgtgtgaaatgatcacagaagggaagatccaaacttggggattctatcacagggtgcacggatccatccaatctgccctctctcattgtcatatatcaccatctgatcttgcattgtgatgtctgcgataggagagaagaagattaacaccaaggcattagaaatatgtgagaagatgaactagggagtttcgttgcttgtttatgtctcaacttcctacctccgacaatgttcagatccttgaggccaacctctgatccattgaggatgccaaggcatgcattcccatatttctagcataaacataagaaaatgttagcaaccagtaatgcataattaattactagtaatatgcggagttctagaatgtttacagtgacaataaggtagttttcaggagggatctccatgagagctttcttgccattagaaaagctcaataccactgttctgaactccttttttacatcaagaacagatttgaatggtttcttccccttccagcatagaggcaaagagtggtcaggtacctctttcaggttcttgcttaaatcacccttaatctgcaaggcacaaatcacataagccccaatgtttatttatcaatcctgtgatgtcagaatgggaaatgtttaaaacttactgcatcaacaagtgcttgatatggctgtgcagaaaagtaagtgaatgaactgccgctgtcaaagactacttccattggcctcacacctagtggccggccaccaaagtaaaggtttgccgagccaggtgaatagtaattcctaaaaatagaagttcagatcatttgaaactaggaaatacaggtcatgtcattttattcttaagatgggtcatgtccatgcctagtttgaagacccatcaacaatatgggtatacaataacaaaaacaacaaacatgttaaccaagattcgctacacattccatacagagcaaaatgcagtgtataaaattatccgtgatttccaagaaaaaagaaaaaaaggtaaatccataaatgaccatgttcactacgctgctctcaattaatcttgggagtcatttgacactagtaacgatcgaccactcaatttcaacatcatattcgaacatgatactagtcatctgcatttacttaagcattgttgcaaacaagcactgagcacccaacccatgtttgtcagaccaaaatgaagtccaaggataatagggctcaccgggatgtgctacgagccataggagcccacgttgcacgcgagtaaggcacaatgtcatcaccaaagaagaggaaccctccacctcttgtactgaggcagtggccaaccacgttcttagtgatcccatgctgcttgagctgtgaaagcaggctgacagagccactcccaagcccaaggacaccatcagtagctgacacctcagtgctgctcccaacctgctgatcatacccacacctgcacacacaaaaaggcctccatcaagaaccacatcaagtggccaattcttatcgtcttccaatgttatatctaaccagttacaagtagcatacccaaatgcaagaccgggacggacgattgaggagtttgcaagtcggagtgcgaagctgtcagtgacaagcacaccaagtgatgatccctggtcagcatacttaatctcatagtcacactgctgctttggtgaatcacatttgtgcctcccggtcagaccaccgtgcagagcggcgcacatctgatccacacatggaaccagcttgttctttgttggtcggtacagcgggtgcggaacctgtaccaaaccatcaccatgcaagacaacattgaacataataaaagatcttgagccaaaagagcaatcaaagaatgcattctaatgaggattacaatgagctagagtgaaatatagcaattgacataatccatgggagaccaaaaatggattcaacaatcaacaccacatttagaaatggagaactgaataagagatgcccataaataggcttcaagcccaactgaacccaacaatgatgtaagcaacaaaaagggacattttacagcatcagcatgcaaaatcatcatcccaatttataaaaaccatctctatttctttttgaaaggtcaacctcatcatcctaactactactagcacaagccaggaaaggagattttctcccctgaaaaaactactactgagacaaatcttggattacacaaacaaaaagagacacaaagacatcaccaaatatggacattgcaggttggaggaggtggatcccaagaagagaagaatgctactaccttggagcagctgacgcagggggcgtcgcactgcagccaggtgaggtcgctgccggtgtcgacgtccaagaagtagggcctcggcgggttgccgatgctcatcggcacatagtacaatctgcgcaacaacaagaacaaaaaagaaaaattcagattaggactttgattcatcgatgcctccaaggggcgcacacagaaatccatccccaaataagaccaaaatttgcagtcagttgattagttcttggcgccggaggagaggaatggatcagagcggggccgaatggatcaaggagaggatgggatggaagcgagccatacccgtgggggtacacgtcgccgtagagcgggaacacggcggaggactcctccgccccggccgtcaccgacagcccgcccctcgccggcctgtccgcgctcgccgccgccgccagcaccaccaccaccagcagggcaaagccggcagggcgggcccacccggccgccatgggaggaggaggaggaggaggaggggagagctaagctctgcttctgcccccttctccttgtctgcttcttccccttctcttctctgaatatatatatatttttttggttcagatttcttcagaagatgatgatgaaaaaaaaaggagaggatttttttttcgatggatggtgatggtgatggtgagatgagaggagaggatgtgtgcaaaatggtgggttttatagtggaagtatggaatgtattgcaatggaaggttctttgttgggtgcagcagcaaggaacaacaatgggggtttcagagcctctttgttcttttcagaattgagaacttgagatgaccttttctcctaggtaacctctgagatggatgcaaggtcaggtggtgtggtggtggtggttatatgcctttttgttgatgctgtggagaaaggtattttgcatgtggtttgatcatctttacatcattagtgaaaaaggctaaaagtgtactttagttctaagatgcatttggttttgacacgtgtgtttgaaaatgttagctagtaattaagttatatcttataattttaaaagctcattcttcgattaaaatgttggttcgattagaatggtggaatagttaacatcctatctcaggaagtgaaatgatggtgggtgattcaattttgagattttctatattttgtcattgacaatgcaacggcggaaacacggggcacggcgagaggtcaggtcccctccaacatttttttacatggaatcattcaattaattagataattaagctaagtaatactaatacgtattaggactgcgtttagttccatccaaaatttgaattttggttgaaattggagatgatgtgactgaaaagttgtgtgtacgataggttgatgtgatggaattgtgcaaactttggatccaaagtttggatctaaacacacccgttccttccaagactcttggaacccttctatatctaaatcttagctccgtcattagacaaacgatcgattttaggaaccattgcgaacgtgatttcttctaaatgccttcacacatgcattttctttccatttttttgtgtcttccttgttacgttgcaaaatgtctatcttaccctaaaaagtatacgctaggctagggagtgcttagggcaagttttataatagatgtggtggtcacttttaattttatccacatcatccatccaaaaaattaaaactaacttatataaatacattacatttaatacactagtcccaatacacttgccaccaatcaacccctcttattttctcttgtttcttaaaatttgtgtggaggttgtctcttgtatatatgaggtgtgactcctctctctcttctcttctcttctccacatcgtcatttcgcccttagtatattctaaggagtgtcttttccgagcattcactagagaacagttggcaaaatactaatcacgatggtaaaaagaaagaaaaatgcatatgctatagcatttaatataactcatgtttgatggtaattcgaagtatcgaccgctttttaatcgctagatgtaggcaatattcttataagattgttcaatatattactacgggggattatctactttattataataataaaacaaatattttagaaaataaatttaaaaatagcttaaaacaagtgatgtataaaaaaagtttatttgggaaaatatttttcaaagcatagagcaaataatatgttttaacaatccggtaaataatctgaaaagaacaaagtctagtatctctttcgattttcatagatggcacttgcaggttttcgtggactaaaaaacaatgtgtattgaggaattgctatgattcaacttaataaaactacaaaaatgaagaaaaatcattttggtagtaggacgaagtacatattaagatgattaggcgatgtacttaatttgcttgagtaaaaatgatatacgatttaccaacaagactaaaacctgatttggatgatttatcactgagcgataaaatgatcaatatttgcgccctttgccgctcatgcagggaactaacaaaaaattgtagcactacgtgacggttgcttgtcacttttcacgagtactactagtgatttctatcaacgtgacaggttacaggtagacgtgttgtttgcttcgttccttgttcttgtcacactggtacagacagaactctcaattggctatattaaattgctggttgagtcaatatgcaagtctcccctaataaagttaagccccaaaagaatgtggattgataatgaaattaaattagaaccagcaagtaattacgagcaaaaccactccaaattccaaaaacgtgtagcatctcttgaaagtgggaaggcagatggggactgaaagttatatctgtgttcccttcttaaaaaaaatcccttctaaaaaaaagttatatctgtgtttcaagctgacttctataagtaggagtagttctttttttaatcaagtagtgattttataattaagagtcatttaacctgcaatctatataataattgggtatagcttctttaaagcaaataccagaatgaattctagttttttttaaaaaagatgagaactgaaataattttgataacacttccaacaattttgtgcaaatgttaaagacacaataatttgtaacgtagaatctattttacgaatttcataggaagtgtaactttttttatccctgtaagatttcttacatgacacatttaaattctgaagaaaacaaaacagaaataagtgtacaaatgataccttctggcgtagttttactaaagcagcaaaagaattgcagtatcctggccacaaagaaggtgtaaactgcaagttggagtattttaagagatgaaacctacaccgcagtgcaattatactattcattctcattccttactttaggcatgcacaagcactagaataataataacaacacaagaacaaattaatgtgggttgtattttggtgtaaggaagcatataagtgcagctttattcctagcctttgccctccatcagttgtgattctagcctttgccattagcatcaagtacattagatgtataaaacaacagggaaaagcatttctttgtttctttactttggagccagtgcagcctgctgattcatattcctgttgtgcagggcgaacaagttctgaaatttttccttttccgaaacacaatacagataggtgacctataaacacagcttacccttatgagtactgaaattatcatcctactcttcacaatttatgatagttgcaagcgcgatatttgcactctataaattcctcaaaaaatatttgtaagaatttgtaaaatttgctcctctggttctaaagttgttgtcatcgtctttttcagaaatttttttttgtcaaatttcaagacatgatacttgccctacaagtgcctcaaaaataattgtaagagtttataaaatttgctctaacaaaattgaaggaaacaatcctcttttgcccccaaaccctagctggggatgaaagatccatgctctatagttgccttgtaaggggaaaattgaagatatatggtcctaagagtgcggagattgttttggtaattaatgacaacccattgttgcaactaactattttcatgagttggtgagattaggttgagttccggcgtcaagttgaaaaattgaagctaaaagatagacactataatttgatgatgagcaagtgaatacattgacgatatggggtatgaagtggctatctatggaaagatggtgaagggcaagcaaggctcagttacgatacctggccaggctaagatcaatcgagagcacgatacctcgaaacctgataaagacggagatgagaatccatttttatgtctatcagactatcacttaattaaaaggtataaattgtggttcacttacaatttatgaattaatccataacacctccgtgggttgcagagaaatttgagattataccatagtcaaagatgggttctctcaaatgcaaatctctcagattcgccagaattatattctcaaacatggtggtgctccatgttaaaatgtctttcatcctcttttgtttgtgaccagacgaaattgcccttgggtttttccttccactcacagtcaccctcgccgtgtccggggagctcggagctattctaagcccaagctcttcctctcctctatgccagaagctcgaaactttctctttgtcaccgctcctagcccaagcttgtcctcctcgtgccacaggctgagctcaagcccttcctcactactgagcttcgagctcaacctcttcctccactttatgccggagtcttgtctttatttcccttgactagaaaaaatacccgtgcattgtaacgggtgaaggctattttaattgtactattgttagatatatttgtttttgtctaagaagtatatgggatttttgttttgagatgatatccaattgaaacccttgtattttcaaaaacgaacgaatttaaaaaccaacttaaatacagatgacataccaaaactatcggtatttttgttttgagatgatatccaattgaaacccttgtattttcaaaagcgaacgaatttaaaaaccaacttaaatacggatgacgtaccaaaactatcggtagaaacttcttcaatttttattaacatatgtaaatactccgtagagagtcccgcctctcccaagccgagcccacttacatctcccgcctctcctaggccgggcccacttacatctggcagcttttatagaccgccctcacataccaacacaagccttttttgcacactttgttctcactcatgtgcacccgggaagaagaatttccctgtcggtcacccatcccaaattactccaagcgagatcggcttccggaaaagaagttgcaacttgttggtacgagtattctattaatcctattaaaccctgggctgggatgtcacatcctcacccccttaagacaccgacatcctcgtaggtcaaccccaagccaggaacgtcccctcttggccacgtctgtatgtcgggatgtcacaaacatcatctaaggttttgtaaaaaatgaactttctctcatcctattgaaacgagattggtggcataacatatattttcaccagctacccgtttcagtgccttagatccatttaccacaaccttgtgcatcgaatgtgattgagaagagaagaaaaggcaagaaagttgaggaacacagaaaacatggtcacagatggccaagcaaggtcacggtgtaggacagagggacccttatttgatgatgtcacactaaactatagcctcagagagagggtaagagagaattgcgatgggagggaacgggtggaccagaaaggcaaggatgatatctcgagttttgttcggtgacattggcaggtaattgtcatcataatcttagaaatatgatgatgcacgtccaatgaaagacaacatatacccctaaaatgttgaattgaggcagcggcagagccacctcctggactccgccgatggtgttttcactatactttctttggctatacatgcgaaaaattgtcgatagctaggaaacacctggctctggcactgaattgaggcgacggatgaatcaaaatgtgaatggacaaaaaagtatcgtgctgcatgtgtaatatatagtttgggcataaaaaatcatgatgtttgctcatattgctagttattgcatcacccacgtcatcttgatcacataaatcacttaagcctaaatagccaaacgaaattatatgttgaaacgtgagttcatggtgttagtagcacgtactccctaaaaaaacccacttctgggtttgaatctggacatacacaactcagaagtggtttttttttattaggggagtataaattagtaacgctaattgagtctccagtatctaacatgtttttagaaaaaaaaaacagtatggagaaatatataacctcttatatctttcagatttacttttggctccccactttatcatcatcatcgtggttaaagctcgcgagcttcctcaaggtcattgtcagacgctctaccgggctccacctctgtgcccagccatctatcgtttgccgtggcttgtgacgacgacctgagtactaataatggttgctgcatctccttggtttatttcgtgctactcatcaccggcgccgaaatattattactacgagaaaattgcatcgccagtacatgaacttgttgggtgggtgtaatccagtacacgaacttgtaaaatgctctttttagtgcatgaacttgtctggtgcatgcagaagagtgtgaaaaggacacttcatgactaaacttattaatttaggggctaattaggatactatgtaaatatatactccctccgtattttaatgtatggcaccattgactttttaacaaacgtttgacctttcgtcttattcaaaaaatttatgtaattatcatttattttattgtgacttgatttatcatcaaatgttctttaagcatgacataagtatttttgtatttgcataaaaaatttgaataagacgaatgtcaaatgttggttaaaaagtcaacggcgtcatacattaaaatacggagggagtatataagaagattgctattagatatacacctcttcaataaaaaaatagaatgggatgtggtgatagtagaaaaagataaagaaaaaactgagcaatgatataagtgtaaaaaatatatgaaattcatcatttccatgatcaaggataaactagagatcaaatttataaatattgcatgtcttatgcacacttattttgaacctcgtaaaattaacattgtcaagttattttgaacctcgttcgcacgaacaagacaagtttgtgtactacagatatgtaggtgtgaattgatattaaaaaggaaaaagtccgaactcaacaaccagacatctttcaccttcaactattaataccggacgaactacccccgactcaacccagagaagttttgatcctaagtgacagtccagtcaataattcttcttttttaaattgacgggccccacctgtcagtcttatcctctccatctccttccccttacctctttatctctctccccaatcctctcactcttctccctcccctcacctccatttctctccatcaccaagccgccgcacggagggggagccgaggatggcggcagtgggcatcgatgggcaaggacagcggagggggagctgaggacggcggtggcgggcggggatgggggtggcagctcaaagcggcagtggcgggtggggacagcgactggggcgggtggtgacggcgacgccaactcggagcagcagagggggaactgaggaccgctgcggcggacggggacggtggaagcagctcgaagcaacggtggcgggcggggacgagggaggcagctcggagcagcggtgatgggtggggacagcagctgcagctcggagtggcggagggggacccgagacggtggcagcggtgggcaaggatagcagagggggagctgacgacgatggagtggctcggcggggatggcggagggggagccgaggacggtggaaggggacatgccgacagtggaaggggacatgccgacgtcgacgctcgattctctccctctcaacgccccctcctctctcttctccctccctgcgaggggcaggtcttcttgcgcaagtccggggatggccgctgctcacccttttctcacgcaagtccccacccgccactgcctccgccacgaggacacatgcagccgccggcgcgcggctcggcctcagcctccaccgacgctcgtagccgccagcgcgtggggctcctcctcggctggcgcgtgacgcgcacgagagagggggtgagaggggagagagagagaggagagagatctgataggtgggcccatcatgtttttaataaaagaattgatgattggactgccacgtaggaccgaaaccgcttgtaaagctgctcaggagggggggtcatccggtagtgatagttgagggtgaaagatgttcggttttcgggtttgagggcgtaattggtgctgacctattagttcagaggtgtaattcagacttttccctattaaaaacatataagcagatagagagagagagcgctctagatcgacaccgatacatcatcggacaaggagttgattcctgatcggtttgctcttttgttatttttccttgagtcgctgacggagatgggtctgtcttcctacccatcacgtgcagatatggatacgattcatgcaaaactagaaaggaggcaaaattaataaaacaaaagaaaaagaaaagggaccataggtggggataatactctctatccagcgcccgatgaagaaaaaaaatcagacatcgtcttaccatgtcatagcacttttgcactcttccttatgtgcatgttagaagtctgcatgttgcatgcatatgtattatgagtttcctccatctagtaaccttcaaaatgagtttcctcttaacttatttatcttatcaacgatctgattgcaccattatatttgttataattaaatctttacaataagatgtcacatgattatattctaatgaaaaatatatatgtttcagctagtgaaactcgatgtttcacatgtgtggtgagaatgtttttacctataattttactatgttccacatttttaagtttttgtgttgaaatggattatttttagtgtttcaataaccattttatgatagctcatttgaaaatgttgcatatagtgttattggatgtttcggtaagtattctgagatgtttgaataggtactactcaatgtttcatatttaagatgttttaataagtattttatgatgttttgctagtgtatttgtaaatattgcacatagtgttgtttagatgtttcaacagtcaaaactcaatgttccatatataatataaaaatgtttaagttacgaatgtagtcatatatttattttttatcaaattataatcatataagatctcgttgtaaagatttaattgcaataaatataaaggtgtaatcggatcctaaaacggatatgtaatttatgagataaaatggtttaaaatttattaattaatattgcatgcatacacgtcagaagaaaaggtggatcatctcccgtatgcatggatggaggagcacccgatttgtactcgtgtcccgtagatggtcgatttggtttggtagagaagaaccagatcgcatcatatatggaataataaaatctaatccatgttcgaccatgtattagtcttacagtgtgacttggggcggagctagaacaaaatgaagggggttccactcgcttgctttactcttgtttgaattaaatttagcttgatacgggtgtctaagtttaaactgacagagtatatatatggtgaaaataaataaattatagctaaatttttttgaaccgggttcctaggcaccccctagctagacatagctctgccccctgagtgtgacatgtgtggaagctatatgattgaagggcatctcgtgcgtgcgcatgtatgcatcttaacatgtagtacaacattagtctacttttttatctttaatgatttatacattttaaactgtgtattatttttaagatccgttttaaccattagactccactcaaaatatataataaaatgagcacaatatgaagtattttaaatatataaaaataatttatttatattgtagaagtaaccaagttctataatagaattagtaactttttatagcattataagtaattctatggatgtgttcaaagaaggtcttcatgggtaaactgtagattcataagtaaataaatgatttactatatatatatatatatatatatatatatatatatatatatatagtaaatttgtttggtgctccatggtgcccgggcaccattgttgaaattgagtatatacccaattcaaatgagcatgaaactttttcaattatttaggtattaatattaactactttactaactagttgaaagcaagtttgaactgaatttgaacttgtttttgttagattttgattctaggtatatagcatccatacatataattagttaggtatgtaatcatggattgtgaaataaagttaaatttgagttgttttgttgataggtataggtatgaatcgaattcttataactaggtatatactcacaatttgaaaattttgaaaaatttaagtgattttgtgcatttgaaaccatggtgcccgggcaccatggtgccccatatatatatgtgtgtgtgtgtgtgttagtattgtttttcagaaaaaaataatttaatttatataagaagcaactcttagaaaacaaaagtaactattcatgatattaaaagtaaccatatgactgtaggaaagtaattaaaaacataaaagtaacacttcatgctatttcaaagtaatcactatattattttaaagaaactttgcattatattggaagtaactgttaaggaaatagaagtaatttcatagtatgagaatatgctaaaggaaaataactaacattttcacggtgttacaagctgccagagggaagtaactctgagaaaaatagaaataactcttcacattatttgaaagaaccacactggtagaagaaaataacacttcacggcattagaagtaactatactacaagagataagttctttgtagtattagaagtaactatactatgacaggatgctatatgcaagggatggtgtttggttggttggctggaccttgggttggaaatttttaaagactgactcttgtgcctggtcatgatgttatagatgttttatggtggattttttttctcttaaatcattgtactaaagaatttatatgaaactgacacaactttgaaggcgtgtggcaaacacataattattaacacatttgcacaacataagtgtggacaacgactagactaatcagtcactaaattgtactcatcattggttataccacatcgaataaacactataggaaaaagaccaatagatcaacatcaagcatcagctgtatcatcagcaaactataaaaagccatacggcatggtgtccacttccaccttaacaagtacttagccaacactattacatagccatttcactgcaaatatcaagcatcaacagcaatagagatctaatcggtacttcagtacagaaggccatatggcatggtgtccacttccaccttaatcagtacttagcaaatgctaacacatagcatggtgtcccagtaccacccctccaatacaattttaaaatagttagatgcaatcgggatgatgctcatgtaggaacttcgtaacccaacgagcacgacacgcctcattcttctgaatgtatatgaggcttataaacttgttagcagccagatgagttagaacaagatccaattggtcctcattaaaactgggaagatccatcactgcattgtagagttcagggtgcaccttagtatgggttgtagagcgtatggcagcagccacctcatgcatatagcaccagtcatgttagtcaggaaagccccttcttcttcagtcacaacaggggttcgctttctcttcccagatgaggttgagccaccagcaatgtcattcacagtaggaataaagttaccactaacaggcccagcagcactagcccctgcaacactttcacatccagcaccaaccccattcccaccctccatatccccatccataacacccaagccaccgtcagccatgtcagcaggaccaccaagggcctcattagagcccattgcaaatcttcctgtggcttgggttccaccaaagataatagccatcggtgtgtagttctctagaggcacattcaagaactcaacatctttagatttgtcctacatgatcagatttattatagttagagtgtgaactgaaattttttacagctaatggttggaagtacagctaatgatgatttattacaattagagtgtgaactcaaatcacatacctttgtatggcccatatagtgttcatcttctaggacaatcatgttgttctgatcatcccataaagccccacttagatctttcagcctaccgatacgaacccacattgaacgccatttgcgaagatggttgtatacttgggttccactggtgtcaagcccatagtggtcagtcaaattcttagcaagcccatagttcaagtgcacttccttgaaacccttgtcagtcttaacaccttgcgctatgagctcgaccatctttcttagcataaaggtagatatgtgggatgtccagcgcaaggctcctcttgcaccttgtccagcaaccttgtcattttcacatgtggaagtaaataaacaaaacaattgaatgataagttgtcagccaccttgtcttaacatatacaaattcatgcattagtagaaaaggtcataaatacaaataaatgccctataagctaccagccacaatatcttactccctccatacacaaaagttacacctatttcacatttgagtttttccaaataagttgttcctatttgtagtccttatgtatttaagacttaaatgaagagataaattaaatgttttattagaacccaatgagtcatctaaatactcattggctgcatgcttgcattcactccttgattttgtaacatccaaggtgatttaatttctccttgatcttggtgtcaaaagtaatatgtgtaacttttgtggatggagggagtataataaaaagttcaagcaaaagtaggaaatgtcactaatacaaataataataaactaaccacaatatctcataataagaagttcaagcataggtagaaaatgtcattaatacaaataataatcaaccagccacactatcttagcatgaaaagttcatgcataagtaggaaagaccattaatacaaataataaccagacacaacataattagttcatagatagtaatgtgatacatatcatgctacaaatcagaccctagatgaccctctagttgcccacgtatccccagccaagtcatccctaatttgtaccattcccctattgtcttgatctaattcatcgagctcttcttcctcatcatcacttgggttccaatcttcttcaaatggcacaaattcatcattgccataatgaagtatccaattatgaagaatgcagcatgcaagaaccaacttaacttgggtcttgtatggatgaaaaggtttgttatatagacaatcttgaaacagtttttgaaggaaccaagctcgactgtgactctaagagaggagtgtcttaaattaaacaactctctttggtcacgaggatactggcttccctcatactctctcaagtggtatcgacacccacggtatggtgggaggaaccctggtctagcaacataactagcatcaacgaggtagaattttcctaacagatgataaacatgggttcagtcattaccacaggacaagaaatcccaaatgatctaaattattgacactctatcacctgcggggacactacggccatcatccctctccaaggcatctgcaagtatgagggcatcatgtgcagacccttcccagccagcaagtacatatgtaaatttaagatcaaagtcaaccgcagccatcacattctgtattgtaacaccctttctacccctaaatgctgctgacatagcagatggaactcgagcaagcacatgggttccatctattgcaccattacaatcctaattgacatgaaaaatgttaggatatgttgtgggggaaaaaaggtcatttgtggataatatttgttttaccttaaaatatgggttgaatcttctgttgcctagaatttttcgaggtatatcagttgaaggtggtttgatcaactcatttctcagttcaccaacaacatacaagacctctctgaagtacctactgattgtcttagttgaccttctaaaaacgggttgtaaagccctaaatctaacattgtggcctacaactagaaggaacatggcaacatgttcctccactgagctgtgaatagagtcctgtagtagctctctttggcacaacaagtgacatagccgaaaaaatggtgcccttctcattctaagctgatttacacaatttgtatcatttgtatcatagatgaaacgcaggttggtttgtctaattaagtccctttccatcaatggtccataagaaatcctacgggtgcgttgtctagccctcctcacaatgaaactcatgtaggcacacattgtagcaactaaaccagcagctttagcctttaggatttgacgtacacagcgtatgtcttccatctatgcaaataacaaatttataatgcattatacattgtcagaacatggaatgcaaaaaagcacaaccatataccatacatccaaccacaagaggcaatagatcctacccatactgagacctacatacttgaaaaagaactagatctagcaaaataatcacataataatatactaaataaacatgatgcaaaaacatgcacaggagaccaactgcccaactaaaataacatcatcaatactagatctatacaattgatgaagcataagcaaagggagcacccacgacggtgcacaggagcctcaaaccctagcttcttctcctggggagtgaaatgaggaggggatacagccgtgcggggaggtaaccctcgcccttttgcatgtgcggctgcaacgaggggtctcgtgggtgcagttgcgctgcaccggatcagcctggatgcacagcgatgctcccccctcgtgtttctgctcagccttgcccagagggcgattttacatccgcccagcttggctcgcggaccggtccagccaaccaaacaagttagattttgctggcctgatgcgatgcaggtgcggtgcacccatccatacacgccctaagagtaaggaatgagtgcatggtgtagacacattcttttttgttgcatgtgtttactatttttagaaaggaagggagtcaccaattaagactaacgggagcacaagcttggcttagtcacttccatatggaattatgtctctcatactccgtacatgtagtgtatcttattgtaaaatgcatcatttaatatttagtagcattcaagctctacgcatgtagaaatttatggatatgtttcagtatagatcaacaaatttacctgttaagattcatatcacatattagacaaaaatatgtacaagttccctacacaagccaatatacacatcaaattaacattggaaaaataattgttatggaactcatctgtccaaaattttcaacatgtgccccgtgtctttaaactctaacatcatcaaccacaaaaaatcaagaaaaaaaatcaaatgatatactatcaccacaattgatgttagatatttaagatggagtatcaaggagataggttgacaacaaagcggatggagaagctcctaaaaacacactcacattaattttacatttaaaattaaagcaaagtaactaatttaacaaataaaaatgaaaaaactatttagttcgcatacatatattagaataggtcaatgccggttgaaatgacaagcttctccaaaaaaaaacatcactacacctagatatatcccactaaacaccaccacaccacgatatatcccactaaaacatcgtggtagtcgtagtctaacataataaaaacatatagagcatatctcagcaaaacaatgattgaaagaactttcgctacagtgattaaatacgttgtcttgactaaccaatttcctcgggcaaaatgtgacaaactatagccaagcagacccataaaagaaaggacgctaacaatgtatgaaagaatatagtactcctacttagagttctttttatagtatgtcaatattattattcataaacttttatcctgccttctaccaattactatccataaacttttcttacaatttgatcaatgtcaataaaatatatatgctaaaacaatgagcatttgttaattgaacgaaaatttcgtaaggtttcatactgtttgaatacttttgatgtttcatcatttactggataataaatctatcttgtccatattcactcaataataagtatttattattgcggcactgacatcttgttatcagttgcatcacatatccagcagctacctaaaacttcttttcagaatagcattgactcaattaaattcacaacttttaaatttgcacttcaaaaattatactaatcttaaaataaggtgtcagggttatggataccacatacctcggcagggcccaccacataccatgtcctatacaggagcaaccttcggatataggaggagttccggataaggaaagacaaccagagttctacatggaaacgacaaggactactcggattgtatccatattggtttctctagttctacttggacaaggggacacctatgggtataaatacaaggccccctagaaggagaggggatacggacaacacacccaacacaatcgacatagaagctacaacatagaagcctacatacgccaagacacgccgccggatatcaacttcagggataagcacggctagtaccctacggtgtctccggatactgtcaggagagacgaaagcactatctctgatctcgtcgggcatggattcgaggtggaaggctaccatgttgtcgactacgagtcagatcgtccgaccgccatgccgacaacagttagataggctatcccaaacattgtactggtgtgattatcatgaataagagcaataccggcttcggccaataggatgtaggattattacctgacaattcaggggcccgaacctgtataaaaatccctgtctccgtctcttttacctcagtctcgcgtatatcctagcaccaacgatccccatactgtccaaataccgtagtcgtgacatcaaacgtcgacataaggcataccaaaactaaccaaatatatatgagaattataattgaatagagagtgaattgaaacttaaataataaattacaataaaatggtaattaatattatgataaagtattcaaaattggtataagctttcaaaattgctaattactattacaagcagacagcatttaaatccaatagtgtaataatgactaaaaataaattcggtaactcaattgactataaaagcatgaacaagaaaaaaatagtgaacttatttatatctattaaaaaaatgtttgtgcatataattgtttctaagtttagagcttcgcaacaattaaaacccattaaagataaaaattgattatctaaccattttcacaaaataacatgctatgatgtaagtcactaagaaaactagcttaggttgtatagacatgtcttttatatacctagtcacttcttcaaatttcaccaataaagttattctgttatatgacaaattatatcaaattgtttacatttcaatagtggccagatattagaccttctgtctctttttcttcaactaactatctacattctaataaatattgtatttactaacataataaacatatgttatattttcatattttatcaattataacgaaatttatatataagaaataagggtaattagcttacaaaccagataactttttcttttacttttagctttttctagagcataattgaattatattagcaaaaaaaaatattgtttaaatagcttttaatgtttgatcattcactgaaaaataaagttatatttttcatgtattaaataagaaagctgaccaatacatggttaacagttattatataatagtcaaaacagaacttttaatcccacaaattaattgtctttagaatactaatgacttatattcacaaattcaattttgtctttagaatagtaatgacttagattcacaaattcaattatttttacttcatatgtatgtaggtttccagcctcactactttaaaagcgcatccccttcaccttttgaaaaaaatgtgtaattcccttaaaaaccttaaaaaaacaaaaggaaattcgaccgcacttccttctcaaagttatttccttctcttagaaaactatcgctacaaaaacccttctaactaaatataaaaaagctcaaaaatcattaaaaaaactatatagaaataagtcatatttgtatctctagacccattgttatgcatgggcatgtagctagtaaatagcgaaagccacaactcacttcgataatatatatagtgcactatgacaattggatttataacaagcgtcgatctttaatttatctataaattatatatttttatatgactatatatatcgttgagtattattaatatttacaacattttggattatatttagaaataaatatctttccagttcttaaaaaataagttaagtaacttgtataaataaaagatcattaccaaatataattattattattatttactcatgtaaaaacatagataatttatattgcggagcttcacacatgagctattaaggtggaagtaatagttttggctctagcaatatttattagtgaaaataaagaggacaagaaatcaacaagaagatggaacaatcgaacaatagaacaatattgggttaaagttttagttccacaccgcattatggcgaagaacaaattcaataatattaaaatattattgattaatgggagtatatatcgtaccatggttgtggacaactttccccctcatgtgtgtggctagtgactaaccttcctttttcttaccttctcgaagtcctcttgatatgtttagctaagaaatgtttgttttgaaagaaataaaaaatgatttgacgattattttttatggttgttcacttactacctatatatactatggtgcggcatttttgagaaaaaagtcaaatcttgtactaggtagggagtgaggggaagctccggaaggagtgccccaaatatcagagttttctccaagaagttccggaggagtgtcgagtttgtcgacatttttccactggagttccgaagaagcaccgaagttgtcggccttattctcttgcttgtacctcggcagatgcttcttttaataatgtaagtattcaagatctctttgtggtatttaatttatttgcttgagtgagatatattctcatcgttgcgggtttgtcacttagttgaattattaagtgcttcaatactatgattttggataaagaagaaagctcttgcacgaggctagagtaataatcaataacttacgtgtggtgtctaggttagcgggtaccttcgtttgttgtgtactccacagaaaggcggcaggtggtgatagccatttatgtcctttgtatccctccacattcaggtacatcataaagccataggtcgaactcagcttggcagaccagggaaaagctaatgtccgaagcaatcgataggttttacctttaactcaagtctaaattaactcataggaatcttctttagtcttaacccaccattagttattgtccttggatagaattttgttcttagaatactctaaagtgaagtgccacggtgatatccatgcgcttaagaatttatctatgcgcttacgaatttatctatgactgtatcaaataccaacagtctcaaggaattagagaatgttgaaagcaaaaactatgcgttcatcgaaaacaaagaagactattgttgcaagaaccattgattcaacacttcggccggggaagggaaccttcctttttcttaccttctcttgaagtcctcttgatatgtttagctaagaaatgtttgttttgaaagaaataaaaaatgatttgactaaattattttttatggtttttcacttaagtatctatatctactatggtgcgacatttttgagaaaaaaaagtcaaatcttatactataagcccaacggacgggagtttgtttccttttttttattttttttgacagatgttacggaccgtttttttttcccgcacgcatagaatcggatctttttgtcgccctttccttttattttaacggactgactaatcggatcttttcttttcacggacgcatctcatctttttattttaacggacggactaatcggatcttttttttcatggacactgatgactgttttttttaccgcatcgtatataatcagattcaattttttcgccctttattttatttttacggacgacgaaagcacctctaactttttaagtagtagtagagatagagatgtgttttaatttttgaagcaatagttggctatattattaaacttcctctggagaagaaatgtggcaccacttgcctctccaacctgtgcacccccatcggcaagaaccaagctgattcacaaatcaaatcaacccatgcaaatcaatttaagttaatttggtattctgtgtttgacgaaaacaaaacaatgaacacacagaaaatagggaaaccttgtattttattaatcatgattcattaacatgaatgtttacaaaaacatgagggctcccgcaggagttagccttttgccttcgcgaggaatgcttaatagaaaactaccgattaattacatccaaaggatgagcctatggaacacctccgattaagctgcgctttgtgatcgtcgtcttcaaatttatttgctcgccgaagattgaggttggtgcagatttaacggtgaatatagtgaatgtagaatggatggctttgtttcgccaaaacccagtcacagtacactactgtcacgtcggtgtgtggagggaatctggtggagcgggtgacctttgcctcgtcagcgcccactcatgtatcttggctttcatcaaacatggattttatggttgcttttgcctcgttagtgtccagcaacggcgtatccggtttccatccattttagacgtgttaatataataatgacctggccttgtcagcactcggccatggtttcgtcaagcctcgtcggtcatacacaatgaaacaaatgaatggctgtagccttgttagcttaagccaatacgtcgcccaacctcgtcggtctcggacgcaacgcctccgtagttggcgtatgcatgagtcaagaacagctcctgtgcatatgcatgggggcaaaatatattttaattatgaaaacaacgcctagacagtccgatcaccaatgggggctggacatatctagtaccattgttattggtatcatagtaaccgatagacgatccgatctccaatgaagaccaggcgtctagttttaatcatagaaaatatcaaatggcactcagatgatccaatcgccaatgagggccggaccagcctaataccattgattatataaatgcagtttgatcatagccgtgtttcggctctcatcaatctgactttaatcattgagatagattaagaccatccatctggtagaatttggagagagaaggaattactcccgtacatgacatgcacgaggcatgcacgaggcaaatatgtaactcttccagaatgaatatgaactcactttatgttattcagagcgcgctcctcttttccaaattttctcttcttttcatacaatattacagtttgtagaggccctgtacataagaacacagaacaccgtacaaactaaagagcatgtacctaaaacaaattatcaataaaatgaagggcttttgtgcaaaaatacgagggccaacgcagacacacgagaagccgcgaaatccacccgccctccagcgcacgctgacgtgtcgcgacccggcaagggccacaccagggcaaaacaccgtgggcgctacattctcgggcaggtttgaagactttagatatgtataaatcatggttggtccgatgccaataagactcaaactcatcccaagtatatacaaataaatatctacatccaatatttgatattttgataatttagacggcccaacccccagaaggattaggttcacctcatatttgtttgcagcccatattaatcgcttgacaaagatgacgtgtgcgtgtgtatgtgccactagggatacttatatctatggctaagttcacaatacatccacaacatattcgtctgtgcttcactttattgttttaccgtccgggctgcaaaactgcacaatgctacggtgtatatttgctccctctaggagataatgacgggctatgcatatatctgcacagcactacggcgttgttgtgttatataggataaacagcttgacggagaacaagatcagcttgttgtttaggactcaccgatagagatgccatcagcgcctgctgctacaggtacagatcgcccatctgcgggatacgcatcatctaattatgcattatcttcattttttatctctttcgatctcacttcgtctctctctctatgtaaatactcctatgtgggtacatgtgtatgcgtcgctagggcatattgctgcctaggtgcgcagcgcttacgccttgtgtgctcctctcgcgatcatgccggtttatataggcagagcgacagcaacggcgcggcctcatcctcgcgagttttcagcgtcgtcgacgtgttgtagataatgttagaaaacctatgggcttgggcctatgaaggcctagcccatatacactgacccacaccaaaaccttccatatatggaggaatgctatataaggaggagagggatgctcatattgtacacctgtactcgaggatgatagaatgatgaatgagaagagagtctcacccttacatctcgtgtctccatttttgtagaattacgggaccctcttggactatttcgtgtagcaggagggttgcgtaatacgttaccagcacgacgttctaccggagaccgaggaagagaagggtaagaactcacagatccgttttgcatctagctgattcaatcgcgaaaacgaatccctctccccgttctcgttccgtttttgtcgttcccgatgaaatccaccacagccgacttggagtcgccggtgtatgccgattggtgaaaatcacggtagacagacacggagttggcgtgccgcgacacggcatggcggcgaacccgcgccacggccgcgaacacgcgccccgcgctggcatgcacccggtgccacggccgcgcctgtacgacgcaacgtgcgacgaggccatgcactggccacgtgctgcacactagcatcgtgcccgacggcaagcccacgccggccgccatgatagcaacagcaaaacggagaggacaaagaaaagaagcagacccaagaacgaagaaaaagaaaagaaaacgaaagggcgccgatgaagacgtcgggtcgtcggctgcacaccctcgccgccgcacggccgcgcaggccgcgccaccacacgtccgcaccaccgttggctgccgcacggccggcgccgtccgtgccacgccgccatccgcaccatgcgggcctccgcaagggtcgcaccgccgctgccgaccgcacggcagcgctccgccgacccggccataccccgtcacacgggagtgccgccgccgcgccgctcgtccgccttgcagaagcgccgccgcgccgctcgaccaccgcgccgcctggcttccggcaccgccccggaatcccaccgtgccgtacatggcatgtgcggggtcaacgggagaagaagataaggaaagagaaggggaaaagaaaggaaagaaaaagaaaaaagggaaaggatcctgtgattttgcaaaaatacccttgttgtttttggaaattaagtgcatgttcctctgcattggaatctttgcactttaaaccctgaattttccaaaaacacacaaataaccctctgcatttgggatatttatttgaatggcattcggaatttgcaaatatcaccaaaatcatattctcgcataaaagagccacgggacattgaatttcgaccccaactttgcatttcaggtacctttttgctgatgtttgtgattatgaaatttaattatcgcatttacgattattgattatttgtgatgcttttattacttttaattaatatcgttgcgataaaatgtatagaattcatagtatatactggaattatttgtgggaattttgtgtaccattatattgcaacacttgtgcattttaccagcatttaatttgcgcatatttttgagtaacgaaagatgactggcatcgcaaattagaaattcgctaaatctagaatatttctgacatatttattcaatgtcgaaattacgatagagcaagaagctctacggtaccattaatccaattgcgctatgtgcactgactcgatgagtttgatctagcatctcaatctctcgctagttccttcaagctactctcatgaatgagtacgaatgagcgcgttagaagattatggaccctatctcttgtagagcaagtactatgagcaagagttggtatttttcgactataatctgctgagtcaatgacccagagagtacggtaacacggtgcaccgaatttgcactaaatactgcagaaactcttgatgttctacccgaacacgacgaaagtcgcacgcaaacatcactagtgtacatacaaagaagtatgcctaactagtcgataatagaatcgtgtaacgttcaggatagtgttcactagaagagcattatcttccaaaaaaccaactagcacagttgataatgaattcaacatgagcagctagcctggtgcacttacctcaacggaagaagaggaaaagggggagtagaacacaggtcaaggtgaacaatctagaactatgaacatgaaaaaagaggacaatcctaatagcacactcatcatgaattgagggggagaactcctagcctatttgcatggccatggacgtagaatctcctatgctagattggatcggtcctaaaatttatgtcagaatgccatagctgttgagcaagaagctcactatgaagttaattgaatctgatgtaccagaatactttgttgaatcaatatactccgtcatcaattgttgcaattcttgaatagagcattgcatcaaagaaatggttcttgcccaagtagagcacacattttccctgcaataaagaattatttccagtataaaatagcatatttaaagcatttactattttgttgctcttttctagcacatagttataatgctttgaattttgtgtagcacccaaacataagagaaaaggaatgaattgtggtccgcataaccacaaataacattttaagagaaagaggtatttccagacccatagaactggaaacattatgactgttgctagcaacaacaactgaatttgtcggcctagaatgcgccacaatcatattacctatggaacaattgtgcactttatagaagcatctattgtccgtcaatcccgttgaactctctaaaaagtgtgatgatttgggctacacccttttagcaatgaattttcagccattttcggtcttagaattataagaataaaaattacaactcgtatgatcatagcacatatatgcataattttcctaaatcatgaagatttgtgtgccagtatgcaccgacaggatattaatgcataaaccgcatatagttctagcatctctgaactagattgcgaagaataatgtggttcccatttggtactgtatggatatatgcgcttccgaagcagcaaacatcatgttcctcttagacaccgtgtctttgccaaaactgatccagcaagatcacatgaactccaatagaactcactaaatcatcttcagaagtccgcgaggacaatgccagcattgcatttgatgattggtaaattgacagcacgaagtaccaaatattcgcataagcggactaagtataaactatgaattgcaatatttgctatatcattgttgtaatacacgtggtagaaaaggacatgtagtcctgaaagcagcggactctgaaagaaaattcagaccatcggcataaacatccatcctgcaactagtgctattgcatctgtttggtttatgtgcatatcccactatcataatgcgttgcaaaaggctctctccgaaggttggaaaccttttacggagatagttatgaagcctaaattccttgacaaataagaattatttccagtcatttaggggggagagaatgaacccctagataggaaatgtcaggaaatatgatagtagaaagggactaatgcatgttacaccacactagtgaatgcagcttgcataaagaattgaaactgccaaatcactttgtaaatacttttgtgatttcgaagagtttgactaagttgcatgaatgaaatgcaccggagaagggtgataccgaagaaagtaaaggtacccctcgtcttgtctagaggcctcgaacaaaaagaattggacaagaaacttcggctcctcatgcccctaaagtaaccggagacgtctggtgaaaacagggcaagagggactatcatactcaaagtcacgaaaaataccccaccgaatagaaggggagccagttgagatctggcaagtggtacggaacctcagaacaggcgtatcgcaccttcccatcaaggaagaaaactagctgttggagtgtacactaacgctggtacatgcccacatcaaaaggtattaagcaagaaaaagaagaagaagcatatgaaaaatgcatctcctcgtatatccatggatactcgcataaagtctcatacaaccagtagaaattggcagtgagacctatcattgaatggaattaatgaactagaagttgaaatgaagaactcaacctgaatgattgataagcattgaagatagagtcaatgaatgcatttcaggagtttggatcttacacttgcataatagtacatgaagaagtactaggtcccgaaccaacataaaagaatagaataaccagaaaagaactgaagaaaacaaactcgttcgttttgaatttgagtttgatttgaaatatttggccgaatccaaatcatgcttacgcttgcagctaaaggcatgcgacagatggaagtctagtacatcagtccaactgcacttaggaatgttcatggtgcatagctttggaatagtctatatcgccaaaatgggacggaattcctaaacacgagtgtcatagcagcacatgaatacttggctaaatgaactaaaccaaactaagcatcgttgaactgttcagagcctcggcatggttttgagagatggttacccgcgagagcaatcgcgatttgaaaactatctcaacccccaccatttatgaaattaaagcagcatatgtcgcacatatgcaaatgagttatgtgagaagcaaactcactaagcatatgaacccccaagctcctctatgtacattgcatagaagcaacgaactaagtcatgtggaagtattgcagattcatccactaactcattacttacatcttcccttgaataggtgtgcccgagaaatcggaataatgaaacttagataaatgcaaaattcagggggagaatttcgctaactcatttcagaatcttgatatagaaaatcaagtacccaaaatcaatctagaaagattgaaagaagaattgggtgaattgtactctttttcccttggataagttttcccagcagtttcttatcaaggtttttaatgaggcaatccgtgcgacattgcatgcgtatgctatgtactctttctccaaatttttcccactgggtttttgtggagttttgatgaggcatagacatcacgcggtgagtgcccaagggggagtgttaggaaacctatgggcttgggcccatgaaggcccagcccatatacactaattgggcccacactgaaaccttccatatatggaggaaggctatataaggaggagaggggtgctcatattgtacacttgtacttgaggatgatagaatgatgaatgagaagagagtctcacccctacatctcgtgtctccacttttgtagaattacgggacccttttggactacgtcgtgtagcaggagggttgcgtaatagataatcaatcaaccgtctgctgtaaataaggaaattaagagcatcaccaagagatacccaatactactcccaatcctagaattttggagttttacacaaaaaaaggaatccaacagacttccaatcagcatcctaaaaaattagaaatcccaactccataattctcgttctccagttatagggaagacccctgactcccaatccgccagtcacaggcaactcccgcgcacggctgaaatgtcccacagccgtcgcgagctcgttcgctgcagccttagtttgcgccgtcgtcggctcacgaactcatccgttgccacctcccgagctcatacggtggcccatcgcaagctcatgcaccaccggcccatcgcaagctcttccgtcgtccgctcgattcacatcactgacagtctatcgtgaattcgattctctcatcgtcggtccgccatcgaactgatctgcgccactggattcgtgccgccgtcgaattgattcgcgccgtctcagtccatcgcgagcacatccgggcggccctcgattcgcgctgccgccggacatggcgagctcgtctgcgcgtgtccctcgattcttgccgccgtgtcaaactgattcgcgccatctcggcccctcgcgagcacgtttgggcggccctcgattcacgccacagccggccatggcgagctcgtccgcgtccagtccttaattcgcaccgctgctgaactgcttcgtgccgccgtaggccgtcgcgagctcgtcccctcctccccggcgaagccgattcatgccgtccggatcatcataagcgagtcctcggacgtgtgcttgatgcccacgggagagacaggaattgagcaggagagagaaggggtagagggactgatttatgggtcctacctatcaggtaattatatagaagggaggagatcatgtggtcccactttttatgggagtaactgtatatttatggcgtcatatttttcaaaaaaaatagtcggtatgtatttactttgtaagttcctaaattagatatgtaagtttagtgtatttataatgtaagtttcaaaaattgcatatgtaagtttcaaaattacatagtaattacatatgtaagtggagtataaatttaaattttacattggaaaagttataaaacaaaagcatatgcagcacttactttacaggagatgatcaggaggaaatcgaacggtccgaacaggcacagccaaagacatgtagtctcgtacgagcaatcggacggacgttaaagccgactgagatcagcccaaaaagatgtcgacatcttttaagcaagtctccgctttttattaaggaagtcatgtttacataatctgttagaggagagtatattttacaagctcaaatcatgattagaaatctctaaaacatcatctagagaatgggtttattggatatctcttggtgatgctcaacaaagcgcctgcatgcagaagcaatcacgagattaaatagctagctaatgacggtgggccccataaatatatcatatgtgtttgtttgccaatttatctcctcggcacagataagaaccatgcacaagcttagagataatcctgagattagaataatcaatgacagtgggccacatgtcatatgtgcttgcttgaatcgccatgtcacagataattaattaatgaccaaacaatcaaactactagtaacgtaccgtttgtgaaggtagataattctttgttgagcagcacatatttcctctattatgtatcacatttgatttccatttgaaccaatggttttttatgcttaaaatgtacaacaaaacgagtccaaatttgaatatattcagacatcgtatgatatttgaattttctggtcccacacatcatatagatgttcgtcaaatatattttgtaaataacggctgcaaatatcattagcatgtaaaattaatgccaaatgatttattatttttttctatgaattttggttaaaaaattcatcaaacattctgctcaactagtatggcacattataagagttgtttggttggaggtacaaacctgacttcctgggcaccatttgcattttgtcgaggaatttgttgggtaccagtgcagcagtctactcgctccgtcccagaaaaagccaaccagtattagatatgatgtttcctagtccaataaatctggacagactaggttgacttttttaggacggagggagtctgtcagaagtcatgcgcgaaaactgtcacgccccgaactagtcccgaccggaactagcccgtgacgctccaaattaacctgttaatcgataccagtcccaggaaacagtgctggtatcacagggagacagagtatcacagcaacaaaggtctctttattatagagtagaagtacagtcatgttgggctgcggacagatcccgagctcacaactgcattacaaaaggaaagcggaagctaggacttggaccaatcatcacaggcgcgacttgggaactaggccgaaaccctaaaactcatcgtagccgacttgctcctggaagaacacctcgtcagcaggatccacttcatcttcttcagcaactgggggggggaaattatttataaagagcaagggtgagtacgggagtactcagcaagccaggggaaataagtgtttaatgcaggcttcaaggaaaggctgttgttttcataattgattttgtttgaactcttttctaaaaagtctaagtgagtgcttctcaaacgacacggatgagacagtgcgtctcgtccggtcggagtatgtgtaatgcatcaatctttagaattgaaacaagattggcacccggccaacagcttttcaaacggccacccgggccaacaacttttcaaacggccacccgggcctagctgatcccgtcagctgctgatttttcaaacatcgaatccccttttcacaacagcaatttcacaagcagtagtcaaacaaaactacgctaggaatcacctcacatccgcccatgactgtgggcacggctgttcgaacagtttgttaacctctgcagagggggtacactttacccacacgacattactaacccggatcacccagcccgtggggatcagccacgtcgggagacctccaagctttcatgacaaggcattttgaaagccgatacaggtttaccatatgccgacgagaggggtcccagaccaacaacaggttaggtcccagaccatactgtgccaggaagcccaggggtcctccccgacaccaccccggcgaatccacatgtctctcggcatcaaggctcccctgataagctagttactcagccaggggtgtcccattccacctatgtggtcgtacttgtcttatgtttggatgaaattccaaggaatcggtccttaagtgcgagagcgggaaaccgtacacccggtacgttccccggtccgcggttttggaaattcatttagttcgcaagcaccgacccaggtgtcgggttttccaagtcttttgtaaaactccagttttacccaagttgtttctcagattttaagtttgaaggcgaccgtcgatactcgcacagagtgcacgaatatcgaggtgcaactgggtggttacaaggggacatggtataacaattatcaatggaaggatcaaatgtaacaaattaggtaggtctgccaatctgccttgcagacgggacaacagattaagtgtgatcctatcaatgcataatatttcgcaagcaatataattaaatttcaaatataggctcaagatgttcaaaggtggcttgccttgctcgcgatccggagcttgatcctcgaaatcctcgcactgcgggtcttcgggctccgaaactacacgcgaaacgggacaactcaacaaacggcgaaaataaagccctattaatgacctctaagcgtgccattagatagatctcgagatttgaggaattttggaagttgaacggagtcaatcggatttacggttgggaagatattgaatttctaagatttattggatttttggtctaaaggaaaaaggatttatttaaatccttttttttgaaaagaaaaagaaaagatgggagggagggaatatagacttttctcgggtggctagggtgcggcccaagagatttggggcggctcggccgagctcaacggaccggccggcccaagacaagcgcgcgcgcgcgggagggggagccggtggaccgggctcaccacgcgtggtcccgggtgggacccgcttgtcagcggctcggctcaccgtgcggagggagtatgcggcgtacgcgcgcgggcggggctgggacgcggtgcacgcgcgcggttcgcggaggaacggatgcggcgggcccacgcgcagcctcacggctcaccgcggaccacacgcacggggagaaacggagggcgcagctggccgggtcggcttatccggtcgcggccgaggtggcgccgacgtggcgcctacgtggcagccacgcgggccggcgggaggttaggccccttttgttccgccgccaactcttttggagtcgtggcgaggtagtgcgtgcgtgtgttgttgtgggtgttgtttggtagtctggttctcctaggtggtgtgcgcacagtcaagctcggcgtagctctgtgacttgtccacacccgttgtatcaggtgtttttatgatttgaaaaatccagtttatgcctagtgtgtgctatctgagttgctatttaccttgctccttgccctcctaagtgcttgtctgactcttacctcgccctcttctgggagtttagatggctagccgcccccgccgtgcagcccgtgcaccagcccgctttggttttgaagatggtagagttgagccagaagaaaatcatgagtcggctaatgagcagtcacaccacagcaaccgttcgcaccgtactgtttcccgcaacgcagaggttgggcaaccccgccgcagcaaccgctcgcatcgcacagtttcccatgatgcagagatgggacagtctcaccgctctcaccgcactgccagtcacaattctggagaagaacgcctcccttccccacctcatgtggaaaacaacatgcaacacataatggcagttcggaaacaaatcttgcaaggactaaccacagccatagccagttttcagcataatgcgcatggaaatggccaccctcacgtgggcaacaatagatccaagctgacagattttctgaggtcatgtccgccagagttctctcagaccgtcgagcccgtcgaggctgacgattggttgaaagatgttgatagaaaactcaactttgtgcagtgtactcctgttgagaagacactctacgcctctcaccagctaagaggacctgctgcagattggtgggagaattactgcaatgcacaccctgaacccactaacattgcttgggatgagtttgctacggctttccgtgcagctcatgtgcctgaaagcactattgacatgaagaaagaagaattcaacagacttaagcaaggcaacagcagtgtcaatgagtacctaagtcagttcaacaagttagctcggtacgcccctgaagaagtggacacagataagaagaagatcaggaaattcttgaaagggatcgcagttggaatgagactccagttgcttgctcatgatttccccacttttcaacatatgatcaacaaggcacttctacttgaggatgccagaaaagaggctaccgaagaatacaagaaacgcaagtctaaccatcagggaaattcttcccgaggcgcacctcgccctcgctacggtcaacccatgcaatatcaccagtcggtaactcaggctaaccaccagccaggctacgcccctcgtcctcagatgaaccgtccggcacctcagccacagcagcgtgcccctagtggcaatactgcgccaaacagtgttacctctttcaagtcaccacagggaccgtcagcagttcagtgtttccggtgcaacaggatgggacactatgccagacagtgtcctcggaatcctaccaacaccaactcagggcatgctaatggcagcactgccagaactcctgctccagcggcagctcagtctcttcctagctctcaggcaagtggacaaggttctcgtgcgtccaaccactttggtcgaggacgtgtgaatcacattcaagctgaaaccgctcaggatgctccagacgttgtgatgggtatgttctctgtcaactccgtacccgcaatagttctgtttgattcaggagcttctcattctttcatatcgcaagcttttgtgaaaagaaatggttggaaaacccaaaatttgcgtgtaccgatgatagtacattcccctggaaggaatataagggcaactcaaatatgcccggaagttaaccttagaattgaggaagttgacttcctagccaaaccgatagtcctagactcgcaaagcttggacatcattctagggatggattggttggctaagcacaaaggacagatagattgtgccgaaaagtccatcaccttgcaaggacctggaggaaagcaagtccgctttacccctaacacccctaccgcaagtcggtctatcctaacttgtttacaagtcacctccttggagtcggtgcccatagtctgtgaatatcccgacgtatttccggaagaattaacaagaatgccaccagaccgagagatcgagttcgccatagaactggcaccaggcacagctccaattgcaaaaagaccctaccgaatggcagctaatgagttagcagaagttaaaagacaaatcgaagaactggaaagtaaaggttatgtgcgacctagctcatccccttggggagccccagtgcttctggttaagaaaaaggatggctctgagagaatggtaatcgactatagagccctaaatgaagtaactataaagaacaagtacccgttgccacggattgacgatttattcgatcaacttaaaggagcaagagttttctcaaaaattgacttgaggtcaggttaccaccaactgaaaatcagatctgaagatatcccgaagaccgctttctcaacgcgttatggtctatatgagttcacagttatgtccttcggactcaccaatgctccagcattcttcatgaacttaatgaacaaaatctttatggaatgtctggaccagtttgtcgtggtattcatcgatgacatcctgatatactctaagaacgaggaagaacatgctgaacacctgaggttgataatggaaaagctcagggaccatcaactattcgcaaaattctcaaaatgcgaattctggttagaccgagtagcatttcttggacacgtgatctcccccaacggtgtcgaagtagatcccagcaaggttgaagctgtacttgcttggaacccgcccaagaatgtgtcagagattcgcagtttccttggcttagctggatattatcgaagattcattgaaggattctctaagctagccagacctatgaccgagctgttaaagaaggaaaagaaattccaatggtctgtagcctgtgaagacagctttcaagaaatgaagaaaaggttgaccactgccccagttctcaccttgccagatatccgaaaagatttcgagatcttctgtgatgcatcaagacaaggcttaggatgtgtcctaatgcaagaacgaaaggttgtggcctatgcatccaggcagctcaggcctcatgaagttaattatcccacccatgatctcgagttggcagccgtggttcatgctcttaagatctggaggcattatttaatcgggaacagatgtgaagtatacaccgatcacaaaagtcttaagtatatcttcactcagaccgagttaaatatgagacagagaagatggttggaactaatcaaggattacgatcttggaatccactatcatcctggtaaagccaacgtggtcgctgatgcgctaagtcgcaaggcctattgcaatgtagctcaaatacggcctgaccaagatcacctgtgcagagaattggagaagttaagactgaccgtggtacagtcaggtgtccctgccagcttgacagtacaacctaccctagagtcgcaaatccgggaggctcagaaagacgacgaagggataaaagaattaataaaaagaatacaggagaagaaagacacaaatttctccatagacgatcaaggcacagtttggtgcggaccacgcatctgtgtaccggccaagaaggagttaagagatctcatcttaaaggaagctcatgagtccgcctactccattcacccaggaagtacgaagatgtaccaagatatcaaggcatacttctggtgggctagaatgaagcgagacgtcgcagaatacgtagccctgtgtgacatttgccaaagagtcaaggcggaacatcagaggccagctggtctgctgcaacccctaccgattcccgagtggaaatgggaagagatcggaatggatttcatcaccggtttgccaagaacccccagcgggtacgactccatctgggtaatcgtggaccgactcacgaagtcagctcatttcgtgccagtgaaaaccacctatgatggaaagaaactagcagaactctacatgactcatgtcgtatgtagatttggctgtcccaagaaaatagtgtcggaccgaggcactcagttcacctcaaggttctggaagtagttgcatgaagccctcggaacttatctgaattttagtacagcctaccatccgcagaccgatggtcagaccgaaagggtaaaccaaatcctagaagacatgctacgtgcgtgtgccttggatttcgaaggcacttgggatcgttgtttgccgtatgctgagttctcatacaacaacagttatcaggccagcattcagatgtcgccgaatgaggcaatgttcggaagaaagtgccgcacccccttgtgctgggatgaggtgggcgaagccctggtattcggtcctgacatactcaagtcagcagaagaacaagttaagctgatccgagaacgtttaaagacagcgcagaaccgtcagaaaaattacgctgacaatcggagacgtgaccttgagttcgaaaagggagatcatgtgtacctgcgagtatcacccctccgtggtatgagaaggtttgggatgtccggcaagttagcaccccgctacatcggcccctacctcataaccgccagacgtggcgaagtggcttatcagcttgagctacctgaaggtctcgcagacgtgcacaacgtgttccacgtatcccagttaaagaaatgtcttcgagttccagaagagcaagttcccctgggtaatatcgagctggaaaagaatctgacctacaaggaaagaccgatcaaggttcttgaagaggcagaacgtcagactcgaaggaagaccatcaagttctacaaagtccaatggagcaatcattccgaagacgaggcaacctgggagcgagaagatcttctccgcgccgagttcccggacctactcccttaggtgctgaatctcggggtcgagattcttgttaggggggttggtctgtagcgcccgttccgtcgtggcgcctagcgggaaaattatctcttaaaaaccctaattgcgaaatttgtttctttgcttgttgtctagtgtccgtgccatctcaagatctcaatccgcaatcgatcgtcgagatcaattccgaatccaattccttccaaatcgaatccctccgcaaaagtctagtttgcctccctcgggttcgatgggccgaattccgctcggcccatctcttccccggccccccctctctctctcccgggcgccccctctctctctctctatctctctctctctctcgctccctccccccccccggcgcgttccccccccctcgctgctcgcgcgtgcgagagccgcgccgagcgcctctctttccgctcccctccgctccgcccgcgcaccgcgcgcgcgtgcgcgggagtcgcctgcaccgagcgccccctcctctcgcgcgagctccccgctcgcaaagccggccccgcgcgccgttgctcgcgcgcgcgccgcgtggtttcccgcccaagccgcgtcgtctgcgccgtccgcgtcgcccggtcccgctgcccagccgcgccgcccgttgcttcccgcgcgcgcgtgccgagtggccgaccgcctggtcgccgccgccgtcaccctctgccgcgccagcccgcgcctgtcgcccgtgtcgtcgcgccgctccaaaccatcccaccgtcatcgccgtcgtcatcccccggcccccgccactccgcgcgcaagccgccaagaggcggaggccgagctctcccttccctctgccgcgtcgccccgctccctcctccttttcccgattcggcaaaggggcaagcccctttctctccctccttttcccctttccttcctttttcccctctcgccggcgtcacctcctgtcgccgctttggacgctagccggagcgccagctcgccggcttgaccgctcaatgtcggtttccctcgcccaaaccgacaataccgcccatttaagcccaagccctccccctccaaactctctcattttcgcctccgcgccattgccgccctctgtttcaccgtcgccgatcgtcgttgcgcgtgtcggaggagccggcacgagcaaggacgcggaagaggactccggccgcgccctcttcttcctcttccccggcccgaggccggagagattactcccgcgccgtcggcctctcgtcacatcgcctcgtcccgcacggtagtgtctccctccgttcttcctcctcgctccatctcctccccttagatttcggtagtagctcgggtagcctccccgtagttagctggcgccgccccgaccgttgccatcgctcgccgtgtgctcgccgccgtcgccgcccgagctccgtagcacccgctcgtcgccggcctcgctcggcgtagttccgcccaatccgacgctagcgtcgagttcccgaagccgcgtagatgctctcaccgccgggaatcggcccctcgtggcctcatcgccgtttccctcttccctcgccgccggttgccgccgccgcaatccgccgccgtcgagcaacctccggcgaatccgagccgttggctcgtctcccctcgtcctgtgcagccacccggtgtgctcgttttcgccggtatcgccgtggctcgctccgccgctcgccgctgtcgcccgccgtccattcgcggccgggtcgtcgtctacctcccgccggcccgcgtggctgccacgtaggcgccacgtcggcgccacctcggccgcgaccggataagccgacccggccagccgcgccctccgtttctccccgtgcgtgtggtccgcggtgagccgtgaggctgcgcgtgggcccgccgcatccgttcctccgcgaaccgcgcgcgtgcaccgcgtcccagccccgcccgcgcgcgtacgccgcatactccctccgcacggtgagccgagccgctgacaagcgggtcccacccgggaccacgcgtggtgagcccggtccaccggctccccctcccgcgcgcgcgcgcttgggccgtcttgggccggccggtccgttgagctcggccgagccg

SEQ ID NO: 26015 - DNA, 12125 bp, Oryza sativa
ggtttcggcctagttcccaagtcgcgcctgtgatgattggttcaagtcctggcttccgctttccttttgtaatgcagttgtgagctcgggatctgtccgcagcccaacatgactgtacttctactctataataaagagacctctgttgctgtgatactctgtctccctgtaataccagcactgtttcctaggactggtatcgattaacaggttaatttggagcgtcacgggctagttccggtcgggactagttcggggcgtgacaaaaaccttggccatgggtggagcaactcccaccggaagagccctgcggaggtggagcacggggacgccatcgcctccatcagggttccgcctcccgcgtcggcgttggcagcggcggcgtcggtggcgtggagtgcgtcgtaggctgtgttcgggacacaaaaaacaaagcacgctattatagggagattaattaagtattagccttaaaaaacttaaaaaatggattaatatttttttaaataactttcatatagaaaacttttgtaaaaaatacactatttaacagtttaaaaagcgtgcgcgcggaaaacgaggaaagtaagttgggaaagggagaaaagaacacagccgtagtcgttatcatcgttagcctccgccgcgggctgcttcgacgatggagaggggttgcacttccgtcgtgccatggctagagcgaggcgcgcttggatttggggcaacctgagcccgaaaatcctaatgggcgatcattcggcccgcgcgatcagcccttttctcacgtgatttccttttttagcatcccattacttgtctactttagtaaatttatgcacctaaagtttgtacatctcaagtttacacatctaaagtttatacacccaaagtttataagtcaaaagtttatatacccgattcaaatttaaatttaaattcaaatatcttatatatatatatatagtattttctataaataaagtttatacgtacccaaagtttatatacccgattcaaatttgaatttaaattcaaatattttttatatatagtatttctatatataaagtttacacgtgcaaagttttatttatacgtacccaaagtttatatacccgattcaaatttgaatttaaattcaaatattttttatatatagtatttctatatataaagtttacacgtgcaaagttttatttatacgtacccaaagtttatatacccgattcaaatttgaatttaaattcaaatattttttatatatagtatttctatatataaagtttatacgtgcgaagtttacggtacaaattctatacataagtatataatctatgcactaaaaacagtagtagattttttttctgtatttttttaaaaaatttctaacttgttttttttatttttaaaaatttatgacgtaggaagaaaaaaaagaagggaagaggaagaggagaggagaaccccgacgagcgacacccgctcattagcgatgcccgccggagccagtagtagcgttgagtcgttgtcgcgagatggattccaacttgggcctgtaggcctagagagggaatagaagagagaacgggccggcaggctcggcccaaaatagcgccggagtccgtaaatacgaacagcccagcccaccgccgcatcctcgcaaccactgtctcgctctccgccgccatcgccgccgccgccttcctttccgccgccgccgttggtactcgcgcttgccgcccgtcgagctcccctcaccgataaaggctcaccgaaggtttcgtcgtcgaccccgggaggtaagcgtcgatcccgccccctggccgttcttagggtttttcctagggtttggttccggttctccccagtctcaggcaggagatttcggtttcgcgccatccatcggagtcgcgttgcgaagcggaaagctttgcggcgaatcacgtagagcgagggaccttgacccgccacttgcacattcatgtgcgtgaagaacacgattttatgcggaagatttctgcaagccacacataagtgactgtggatctagatacgggctcccccactcctttggaaggtgtgatgatttgtgggtgttctggtagtgtgaatttgttgctctgtgaaggatttacagattgctgtttaaaatgtctgtattctgatttctgaaacttatggcaagtttagcagctcctgtatatgccgattgaaatacaagtagaattatgcacactgtagtttagttagttcaaatgtcatgggtggagatagtgtgttttctgttttacctgctgcaattggtattaaggccgtaggtgaccttgcttttgcagtttcaaatatgtctggccgaggactgatgaagcaggacttaagcaagcttgacgtgacgaagctccaccctttatcacctgaagttatctcacgccaggcgacgatcaatatcggtattgatgcaacccttttagcaatgcttactgttatatggttaagtattacagaacttatcgctgcattttttattttgtgtgttttcttatgtacaaactacatatcatgattcatgattctgaaagaatgcttaggttgccccttcataagcatttggccgtgttaactagtatcatgaaatgacctacatggttgttcttttatacaaccttacatttccagtactttttgcagagtagtttgcttcctaggttattacagttcatcagtaccataactcctccacagtggagtttcatttgcatgctattggtagtttgctcatgtagatgtaactttcctttcttctgtttgtacttgtggacttgttcagtacaatacttactttttttgtccagatactgtgcatgggagggagcattctgatttttttaaaagaaaaaaaaaagataacaactaatggagatgtttgtctctggtttttttgttgtataactagggacattgtaatgttatattatttgcatatctgatttgtgaacttcctgcagcggcatgacattctttttcattctgtaaaatttcaggtaccatagggcatgtggcccatggaaagtccactgttgtgaaggctatatctggagttcaggtattattaatgtattttattatcatgcttctttccgagtgatgaatctgaactctgcgtatacctgacaactatgtatcacatttattggtaacctgtgagttttccatatattctaccacatgatgcttagatgtgtgcctttttgtacatgcttgaataaattgcagagaactttaaaatgtattgataaaattacaccatagggtgtagaattgagaagagttgtatctggaaatccatatgataaagtagtatagaggagaatatgccccatcataatgtcattctgtatattgtagttcatgactagttgcttcacatattccatatgtagtggtgtacagttcatgaacatctttcatatttagtatttatgttcttcacatgtaattcatatatttatatttgtatagttgtcctgatgtcttccttgtgatttgtagaccgttcgcttcaagaatgagctggagcgtaacatcactataaagcttggctatgctaatgcgaaaatctacaaatgtgaagacgagaaatgtccacgaccaatgtgctacaagtatgcaaacaaaccactagacaacatgatctttttagtgtttccattgaatatctgatagaaattgtcagtagagactcaaatgattgattctccaagaaaataacttaataaaattagttgccattcacctcttaggattattgctttggtgtgaagctcttatacaatatgtgtgctcttgttcactctttgttgactttagtttcctattacataaagggcttatggaagcggaaaagaagatagccctcactgtgatgtgcctgggtttgaaaacactaggatgaagctactgagacatgtttcttttgttgattgtccggtatgatgaaatccctttccctgtcaaatatgaatcctctcttgagacacggcctgatcagtctacctgaatgtttaatgatattgctttatgcaattcattgctttgcagtagcatgtatatttggttttaaacatttcggtctgtcaattgtgatcatggggttgtagttgcatctgtttttagatgcaaatattgtttccactaataggtgcatgacaatatactggaggactgaaggatatagataaaagaaattgtaaaatgctatcatttcaacttcttttatgggccactaagactaggtattggtttacatttgttgaagcctgagaaattacctatttcctcttaacagggacacgatattctcatggctacgatgcttaatggagctgctatcatggatggagcattgcttctgatagcagcaaatgaaagttgcccacaaccccagacatctgagcaccttgctgcagttgaaatcatgcgtctccagcatatcatcattcttcagaacaagattgatcttatccaggaaggtgcggcgatgaatcagcatgaagcaatccagaaattcatccaggtcactgttgcccatcatttcttatctagtagattatctcatctgtctttttgtttatggagatttttttttctctgcagggcaccattgctgaaggtgctccagtggtgccaatatctgctcaactgaagtacaacattgatgtgatctgtgaatacattgtgaagaaaatccccattcctgaaaggaacttcacttcccctccaaacatgattgttattcgctcctttgatgtcaacaagcctggttcagaggttgatgaaattaggggtggtgtagctggtggcagcattctcagagtatgtgttctctcctgtaacataattaaatattttaatcagtagttttttatgttaagtatgagctgaatggtaatgcttcgttccagggagttttgagggttaaccagaacattgaagttcgcccgggaattgtaatgaaggatgagagcggcaacatcaaatgcaccccaatctattcgaggatcgtttcactctatgctgaacagaatgaactccaatttgctgtgccaggaggtcttattggtgttggaacaaccatggatccaactttgacacgtgccgatagactggttgggcaggttctgggtgaagttggatcccttcctgatgtctatgtggagcttgaggtttgccataactcatttgtttcttcagggttttagtgaacgaatgtcattacttacatctgaacctttcacacagatcaacttcttccttcttcggaggctattaggtgtgaggacaaaaggcacagagaaggctgggaaggtctccaagctcaccaagggtgaaatcctcatgcttaacatcggatctatgtcgactggtgctcgcgtggttgctgtcaagaacgatctcgccaagcttcagctcactgcccctgtctgcacaagcaaaggtgagaaggttgccctcagccgccgtgtcgagaagcattggcgcctcatcggatggggccagatccaggctggcacgacgctcgaagttccaccatgcccgctctgaattgtgtttctccaggcagaaatcctaatctttgagagaagatagaagagatgtggaagggcagagagctcctaggcactatttttgtgaggtggatgagaaaacatgaatttgatttggaagccatgtcattgcgtgctatcgaattcagctatgctacaaaagttttgcttacatctgcattctgaattatggagaatcgttttttcaccatgttataatgaatttgaagtggggagaaacctactaattgatcagaattgcattattgcatttctcactgaatccaatcagtgatgtattattgcattgaacatgttgcaagaaaggaacatatcgctctggattttctttttctatcttctcctcccttaaaccagttgtgacttgcgacgcaaagaatctccatacgaacatgactatttactagcatatcatcaaaagtttcaaaatataaaccacagtaaccagctaaagaatacacaagaatgtaacctttgcacaggtatcttctacagtagcagtcaggagaaacagttgttcgattcaggatgagcccccatttctatacgcaaccttacttaggctaggcactggaatatcaaaagctatcaaacaattgagatttttgaggcagttgaaaaactaacatctaaattctaaaatacccccactctacctgtgattgtgcaattgaattacaatggttaactatcacacgaatcagagctacaaatcaagaaactaggatgtctggaaatctctctactcagcctatactctaaaattgctcccagaaggcggtctcaaccttgattcgatggaccgggcatgtcagggttgtcgaacatgacattgggcgctgccgaggttgagggagcgttcatcgctgacagaggcaaccgacccccgaaagagagcatctgcagctgccgctgctgctgttgctgcagctgctgctgctgctgttgcatctgctgctgttgctgctgcaagaaggcctgtcgctgctgttgctgctgtagttgcatctgctgctgttgctgctgcagctgcatctgctgctgttgctgctgtttttgttgctgttgctgcatctgctgctgcaagaaagccatctgtgggtgcacctgcatgttattggagtagaaagctggagtgccggcctggggcatcgatcccggtattcctggcggtcgaatgttcgcttgactcaatggatttgaggccatagtgttgcctctgggtgaagctaaccgaagccctgacatcatccggatgcgctgagcttgcagcccctgcctcatcctctcggactgctcactgtccctcaaaaggtaggtctcgatgtctgcaaattgcttcaacttcaactccagcctcttcaactgcaaatgagtattacaaaaataacagcaaagagtccaaatgaaaatgatgaaagccacatcaaatatcagccagtatggcataatcaagtgaaaatgacatattggacagtcattaacccccacatcacatgcataaatttcatatcagatttaggaaccaactcctggaggacaactgatgtcaattaccaggtggttggttaacactaaaacaggctactaggctagttaaggttccaaagataaatcaacattcaaccccgctggatcctcctggttttaactaaaagccagttttaaccctgggtaattaagtttctgaaaacttattaaaattattgtcacaggaggatctgttttatccacactccaaattagctagaatcatcaaaacttgtaaaaaaaatctctcccactgggtaaagccaatacttgccgaatgggcgttgatgctactcagtgactatcttttatgctcagaagtcacaacctcttttgtttctcaatgcttggtcagtttgttgacatgtcactgtagattgtgaactatcatcgtccaatcacaaactgaccgttgtgatccatgtttttatcaaattagcataatattgtttctgcactatagctaattccattcagaatcagatttcaaggcttcttcaagtccaaaaagaaatgagcaaggactgataacgcttcatctatacttcctccttttcatattataagactttctagcattgcccacattcatatatatgttaatgaaactagacatatatgtgtgcctagattcatcaacatctatatgaatgtgagtaatgctagaaagtcttataacctgaaacggaagtactctatactactataaatgttggtagtggtagtggtagtggtagtggtagtggtagtggtagtggtagtgaatctaccaccacaacaccctatcactgacgtgtcggaccctcaatgtcggtgaaaattttgtgctccctagttcaaatcctttgattccgtggcaacacacgggcaaatcagctagtttaatacaaataaaaacaatgccacaaaagaatatgaagctaactagattgtcattaccattagaacaaattgcagaatgtgaacttctgtattccaacaaacctgatgatttatgatggtagcacttaatctctgaatttcacgctcctcctgatccgcaaaaagtttacacttagttgctgctgccgacaagccacatcttgcagcatgtctaacattttctgaagagacagccaatgaggaatctgtattaaaataaaactgcatgttagagtaacatcttgaaaagaaagactgaaggatgcggaattactaattttaggaataaggtagtcaccacagttcggtcgagcagcatggcccataacatcattgccaattgaactgatccttaattgatgaacattattgtgttaagagaaatccagcaaggtgagataaagtgaaaagtaagtgtaaagacccgaagtagaacaatttacactccagttatagaactggtataacatgtcggagctaagagttcattaatctcatccctaaacctcccttacacagcataggtggctcacctggagtcacctccagtcaaaacaattaatgcttcacttgcacaggatgccgcaactcttggtcctaatgaagaggccaaaaatgcaatctgcaaatcatctctgaacagtaaggccagagacataatagagatctacaataaactgacaagatctggggagaatgatccagtatgtgggagattactatcatagttttctacctatctactaagttccacctagatattatgtttccatgtcttgtcccatgccgcaagctatcatgttagttctaaatgatggtctgcacgagatattaaataataaaatgcccatggctttgcaactaaagctgtggtttgcctatacaataaatcccagctgtcttacatcaggtgttttttaatttgagaattcggtcaatggcaagaaactatgtatatcactaaaagtgggctgtataaaagcagtgaagatgactgatattgcaatggagcataatggtttcagcacccaaatttgaattgagcagtgcaatgacataataaacaacatagtctgcagtcactcaccagtgacatgacaggattagcagtgttaatgaaaggaaggtctccagcttcgccgctttgaggcaagcttcctaaggcaaacaattgtggcaatttaaaaacggagccagaagcattttgcatcaaccaaaactgatatccaacacaaaaaaatgttaagtttttcagtaaagaaacaatgaataaacctgaagtactgccattggaatttgaatgcaaaaaaccattgttttgtactttcgatgaaaaggatgcttctggtactttaatattctctaacaatccatcttctactggaagacgaagaaaatggtgaagacattgtattttcgactttgttccaacatgctccgcaacagcattccagttttctttgtatttgtctatgccctccaataacagaaatgtttcctgatcagtccagctgtccccatcattgtccagtccatctttcttcccatccactctctgaaaatctaagcttgagtgcccagtaacaaatcttgcatcgtggaagcaatccgagcaaagagcaatgtctgcctgcttagtcagttaaaaggaaagcctgaaacacctttacaagcttctttcagaaagaaagggatttctcaagagaaagcagaataaaattactaaatacgcaagagatatagatatccatgaagatgcacatgattcaagaaggcactttgtgcaagagggtcaacaggggtggcaactaggaccagcctaactagagaattctaagcaattatcaggcatattacaaaagaagataggcaatactacctccattattattttactttacaatttggacatcgacacaatatccaatgcacatgtctcatcattaacttttcttaactttagatttataaaaattattagaaataactatatgaaagtgtttttcaggacaaatctgttaatacaattcacatataaaatcctaatatcttattaatgatacacgatatcgaggtttgattacacacattctagaacgtcatctatttgagaacagaggtagtagaacactaaaatagcagaacaagagccctgaagacaggttagcctaatgcaccatcctaatacctaatcactgcagttatctagcgcctatcggtgacttttagaacactgcatatgcacatcaatatcttaaatggatctgctacaaaaatgcagtttcgcacactagacaatacaccatccattttacaatagttgtccagtgcacatacatagaagatacaaaactccttattagttcaattggactctgattgttcttaagatcaaattactccatctaatggtgtcaaatataatctaattccaccaaatattattactggcttgtgtattcaacatttgaagaatgataaatatctaattggcagtcagaattatacacacctccttttgtgactcgtagtgcaagctaggcaaaggttgtgcgcagaaactacaaaagctctcagacaatctctccaacaatgtcttctcatcaaaaccagcatcaccattttccatccctggagaagatgaaagtgatgccccagaagcaatatcctctgcccggacactgcattttggtcgatcaaacaaaattaaaccatcaattgatttcaatggagcagacatgagatgcagctcccctgttggctcctctctgattagtgttgctgccatcctcaagccccgttgaacagacccagccgcaaggtaattaataatcccccaagcgtccaaaaacctaacaattctactcaggtcatacaattcaggcgtgcttgtgacaagcccttggcactcagaaaatgcaagcctcctcgcaggacgctccagatacgttgtaattaccctattcctcaacataatgtatttctctggcgtgtgccccggggacttccctgagaagaactgcggcagcacttgcctctccaacctgtgcaccgtcattggcaagaaccaatctacgatttccaaatcaacccataccacacagcttaagtcaatttagtgttcagctcaactagtatggcacatttcaggagctcttcgattcaaggaaacaaacctgaatgcttgggtaccatgagcaatttgccatcgaactgcttggccacgccgcggcactccatgagtagaggaggggtgcagacgtaggaggacggcttgtcggggtcgttggacaaggacgggtggtcagggagcacggacgagagcacctggagctgcccgtgagagatgttctcgagcgcggggacggccgcgccgccgccgccagcaccagcaccagccgcggcggcggcgcgctccgccgccatgacggcgagcacggaggggtggagccggttgaccacgcggcggaacgcgggcgggaaggcggagacgcgctcgatcgccgtggggtgcacctcggcctcgcggaggtccaccacggggtcgtcatcgcccccgcctagggttccgcctcccccgttgacggccgcggtgcccgcgtggagcgccgcgtcgtcgtcgtcgttgtcgtcgttcgccgccgcagccaccgcggagtcggagtcgtcggagtggtcggccgcggaggtgttcgcgttgcgcttccgcttccgccacttggcccgagcatctacaggggaggtagggttttggccgccagcgtcagcgcgggaggaggtccccgcgagggggaagtgcgaggcgaggagggggggcacgtacctgcggaggaggtggccttgcgaggaggcatcgtcgccggcgccggtggcggaggaggcggcgacggcgacggcggcggcggtgggggagcttggagtgttgccggcgagggaggcacgtgcgaagcgagtgaggaagggcgttgacaccgcggttcgaatttcttcccactttttcggcttttgctatccaatcaaatcattcaagcttgagtattctatagtgtc

SEQ ID NO: 26016 - DNA, 15802 bp, Oryza sativa
tgtgccgattatacaggaaacataccaatttgttcccgcagctcctgaaacttgattcgagaaagcggcttcgtcaggatatctgcaagttgcccttctgtgccgatgtaactcggtgtgatttccccattctccacggcttcacgaatgaaatgaaattttgtttgaatgtgcttacttcgatcgtgaaaaatagggttcttcatcagggccagagcggattggttgtccaccctgagatcgacgacttcagttgctgcattcctgaggtcaccgaggagccgggcaagccaaatgccctggcatgcagctgttgcagctgcaatatactcagattcacaggaggagagtgctacaactctctgtttttgagactggcagctaacaggatttttgccgagaaagaaaattactcctgtggtgctcttgcgagtgtcaatgtctccaaccatatcactgtcactgtaaccctgcagtcctccttcaccttccttcacatagcggcacccaagatgaatggtaccagcaacataccttatgatgcgcttcactgccgccaagtgttcgtccgtgggtttctccatgaaacgactgacataaccaaccgaatatgcaaggtctggtcgggtgttcaccagatagcgcaagcttcccactagacttctgtattctgtcgcatcaactagcgatcctgcactttccttgctcagctttagacgtggttccatcggtgttgcacaggggttgcagccggtgagcccagccttctccacaatacgcgacgcatacgctgcttgctttaaagtgatgattccagcttcttgatgtacctcgatcccaagataaaaactcaaaggaccaagatcactcatcttaaattcagccttcatctgctctttgaatcccttgatcatgccactgtcacccccgacaattaccagatcatccacatacacaccgacgagcagtcgcccactgccatcgccgcgcgcgtacagcccatgctccaacgggctctgcttgaagccaagtttctttagtgtgcagtctagcttggtgttccaagctctgggtgcttggcgaagaccatacagcgccttatcaagcctgtaaaccttgttctcctgtccatcgatctcaaaccccggtggctgaacaacatacacctcctcaatcagttccccattgaggaacgctaatttaacgtccatatgatgcaccatccaaccttcctgcgcagcgagagcgagcaacaaacgaacagaatcaagacgagcaacaggagcgaatacctcatcaaagtcaattccagccctctgcacgtagccctttgccaccaatctcgccttgtgtttgacgacgacgccctgagcatctttcttcagtttatacacccatttcagcccaattggccgatgtcccgaaggcagatcgacgagcctccaggtcttgttctcctctatcgaagagatttcatcgagcattgcccgacgccaatcctcgtcgcgttcagcttgagcgaacgttgccggttcttctccgctcaccatcatcagctcttcctggacctcacgattagcgagacctggcagcatggccggccccagcacattgtccatcgtgcggaaacggagtggtgcgtcatcgtggtctgcatcaagattagcagctgctccagttggtggcgacacaaattcaaccgccggcgcatcgccatgcaccgaaggtgttcggccggctgtcggtgagtctgatggcgttcgcggcgatgatgaagatcgagcaggcggctccccagcatcttggcgtgttcctgacagcgagccaggatggtacaccgtggtgtactcaacgatgaagtcggtgtcgagatcagcggccgcctcagcatcccagtcccactaggccgcttcgtcgaagacgatgtcacgggagatgtgaacacgccgagtagccggatcataggcgcgatacgccttggaccccggctcgtagccgacaaagatcattggacgactcctgtcatccagtttcttcaggttcggggtggtcgtcttcacgtgtgccacacacccaaacgtgcgcagatggtgcacggccggcggaacgccattccacagcgcgtacggggtcttgccgccgatacccttggacgacgacctgttgagcagatacacggcggtatttatcgcctctccccaaaacatacctggcagccccttcgccttgagcatactccgcgccgtgcccaccacggattggtttcgccgctcgacaacgccgttctgttgcggagagtagggcgccatgagctcgcgccgcattcccagctcggcgcagtactcggcgaactgtgtagacgtgaattctcccccgcgatccgtccgcaacgcgcggagcttgcgtccactcttcctttctgccgccgcctgaatacgcttgatggcagccggcgccgcatctttggtggagaggagggcgacccacatgtaccggctgtagtcgtcgacgagtagaaggaaatagcggttgccactgggtgtcgccggcgtgatcggtccacagagatctccatgtagcagcgccagcggctcgtcagaccggcaaagtgcctgccgcgggaacggcgacctccggtgtttcccggcgagacaggcctcacagacctgatcaacctgcgacaaacatggtagaccacgtaccagctcctccttgcccatcttgcagagcgccctgaagtttatgtgcccgaggcgagcatgccagcgccacgcgtcttcgtcggcgtgtgccgccaaacagacagggcgcgccaggttgatgtcaagcatgtacagtcgccctggggtgcgagggatccgggcaagcagacgccgctgctcatcccagacccgcatgatgccatcctccgccagcactttgaagccggtctcatccaattgcccaatgctgataatattggcagcaagacggggaagataataggtgttcgacagagtgcggtgctcaccattcttgcaggcaaagagaattgtgccccgtcctgcgatccggaccacggatccatcgccgagtcgcacgttcccggtgatgttcgtgtcgaggtcggcgaacgccatcctgctgcccgtcatatggtttgacgcgccggaatccataatccagcgcccgggatcatggtcagccgcgtcgtcgagcgctgcaaatactttcatctccacgagttccaccacggcttggtggggcggtgtgggcgtgtcgccctccggcgccgccgcgtcgaccgtgtcaacgcggccgccggtgagcaacatcaaggtgtgctcttcttcatcctcctgggcgacgtgagcctgttcttcgcgcttggacttgctcctgcagtccttcgcccagtgcccaagtttgccgcaatttcggcatttgtctcccttgcgcgccgaaccagagttcgtgctctcggggctcgcagtcccgccgccaccagtgcgccctctcccgccacggcgcttgccgcggccgccagagccgcccgagtcaccccgctttgcctcttgatccttcttcttctgacgttcagcccactcctcctcagttaggtacagcttcccaccggcggtgtgcgacgaggattgcccagaatcctcagcggctttcagtctgccagtaacttcctccatggacagagtagagatatcgagaagagtttcaatagacaagatgagttgattgaacctgggacgagctacccgaaggtacttttcgacgactttatcagcaggttcaggatcaccgagggttgcaagctggttgacgatggttgtgagccgtagagcgaaatcttccacggtctcgtcaccgcggaacgcaagcgattcatactcagcgcgcactttctgtgcactcgccttgcgaatccggtcgttgccgactcgcattgtcttgatgcattcccaggcttcccgggccgacgctttggtcgccagggtgccaatcatctccggcggcacggcactgcagatagcgtcaagagccatccggtcctcatgcagagggacgtccacgccgtcgggcttgatcgccgcccacaggcagcgagcctgcagcttgatcttcatcagtagcgcccagtcgttgtagttggtcttggtcagcagcgggtagttcaccgagccgcctccttctttcaccacgcggtggatcaccagcccgcggtcacccccgccgctgcccgtggcgcggccgccggagtcatgaggagtgcgcacgatcggtgacgacgagcgacgacgcggcatgaagacgccttccaatgcgcggtcacgagtccacttcctaaaccgtgctctgataccaattgttaggaatttccccagcgatcgctagcaggaaaccagacgaacacaacgcacgcgtactgtggctaaacctgcaaattcgcagaacagaggaaacagagcaaattttgtgcagcgctttactcagctgcttttctgtttacttccatatataaaggaacgaatacaacggaaacaactaaccaccaagaccacttctcacgccatgctctagctgcgtccatccccacaaccacacgacgtgatccgagctcccagcacaagacgcgggcaacgagctaaactcggataccctcataacagactccacacgatggctatcacacaacacgtgagctcatgcgtttattcagaaaaaaaacggaaacatgcagataactaatcaactaactaaccgtggcacacaagattactgctaacactcgccggcatccgcgcgtggggaggagctcgccggcgtccgcgcgcgggagaggagctcgcctgccttccgcgctccggggaggagctcgccggcgtccacgcgcgggtgtggagctagcctgccgtccgcgcgccgggggagaagctcgccggcgtccacgcgcgggggtagagcttgccggccggccgtgcgcctggggaggaactcgacggccgtccgtgtgccggggaggagctcgccggcgtccgcgcatgggggtggagctcaccggccgtccgcctgccgggggaagtgctagccgtgctttggctttaaccacgcggtcgtcgtggccacgggagctagccgtgctcgatcgatgcatatgcatgctgagcatgcttgcatatgctttcactgttcccgatatggttttagataagctaagtagctcgtcggccgtccacgcgccgccgccttcttcctcctccctcccctgactgcggcttcggggaggagctcgtgcttcgtgcttccgccggccatcgtcacctctcccttcgtgcttcgtgtttcggccggctgatggaatgtaagagagacaaaaatgagagagagagggggagaggtgaggatgaaatgtgggccccatgtcggtgggttccactatttttttttgtgtgtgaatgatatgttggtcccacaattttttttactctaatgccacgtaagcgacacgttgaggacacgcaggacgaagactgggtcaacaccgccacgtggacgttatgtcagcctaaaccgcttccaaaaccacccagggatatagtttgcaacagtcttttaatagttggaggagtcgatatacccggttttgtggttggaggtcatgaatcatactcaggtcacagttgagggagtcaaagtatactttttccgagcaatctcgataggatttgccaaaaactaatgggctaccattcatagcgctgggccgaattccgagcccatgggaaagacgcgaaggatatggggtacgtatcaggtgtccctctgttgggcgctgtagcaattagtgcgaaaaaaatgtacccaggtcctgatgaccgtacagaatacaagaagcgctacatccacctgggaagctacacatatccgagcgtccgcgaatatatttctcggtttcttcggctttcttccccaagtccggctcgagtttcatctctcgacctcgccgtgctcgtgctgttgtgcagcggtgcaggtgctctcttccacttcctccctccctcccttcctccctccatggctccatctccactggcgtttccgccgcaactaaccaaccccttcgatccgattgcaggcgttcgatcggtgacgagacgatcggagacgcgccgatgccgccggtgcctgtggagcacgaggtgggcgcgagggtagagtgcccggaccctgattcaaaatgtatatgtccttctcttcgatctctctcgtttggctatttcttggctgctcgtggttgtgtatgcgcgcgtgccttctgctttcccccctgtttgcatttggtatacatgttcgattcaaagagagagagagaagctcaacctgaaatttttttttttcagatggagtaaacatggtgagagaccggcttaaagacagaactgatattctgttcaaagtaaggatattggtttgattgattgcactagtttgatttaccacccggccgtatactcatttttttggttttgttttgaagctgaatagtgtggtctggatttcacccagtagcacgtcacttcatgagcttttaggtatgaagatatctatacttgtttttaacttcttttttcgaggggactactttatttttttaacttcatgatccattatatatgacgcactaacattatttttcaaaaaaaattggaggaggagttgcgtccgatttcacagatggacatgccagcaggtgtgttccgcttcctttgttgtatttagaatatgtggcccattataaaatttgctcttttttccccatgaatgtgtatccataattgctgattgatgtatttagaatatgtgttttatagtttttctggcaggttacaaaagacagagttggctcacaccatatgtgtaacgtcacaggttagtttcccaaaccacagctttctattggaacgcgtgaggatatatttcttattttacctaatgaactacagcttcctaccggaacgcatgaggctacaggcaaaattgcctacattgacacagagggcacgttgtatcttttgaaatgctgagttatacgtctcgctgtttcattttgtgaattcatttgcatccctattcttctaaaactgtttccttaatagagtttccagtgaccctgaaaaattagtcaaaattgctgagcgattgggtgttgaagccactcctgttatccaaaatgtagtatattccctccattctttttattcttacattccatttctggactaatgcacgaacatatttctgcctcttacattctttatccatttcttaagacggtatatgcgagtgcatacacctatgaagacatggaggccttgttgtctgatcttcaatccaagatggaaaaggaaccatttaagatgctggtacgcatgggttcacaaagtaaatctatattgataagttacacatctcatttaggggaatattaggtgaaaaccatcaaataagtgtaaacccatgaaaattaaatctagaggttttctaaaatcatgaaaaaaaatatcctagagataggtataggcatgaagtaaattaccaccaaatctcaagtcaaaactcaaattcattttgttcctaccaaatgaagtttgagttttgacttgaaattttctggtaatgtatttgatgactagacctatctttaggattttttgtcatgaatttagaaaagttataggtccggttttcacatgttttgacttatataaatatatatctgatggcctccactggatattttctccctcatttattctcatgtggtattttgttcttacatatagataatcaattcggtgacaacattgttcaatacagaactctgtaatggctgtgcgtttgatggatgtcaggtattctagcaattaaattcttttctggtagctgtatgttagttggaaattaccattttatctgcatgcttaaagtcatggctatgtaattgcagataaagacactagagatgatgtattgcctaaggatgatagccaataaatttcatataggggtgtatgtcacgaaccatggtgagattttacattttgtgtgttccagttaaaggaaaatgctttattcagagtaaggaattggaaactgtgacttatgagcctattgattgctaatccagaggaaatgggtttgactgatgctaagattaagaggtcactcaagcaggggctatacttcaaggaagtaaaagatctccgtaaggtaagaaagttgtatttaaactactgtttctcgtaagatttagtgttttctgatgaccaaatggcaatctagtaaactaattgttcttttgtgcctctaatttattttgctcttattttgtagctgaataatgctgttcaggtcactacaggaaacagttcccttggtgacatgcatcaaggtggtgatatgcatgaaggtaacacacttaattacccctcagttctgttctaagcaccagtgccatttggaattataacttattccctccatactccatttggagttatgtctataacagaaagatacaatggatgcacaaaaactgtatgcggacgaaaacatgaaactgtatgcgccaacagccaaaggctcctggtttgttcctgacttcctgtacatcagtatagtttcagatacaacccaattcacataattacagttttaacgagcatgcagctgaaagtactgtgttatgaaatggttttcaactaaaaaggttttttttgtgaaactacttttgaaagagtaattctttcatagattttgcattataactgtagttttgtgaaattactcaaagtttaagtttaataccatggattttgcatgacatcttcttacagatgtatttttgggtctgcaggattttagaaccaaaatcagagtttcttatccaaattcctggttttatcttgatgcaagtccagatgataaaatcaaacagttatcacagatgatcgagaagcgaatttcactatctcgggaaagtttttatctgacttatttgggccgtaagcttgaacccgaaagtactcttcgagaacttgggcttgtagtttcactgataacatttgagttgcacgtacgactacgtggaggttgtccagacaaggggtgtgtaacttctttctctcagtattacctttttgtttggaacaactctagtttatcctcttagttattcttatttttgaggactaacctttttttcgcaattgttctaatctttttgtcatgtaacaagcaatattgttattaacctctaatgtgtgacttattaacattttatagaaatcaatcactgcgggaatttattgcaagcaacagcgtgtgttggattacaatgtctcatgggaagaatctatactctaacagacttgtaagagaagtgcttgtaagatatccggggcaaaaaggaatgcgacaggtggttaagttagttatgcaacctttagccatccgtatatgtaatgggattgcatcacgtacacaaggcacatgatgcggataagagttggaacggatcaatttctttagaaacatttaggatggttgatggttgtatggaagtttcacaacatgctgtcaaagatttagatgaaactagcgtctgtgaggactataagaaaatttcaaaactgttcctggatatgttggagctcaacaagggacatcctttatacctcagtcatttatgcagtaagatgaagaatgctaatgttacttcagcaaagagcaatacttttcaattgttcttaagagttcatccatcattgatgacatattcaacacgttcctccttattgtgggagatgaaacgtgaaatcgatggattattacctcccaatgcaaaaaatattcagtctgccattgatcaaattttgatgaatagagattggacactacttgctaaacaggaagctgctttctcacctacctataacagaagttacaagaagtcgtcaagtgaatgcttcaagttcattcgaaattggttaactcatgggatagagaacttcaatgtgagtttcttttctcatttaattatcatcatctgttattcttccatgtagttatgtttattctcacttttttttattttcttttatagacctcagatccaagaaggtttacaactgaagatatggactatctattggagatagtcttcaaagattttctagctgatattgtctggacgttgctacaaaacaacattgggaatttaaacagatggtgcttacctggtccttataatttttgtgaaactgtgtataaactagaatatctaattctatttccatttcaggtttgcagatgtacaagaaaataactctttctaggttgatttgtggacagaacaactaacctgtgtacatgtaagttatcgttcatcaacaatcttttttttccatgtgcacgaaataaaagatgttcctaagaaaacaatatgttctataacatatttgtagtgacactatttttgatctttgcttacaagtgttcctcctgcaacagtgaaaacctctcactcccgcgaagtggcctcagaagtggaccaatcaaaagatgattgcatgacattgttggaacagggtgaagaaagctgctgaagaaacttgaaggacatttgcttcgcctttctgtagctcttaagtctgcttccttgctgtgttttgtttctggagatagtcgtaggtctgtcttttgatgattgcctgttcgagatgagggtggtatcttttggtgatgcgacgatctgatactgtaagctggagtcccaagacagaataccattttttgtaaaccctggttcatgctttctgacaaagctgcacgaaacatttttatcactcaactttcatattgtttcatcttggcaaatggaccacaagagaagtatatttgttgtaagcatagaaaaatggaagaagaggtagatcatttcttcatctccataggatgaatgcttgaatggccataatgaattggactcatgctcgatgttgtgagttgtgacatgctcatctgcggatgccataggtcaacttggcaggatgttttatatgccaaacttgaattcagactcaggtctcatttttgcatttgaattatctatgtggtaggagcagtatagacggggagaaccatactttgaatgcccgttgcggatttgagacaaatggctctcgcgtcgccctcccccaagggcggctcgggaggcgatgacccggccaccccctctcccccatcttcctcctccgcctcgccgccgcctgagcggccacaaggacggcggcggcggggctcctcgcttctcgtttcctgggcggccaggggagccccctatgcggtggcggcggcggcggcagtgaccaccaaatccgcaccgctccggctaggggaaccccctgggcggcggcggcggtgaccgccaagtccgcgccgctccggctggatctagcggctggcggcggggacggggacggcgacggtggcggggatggcgacagcagcggtaggggcgagggctggcacggccggcggctggcggaggggatggcgacggtggcgaggatggtgatggcagcagggatggcgacggcgaggcggatccggcgcacggaggaggatctggccccctagtggctagatcggacgaggatgaggcctgctgtggcgacgacggcgcggaggtcacggcggcggtggcgcggtggccgtggcggcggtggcacgatgcttgcggtgacggcggcgcggagcccgtggcgacgggagcagatggccggcggtgccagtgggtggttggttggccggcgacagcagcggctgaaggcggcggtgactggcgtggggaccgcggcgcgaggaggcgtggaggcgcggcatggccagaggctgcgtaggccgacgaggcgctggcagcggggcggcggggttggccgtggcacgaggcttggccagtagcggcaatggtggtgccatttgtggtgtggtcggcggaggcagtggtcggcgcacggtggtggcaggcataggctggccggtgggaggggcgtcggtgcagtgttgctcacgcgccggcggaggttagatggcagtggagcatcggtgcgtcatcggggataagctggcggtggatggcgggtgaaaacccagcccggctttggccgggccggcaatgatggcgctctggcatctcaccccctctagtggggttgccgggtgaaagctcagttaaggttcttgtgacttgacggacgacggcggcgatgccttcgtcgtttctctccctagagatgtcgtcatggcagcacccttgccaaagccacccaaataactattgcgagctcactttagagtctcttcctctcgtatcgacgtcctagtttatacaagctggccgtgtcggggggctaggggggagagcggttccatcttctctctcaccctgaatcccttatatgtggatagagcgggttttgtgtcaggtgtaagggttgggttttgggcgttccctgttgtagttcctttgttgacatagcggtggtcggtcacgcttagcgacggccggtccggtgctagcctcctcttgggtttgtgtttggcgctgtcggtgtgtgggtgatggtatacttttttttcctggttacggccttccagggttgtaatcttgtaatttttttctgctctatcagtatgaacttcgcactgtcattcaaaaaattttttggttgaatcatatatgattttgtaatttggaggaaaggaatagaacaatcttctaagattaatgcatctgatatggcgcacgtgggacgtcctcacggaaacgtttttgcagtttaaacacaaaacctaagaaggaagacactgcattgagatagagaaaatatcttcaacacactttctaaacaaatagtatgatcgattttgagaagaggaaaaaaagaaggaattagagttctagacaaatataatctattatgagaaatgagagaaaatagaaaaggaattagagaagaatgtcttcaacacactttctaaacaaacatgatcgattgtgagaagtaagaggaagtgaaaaaggaattagagttctaaacatattagaaaatataaattgcgccataaacgaagatagacattatcgtttctatggttgcatcctagtgacataaatgaagataggaattgcgttagacattgttcatatgtcctaaggatgccagattaaagtaatctagtaatggccttgtacttttgtacatatctaaatttttctccaaaaactcactatatatctcaattttcctcttcaaatgtcctctctttggcccagcgaaaatgtcctctctttgggcttatcagccacctcctaagtaaaaaaagaaaagaaaacaaagtgtaaacagacagttctttttcattggcttttaaagccatataaaccactcttgcaccaataggtcaaagctagattttagtatcttttttcccattgtgtggactgaagttaggatttcaccctgggacatgtgtcttaaagccaactgcttaaaaacagtaaaagtaaaatatataataaccttactagaagggcctaaacttctatgaagacaatcgaaatagaaagcacaaacaacaaatcttggaatgctccatccaataatacagttcaaactgtggcagcaaaggcatatctaaaaatctcacagcaccaaagcccacatgatcatcttgatagtggacagtcaggaaacatgaaattggattcgatgtcttcagtcctatttactgccacacttgctgtcatcctaacctgaagttcagagtgcagacttcaataaagcatcagacagtgcatcactttttcccccaacatgaagttcatagtgtagactataaataatttatgggtaaaatttttatatgtgttcttagcgatttaaaagccaatgcttgaaaaaaaaatcgatgatacaaacatcaaaatcaggttttaaaattcaaatgttcatagccgcttatatgttgcaggacagaagatgggatccagtgtttcattttcccctctacatgtaaccaagtacttataataaattacttctaactgtaactctaaatttttctctaaatgattgtaaattccaaattcaactaatatgtaaacaaagtgcttcaaatattgagaaggatgttctataacttgtccaggcgaaccattagtgttgagtgttgaccgtgtatcagaatatccccatctaagcaaaagcaatagccaataagacgggacaaggtactaaggcaacaatcttcaaatgaactattctccgtaatcttgagctatgacaacccacatgtagatttcaggatagcaattgtaattctaaaagcgagccttctagcaggctaagaatttacttgacaaccattgattaaaaacttggaagaatagaagcagtgttttgctataactttctgtgaggctcaccgaagaaaaggtttacatgttcttccaaatttagaatttaacaggttatgattaagctgtcaaccagtttgatttacaagccggactaaagctagcaccaaaatttcaatgcaggtgctgtcttaccaaaagaggatgcttaaaatgactttgatcgattaacacttgcatggtcgtttatggacttgttctagaatgtggcacagctgttttcatgactaacttatgttcccatagttgagttcctgaaatccaggggtatggaagacctattgtcatgacggaattgttgagagcgacaatgggataggatatcactagcagtgaccaaattggattggaagtaagttgggagagtgctgaatgcgcttggttgagtggccagagccctaaattatgtaactagacgacccaacctcacaggttgagccagatggtataccaagtacgtgattagatcgaagcatagatcaaagccatacaagagtcataggaccaagaccaacgacatgcacaacaatatgcaaaaaaataatgagtgataatacattgaaatcattcattacctgactgtaattactttgagagctcactagagatgtaatatgggttgaacaacagccccttgtattcataccccttctcaccgtttggatagttcttgcacgacacaactgacttggccctcatgtcaactgtgatcatccagacctgctcatggtatataggttggcgcagcacaaagtgcacaatgtgtgggtctagtaagctcaccacaggatactctggtacccactgatgcaaaccgtatttcttgaaggatgctgacccccacaggccgttgacatcgagcacatcatccaacttccataccatctgtggcatttgcagtgtccacgccctgataacgatggcagagggccgggagcggcacttgtcaacatctacgaacttgatcttcccatcagagacaccgactgtcctgaaggacgcagttggtccacaattgtcagtcttaacatggaacaagagttgaatttcgctctcaagaaaagggaacttgatcaaatggagcttgggcagagattccaagacatcacagaagataaggccaatgttgtagctagcccaatagaccttgccgccgtgggagaaggcgatttggctgctccacttgcttatcagtccagaatgccccccataatctgagtcaaaaggaggcagagctagcttcttgacaacccagctgtgctgatgctg

SEQ ID NO: 26017 - DNA, 699 bp, Oryza sativa
aagaaacttacctgtgcttatcttgcctacagaaacaagagattggatctgttcaactctttgggatccatgtatgcagcagtccttttcattggaattcaaaacggccagactgtccaaccaattgtagacgttgagcgaacagtgttctaccgagaaaaggccgctggaatgtactccgctctaccatatgcatttgcgcaggtaaatggtcatagctgcatatttaaacaaaaaacaattgcagtgtgcttcctttattatacggaaaaaaatctaacaatttatcctttcaacaggttcttattgagataccacacatcttcctccagactgtcgtgtatggtctgatcgtctacagcctgattggctttgactggacagttgaaaaattcttctggtacatgttcttcatgttcttcaccttcatgtacttcacattctatgggatgatggcagtcgccatgacaccaaacagcgacattgctgccatagtctctactgcattctattgcatatggaatatctttgccggcttcctaatcccccgaccagtaagtatctgatattcattcattgtccataccaacctttaagtcttttttctatactgttgatgctgaaatatacatggctggtttgcagaggataccaatatggtggaggtggtattcctgggcatgcccagtggcatggaca

SEQ ID NO: 26018 - DNA, 696 bp, Oryza sativa
ccctgttgcgcaacaacccttatcccaatccaaaagcttgatcagcatgtcatcagatgatgacagcacaaaaggctgggttgggtgaacagccacacacctgatgtaatccgtatgagcttcaaaaaccttgaccttatccatcgtattgtaattgtacacacgtatgaacatatcgtcggcaccagcaactacccattgtttccgtgtgataaatttagatgaccgaactgaaatggggatgattatattagcaagatggtatatcaaacagaagtaagcgatgaggtgggaaagcatacctggtaactctgtgacttcaaatgatttcaccatcgtctgaggatagatgaatatattataatcagtttaactttaagagtaactatgctgaaaatatgtatgtttctttttccgtccatcgatttctagattttacttttatgttttacctcctcctgttttgctctaaatagtttgcaaacctattaagaagtcccaattatgtagctaacactcacacatctgaaacaaccatctagaagttcattgactccttgttacttctattttgaccatattcctttctacaatgcatcgaagacttcctcgataggttttaagaattcatcattcatcgctatgtttgacccccccccccctctttttctttgttttcgggtaccgagctcgaat

SEQ ID NO: 26019 - DNA, 3857 bp, Oryza sativa
gaagcgagtccagttagggcagcgttggtccaccaaggttgatagtaagatgaaggtgcaaaaaagtaaggcgaacaaacacactgcaaggtgttttgataagcagaaaaagacatacgagttcacagagaggggtggtataacgcgtggtggtgttagattcggcgcaagagccttcaaagttgaaggtgaggggaacttatgttcttgccaaaggccattgctctaccatatgccttgctcacatcttatacacgtttatctgattcatgcaattgatgaggaatctcccaacagaatgccgtatcagttctcttcaatagccgttgtgaacacatgggcaagtcgctttgagccatacctcgaccccacatagtggccaccgtacgatggtgaagaatttgttgctgacccaaatttgaagattaaaacaagagggaagaggagatcgaaacgattcaagaacgaaatggactcgggtctgggtggttctggaaggaaaccatcttcatgcgttcaacttgatgctgcgccggtgcaaaatagatgctcgttgtgtcaccaggagggtcacaagaaaactaagtgtcctaagcgtccaaaaaagaagaagtccaaaaaaaaatataagtgtcagggaggtaaatattttgttttcctactcatgttctcgcattcattttcttttaatatatgtcacattggtaactaacggtgaatttattactttttcatgtaggatggccgaggagggacaaccgccgacttacccagccttggaggcgtactacgaggcccgtcatcgcggggctgcgatcgaggcggggagggtatgaatcggcattgattcacttgtgcataagtatcggtagcgtgtatttgacattatattaactaattgatttacaattgctaatgtaggtacttcaaccgctccgagtcagagctcatgcccctcccagtgttcgacgataggtacatcccgtacctaaaggctgccgggttactcggggtggccttggtcgtgagcagaggaatgccagtgttcaacgctcctgcgttgacagcacttgtggacagatggaggcctgagacacacagcttccacctccccagtggtgagatgaccatcactctacaggatgtggctatgatcttggccctcccattacgggggcatgccgtgacgggcaggacagagactcctggatggcatgcacaagtgcagcagctgtttggcattccactgaatattgagcaggggcaaggggggaagaagaagcagaatggaatacccctgtcttggctgagtcagaacttctcacatcttgacgacgatgctgagccatggcgtgttgagtgttatgcccgtgcatacatcttgcacttgttgggaggggttctgtttcctgatgctgggggtgacattgcttcggcgatatggattcctttggtcaccaaccttggtgatctgggccgtttcagttggggctcagcagtgttggcgtggacatatagacagctctgtgaggcctgttgtcgtcaggcaccatcatccaacatgagtggttgtgtgctattgattcagatgtggatgtggttaagactaccgattggaaggcctaagtggaggcaaagcttcactccttggccctacaatgagccagacatggagaagacagtggcctacctttttgagagtactgccactgcacatgctcaccgggatgtggcatacaagcattatgtcaatgagatggactgcttacagcctcaacatgtaagtacttccaatatcacttctagttagacatttacttctttaattgagatactaaccaacgacatctcttcaacttttgcagattgagtggttaccataccacacaaatgaggcttcaagcctgaccctgaactcgatgtgcaatcgagactctgactatttcatgtaccagtgcccattgatttgtttctgggcagttgagtaccaccttccgcaccgtgtcatgcgacagttcgggaagaaacaagattggccggttgaggacatctcaactggagttgaattacacaagtaaatatttcttatctttgtttgctttcattatcaatgttcaattttgtaccatttaacccttgtcgatgctcactattgtttcatcaccttctacttgtctaggtatgacagggtgagaacaaagaaggtgaaagactgggggctagagcataatagatacattgatgaatggaggacagccggaaggaacgacaggtacatcgagactatacaccaaaatcatcttttctcagagtaccttcgttggctgcataggacatatagactgttcctccgccctacttggacggaagccgacatagaggatgaccgcgactctgatgaggggcggaatccctatgatgtccggactagagttggatatcaaatggagcacgccccacttagagacagagtcgtaagttttcttgcatttgtcaaagttatttccatttgcaccctagaccctaacatatatcttctcacgctttcagtcgagagagctcctcaggagtgtgaatgaaatggggcatgccctccaagctccgaggggtggtgaggacacggagaacacactccgcaatgttttagaggtaaaatttatttagcactttgcattacttgagttatgcctaacaaacttctttttttttttgaaatgcagaaagttcgtcaaaggtgccggaaacttgcagcaagattaggttgcaggtcggttggattggacgacgtgtaccaactggggagattacgaccaccactacctcaatccgcgcgtccaagtatcgctcgacactccatcaggatagaagagcgtgaaggagttggtggctcgtcgtcgtcacgcattaagcaagagaggggaaaggggaaggcgccggctccacctagcgacgacgatgacgacgaagacgaggaggatgaggactacgtcgtaccagacgccgaggagatagacatgtcacagcttcccgacgcgcctcaggggacgcaacccacgcaatacaacttgcgatccactcgggcagcgaaaaagaggtaaaatgagcttaccattctcaaatgttatttgatttcccttattttgtttttaaaatgttttaaacattggattttcaaatataggtacactccgggctcgcaagcaattcggcgccaacggaagaagtaatttgtatgaagttaatctattggttggtagtatgacatatgtggtgcactatgtgatataaaatgtgatggactatgtgaggactatgtgatggacttttgacattgtttcatgtgtggaatataggatggacttttggcattgtttgatgtgtgggatatgtgatggactttttgcattgtttgatgtgtggaatatgtgatggactatgagaggactatgtgatggacttttggcattgtgatttgtgcaattggaacctgttttagtctgtacgaatctgtgaattgtgatttgaattgcgaactgtgaattggtacatttgtgcaatatggatcttcaatttgcagggaggcagagggcggcgccaaccaccctggcgccgcggttggggagggcggcaccagccagtgccgcgaggcagaagggtttcgggctgggggagggcggcgccagctaccctggcgccgtggtccatgagggcggcgccagccgaggcccggaggcagaagggcttcgatggggggaggaggggagcgccagccaccctggcgccgcggtcggggaggggcgccagccgttgcccggaggcagaataaggcgaaaatttttaggggggagaaagttggt

SEQ ID NO: 26020 - DNA, 7206 bp, Oryza sativa
aatcgagtagtaggcattgcaacggagatcgggtactatgcgtactgtactgctccttcgtgttcatgactttgcaagtactgtactactcctgcggctgctgatcttaaataacggcgaagatgaagaaatgaagtactactactatgagtaggagtatatatgaaccgaaacttctttgctgtcctgtcctgtggcttgtcgattgtgcctgcctatttattggcgtgttcctcatggcctcccgggtaggtgcatgcatcgcgaattcgcgactaattatcatcacctccaagatttgcaatggaacgacgtgaggagtgaggagaaagaatatgaaagatcctttgggtagcttgaggtcagggatttgcaacgcaacgtgatgactgatgagtgaggatatctcatgcttgcaaatctgcacagccaagccaaggccccgtttggtttcttccctgaaataaaacacacagacggttatgcctcgctgtcatgtccaaacagaaacttctcgcaatctcgctcgtgagggaaatcaggaaaatctgttctccggatagttcacctaaagtgacagattttttcttaactgctgagacattagttattgcattcggcggtttcctgacgttcacgttcatgttcatccaagaattgcagtttggttgaatgggacagcacaggccactgaaaccagagcgccagacaccagtgcatgggcaagagaagtttaaggtggtgtttagatccatggattgaattcctcgtcacatcagatgtttagatactaattagaaatattaaacatagactaataataaaactaattgcataaatgagagctaattcgtgagataaatttttgaagcctaattaatccataattagcacatgtttactgtagcatcatatagattaatcatggattaatcagactcaatagattcgtctcgcgaattagttcagtgttatgaaatgggttttgtcattagtttacatttataattctaatttgtatcaaacatcctatatgacaggtagtataattttagcccgtgatccaagcaagaaactgggagggtcagacagttaaagaggcgatgagatggcaggtggccgctgttcccggtgtcagcaccaaccgatcgagccggttggtgatgcgacgggagtgaggtgagtgacagagtgatactacagtgtaccggtacagtggagtagcgttcgcgatcgagggatgtggacttggaacggtgatggatcgtgtcgttgttggctcatcaattcctcacagtcaccggctgcgtggccggggcgccggccggggctagccgctagcagaatcggcacaaggatggctgtctgcgtggtggcgccgcgtgcggctgctcgctccgcctccacgtcttcgtcggtcgcgggcttgcggttccggggtcaaacagggggtgtcggatggatggcgagccgagagcctgagatgccgcggaggttgctgtttgtggatgcggtgggcgctgtggcgactggcgcgccatgccggcatgccgcgcgacggcgacggctcgggctctcgcgggcgcgacgcgcacacagcacggcgaggaagaggggaaacgggccgcggtttttggggtggttgatacggtttgggacgatccgggaaggagaagcccatctggccactggccttattagcccagggggcaaggtgcaaagtagggaataattttatttttaattttactagaaaaaaatgtatgtgcgttgcaacgggtgaaaattattttaatcttcttattgttatgcggtttagttaatgtggaattcactatgagaattagcttggatacatatttttctacaaaatcatgatacagttaggagtccgatcatctcaagttagcatgcgagttttcttaaaatgatttcttatacgactccttctgtgtttccagaagcgaagaaatttaaaacccgactcaaatatagatctgtatttccaaaaacaaacgaatttaaaaaccgactcatacacggatgatgtaccaaagtaccgacaaaaacatcttcaatctattatattattaatgaaaggaatagaaaaaggagcctccacgttcgctctcatggcctagaaattctcacattaactggagaaaaagaaaaggcagagtccatatagaaatacaatttagaaatagctgaaattcggaatttaaaaataaagaatattagaagaggagactagagtccatatagaaatacaatttagaaatagttgaaattcggaattaaaaaatacgaaatattagaagaggagactagagtccatatagaaatacaattaggaaataactgaaattcaaaattaaaaataaggaatattagaaatagagtatagagttgtcacaccccaatccggcatcgctgtacaacggcacctgacaggagcgtgtcgtagtaataacggcgcgaaccgcttcctacgaaaccgcgatctcagtaccagtcccaggacatagtgctggtacccacggtgacaaatatgaatcattgcaaatccttaaaataaatagaggacttatttaccttaacttaggttgcagctcagaacagcctgagaaatgcaaccgacgacgctgacggggaaacaccaacaacagcagcagcggcggaaccaacggactaacacccaacaccacaggcgacggttggggaccaggacgaaaccctaatcttcacttcacttcatcttcacttcaaggcagaggaactacatatatatttatatagagtaagggtgattactttcgtactcagcaagtcacgagaatttaggtgtttaatgcaagcttggaagagaggcaaggttgttttgcaaatcctttatttgaaacacttttgaaattactaagtgatttatttctttttaagtttgggtcgaaaagagacttgcgtctcaaatcgacttaagagatgcttttcaacaactcaaatggtaatgtaccgacctcccgggtcagatcattacttatcggctcccagagccatttcacttgattaggcggctcccagagcctttttcattttctcggactcccagagtccagctgcccggcagcacaacaatccgctttcactcgggaagcctagtctttgatgcccgtagacatcccgaatcacacagatttgtttctgaccactcaggtcatccatctgccacataggctgattctggttacgattcccacaccacaacaacttttaacaaagcacaggcaatcaaatctacgcaacaggaaccacctcacatccgcccatgaccgtgggcacggctgttcgaacagttaattaatctctacagagaggtacactttacccacaagacacgaacttactccagacactggccggtgtcagaggttcgcgacaaagcctttcccaagccgactcagggttacctcatgccacatagaaggatcaaatcctcacttaaatataggccattttaggcattcacaaatcaactccaaccaccttgatcggtaagtgagcaagcttctcgtccttgccttaccaggaacccggtttgtccaaccccgccccggcgttcccaactattggcatgcgaggttttcctgaaccaactagttacttagccagggtgtcccattctaccttgtggttgcactttgattatgttcgatgagtttcccacaggaatcggtccttatatgcgaatacgggatagtgccacataggcacaacccccgcatcgcgagttttcacaatttattttattttcaaacacaccgacaccacatgtcgggttttcaaggcttcacaaacccatttcccaagttttcgacaatcaacggtgtatgtgggatatttggtacacgcgctcagagagcacatatacctaagtacaacaagggtggagcgacaaggaatcagggtagtacagcctacaggaattagtgcgactactgggtaggtccgtcggtttggcacgcaaaccgaggccaagcaaattaagtgtgtgaccctaataatgcaagttgcaaacaaaataataatgattttccaattataggagcaattgatcaaagggtgacttgccttgctcaaggtcttcacgaagcttcacgaatcttcgagaaaaccacgatcggtgaaaaatccggtaaccgcaactatacgcaaacaatcgaaaacctagacaaaagaccaaaagaaagatcctaattagactaattaatagtgccattagatagatctcaattttatggaattactggaagttgaacggagtcaaacggatgagcggttgagaagatatggattttctaaagattaaggaatttctgtctaaaggaaaaaggatttaataatttattaaaccctttttttggaaagaaattgaaggagggaggaatatcagacttcctcagggtggctagggtgcggcccgaggggatttgcgtggctcagccgagcttattgggccggcgcgggctacggggaggcggcccaggagaggggtgcggggagagagaggggggagccgggtggaccgggctcacctcgcggggtcccgagcgggcccgcttgtcggtgaggcggtgcacggtggaagcggcgcacgcggggccgggcgctagggtttcgggtgcgcatggttcgggcgcggcgtgccgggtggacggatggcggcgggcccacgtgcagctgcacggcttgtcgtggaccgcgcgcacgggagggaagacggagggagggtgcggctgaccggattggcccggtcaaagccgaggtggcgccgacgtggcgcctacgtggcagccacgcgggccggcgggaggaggaagaaggggaggccgagatggacggcggacgacggcagtttcaccgggacaccatgcgacggcgagggcgacggggagcacatcagaacgacaaggaggacaagaaagagtgagccaacggctcagattcgccagagggcggccagcggcggcgaatcgcggcggcggcaaccggcagcgagcaaagggggaaacgacgacgagacgacgagggttcgattcgtcggagatggagcatctctaggactcagggaactcgttcccggggttggatggggcagagcggcgccgtggaagtccggcgatgagaggcggcctccgggagcgggtgctgacggtggcaagctcacagcgagtagcgccgacgcttgggcggtgtctaggcacattcgggaaggtccaggctagtgaccgcgcaagctaagagggagaggaagagcggggagggtgaacgggggctaccgcgtcgggagatcgccgggaagagggtccgacagcacgggtgggatcgcctccgcctcgggccggggaagaggaaggagagggcacccggagtcctcttcggctccgcgcgcacgccggcttcccggcacgcgcaacggcggggaaggtgacgacgacgagcggcagagatggtgcagcggcaatggcgcggtggaggttcggcaaggaaacgaggaggaaagggcgggcctcgagttgggttttataggtgcgggaagtcggttttgggggaggaaaccgacttaggtggtcaagggagctcggctggcggtcgtgctcggagctagcggccaagcagcggcagtggaggtgcggtggctgaggttgggaaaaagagaaaaagaagggggaaagggaagcttgaccatgccgttttggggagggagagaagggggagggcgagctctggctccgtgttttggaagcacgcgcacagggagtgggggcgggttgcagcgcgcgacgcaggcggcagcgcgggcacgggcggcgaccgggcggtcggccaccgcgtaggagcgcgcgcggagcaaaatcgaatagcggcggcaggagagttcaaaccgcggcggcgggaaccggcgggcggtgacgaaaatcgaaaggcggcgacgggagaccgacgccgggagagaagggagagagagagaactgagagagagagagagagcgaagagagagagagggggagggggagagcggcgctctctctcggctcggtgggggcacgtgcaactcacgtggagagggaggagttaggcagaggggagatgggccgaggggaggggatccagcccatccaaaattatgaggacgcaaaatagacttttatagagaagacagatttggagagaattcgagttgggggtttggatttggatttcgaatttgatgcttggtcttagggaaacaaggtggagtcaaggaaggaactcaaatgggaatcaggaacaggtatttcgcaaggatttcaagagaggatttgaatttcgggatttgatttggagtcttgaattggaagaggaaatttgaggtggaggattttgatttcaatgagagggaacaacgggatttgaattgagatccacggcacgacttagactcagcacacaaagaatgaattttcgcaattaggattttgccgaattagtttttaacgtctcacgaaaagcggagcgttacaagagtccatatagaaacacaattaggaaataatagaaatttagaattaaaaaataaggaaggttagaagtagagtatagagtgcatataggaatttaaaactaactaaaatttggaataaacataataaaattaaaagtagagtttagagtccgtataaaaatacaatttacaaataactaaaattcgaaattaagaaaaacatgggaagttgagtttaaagtcaatataggaatgcaatttagaagtaactgaaattcgaaattaaaaattaaagaatattgaaagatgagtttagagtccacatagaaatacaattagaaataataaaaattaagaataaaaataaataatattggaagaagagcatagagtctatatagaaatacaatttacaaaaaattcggaattaaaaaaaagaaatattaaaagacaagtctagagtccatataggaatatatatatttataaacactttgatattaaaaataattaataactaacacgtatataaaatacaatatgaatattacacattagtagttttgtaaagttattgtaaaatttaaaattatgttgtcattttaatatatttgaataatataatgagaaaacatatatgttattatatgagagaaaatataat

SEQ ID NO: 26021 - DNA, 15642 bp, Oryza sativa
cggatgtcggaaggggttttcgaacatgaatgaaaaaactaatttcataactcgcctggaaaccgcgagacgaatcttttgaacctaattaattcttcattagcacatacgggttactttagcacttatggctaatcatggcctaattaggctcaaaagattcgtctcgagatttaaatgcaaactgtgcaattagtttttcttttatctatatttaatgatttatatatgtgtccaaagatttgatgtgatgttttttgaaaaagtttctggggaactaaacatggtctaaatgtcatgaaaaatgacctcccaaatggtgttagaggtgtggatatgtaatactttgaaaaaattacaaacataattaattttttctataaaattaaaaaaatgaaaaaaatctaaagtaggagaaggcgagcagtacattataataaaaaacacagaaatactacgaaacaatatactattataatgaaatatctaacatcaatatgatacagattctgatgtcaacggtacaatgctaacatcagcatgatacttagtaataaattaagtacatacatgtatcatgttaagatatgatacttacgtgtgatgacatcagcatgatatggtatcgaaagtaccagatcggtatatatttgctattccgttacatattctgttcggtagtcttccttaaaaaaaaagaggtcatttatttcggagtttttattgattgctagtagtagtttcgtttgcaatagaaaaggatcagattagaatcaacgaagaaaaaggcaaagttagaatagtaactatacagcagcataacgtatatacagatacatattgctacgcagataccgtacgcgagcagacacggacgagacgagcgcccaaagccctcgctggcaagaggtgaagaggggggagaaagacgcgtcaaagccatcaaccagatcgattgatccatccatccatcaatcgatcgatcgagcgatccaaccgaggtacgcgagcaaccatccccgcttccccttttcctcctccgattcgagatccatggcggggcctctgccgtgcggcacctcaaaccctctccggtcgtactctttgtctgcagccggcgagcagatctgaaggcgcggccggccgacctccttccgcctacctcaagtcttgtctcgactcgaattgaaggtcttgcgattacttccctcgcgtagattgcaaattcatcagggctttgattgattggtctccgtccaatcaaaccgtcgagtttgttgtgaatttatttgatgcgtggtgtagtgctaatagcagcttgtgtttcaaaaaagaaaaaaaatcgttaggtctatccgctgtttattaggttttgttgtgggtgtagagcacagtattgctcgcagatacttttaaatgagtagagacactggaaggcgaaatctttgctagcatattattgaccttcgtaaaccataattaaccaatgctcttttatatctcagaagggacaataccgtgaagtatctgggctgttgcttcgtattttcgtggattcaccttggaacttcagaacgaatcttcctgatattttccgtgacaatgaaaacacatgagagagctgccaatttggctcttgcaggtacatttacatgctcaattcagccatcgtggtgttggcggtgttcataaccatttttgttttcctttggacaaactgaatatttgctgagctgcagttttatgcatcttacattgtatgcaggtttgagcttggctccacttgtggttaaagtaaaccccaatgcgaatgttatactgacagcatgccttgccgtctatgtgggctgttaccgttctgttaagccaactccacccgctgtaagcaatatgcttgaacttgttttatccatctgctgggcactaatgtgataggttattcatccaacttcctacatgtacctctggctctgaataacttaatttttgcctttttcttatataggagacaatgtccaaagaacatgctatgcggtttcctttggtgggaagtgctatgcttttgtccctcttccttctattcaagtttctctcaaaagatttggtcaatactgttctcactgcctactttttcattcttggcatcgctgctctctggtaagttcaaatcctattattagaagagtttttccacacatgtaacttcttaatactgtttttgtgaaattaagaatgtttatgtttttctcttgcagtgcaacattgctgccttccataaaacgatttcttccaaaagaatggaacgataatgccattgtttggcgtgctccacttttccactgtatgactcacacctcattattgccatcatgtatcatgtcagatcaatacatctatgtaatcctatctattagtagtctactatatgagggaactatttggttgcatctctagtattgccaatttgccatacatcaaaacaatgttgtggcgacataatccatatacttattgtgtgtcatagctagaaaggatttggttttatttttgggaacatggtgtctttttccagtagaccaattcatcctagagcagaactttaaactgtctgtactgtattacaaaatcataaatacatgatatcgcttaatacaagcaagtaacacaacttattcaaaagacgttaagagtaaagttaagtatttaaattgttcctaaacaatttagtggcatctaaatatgctttcattaacagcatgttgtatggatatggtatccagttttcctgagtgaaccatataggtgctgttagtatgtcagttccttttgttaggaaattattgaaatggcaaaaaaggatcctcctttcaataacattgaaattgtatcatgcaagtcacttctttgtttactggtcttttaagttcattcacttcttatttcagcgctctcggtggagtttaccagatctcaagtcgttgcatcgatcccaggatttttcttttgcatatggtatgctgcgaagaagcattggctagcaaacaacgttctggggatttctttctgcattcaggtttgatcttattgctatttttgagatataatgttaatatgcatgagtaaattaattacggtatgaaagtttcgtagatatgttttttttcccaccaacttgtagagaaacctgaatccctgattctctttgccatccagggaatcgagatgctatcacttggatcattcaaaactggtgctattctcttggtatggattgtttgtattgaactgaaacttatattttctggtggtacttgtcaaagcaccttttattatttcagccatcaaatcattactagttgagcatggcaatgataatttgaattttctgatatgctataatttatggttgcctttcttttgcttgcgaaattaaagtccatatttgtatacaccaccgtattgtgtaaagcatttttaatttgtaacttttgtgtatcgtggtattcccttttaattcagagcggactctttttctatgatattttctgggtcttcttcactccagttatggtcagtgttgccaagtcatttgatgctccaataaaggtaagtattccttgatttcactcttgttgcaatagccattcatttctatacctaatcaaaaaatacgtaaggtttccagtagttattttcgtctgtttcttttttttcgccgctttttcctttttttgtgccgtccagttgcaagaaaggctaaggatgagccatcgggcccataacaataccggcccaagggaccccttacagaaaccctagaaccacctgattttcatcacaaagacccctactgtcttcgcccttcgttgctccccctctcccagatccgaccgcctccgcctccggcccgccaccactcgccctgaatatctggcttctcaatccgcggaaactactccctgttgttcgtcgacctctttgtcgccggagacctctaggttttctccctctctatgttactgtatgtttgtatggtcgtctcaaactctttggatgtttctttatgtgctcggtggctaattagccaatcacacactgcagccgccatggcagcaaccttaaccctgtgtgaatggtcagtaagctcacctacattgatccgctttgttgcgtcgattggaggaacggctcttcttgtacgtgcttccttcattgatgcatcaacgcacgctgctatatgacctagctctaagtttaatccatcccgtgtgaattcgttttctaggttgcaaatatactgttttagaaatactagttttctaaaaaaaggttaatctagttctactcatttttttttgcacagcttctatttcctacaggtgatgctgcacgcccgttctctatgcttggccttggtgacattgtaatacctggttagtaataaaatctttagattatttatttcaacttttatttggcctgtgatttctggttgaatagggtcattcaggctgtcagctgcattagattgagaacttgtttgaatttatgatctatagcaagctgttagttcaactgggttgtttgttaaaaatagtaacccgattcaaaactgtatctgtttgctacatcatttgagttcctatttttttctcctgtggctctaaaggtgcgtaggcatgtagcagagaatcaaatcaactatatcataaaataatgtagatataattttagttccatttgctggtaataggagtacagttgtgtgtattgccagaaaataattgtaaattcagcatttcagctgctttgagttgcttgtaaaaatgtactccgagtctgaattctggctctgttatccagatgaagccaacaaggttggctatttgtcttcaaactacttagttttataatgaggatatatgttggtttttggctatgatattactttctatacttgaatctaaataaaatgaatagcagaatcatttgcactaccctggttcgttaatttttttttccagggattagtttagttggttggttagggtatgcatgtggatgccttctactgaataatgcattaaactccttgttgtctttattagcactaaagctcgaagaatttgttgttgctagttgctacttgccactgatcgtttgtctttccttagcagtcttcacaccattcaatagtgtaaatcatgaaattgacacatattctgcaaggtgcaactcttgtattgacacataatatgctcttctacttttggttccaggtatatttgtggcacttgcgctgcgttttgatgtctcaagaggaattaagaaccgctattttaatagtgcatttttgggttataccgtgggtctgactgtgacaataatagtgatgaactggttccaagctgcacaggtgagttctgttactaaggattctcgccatcgtgttgcctctttttttcccaagggaaacagtgagggagagcctactgtatacagattattttaaacaaaatgaactgttatacatacataaataaaaggggaaaaagaaggtaattatgttggtgcatctgccacctctacaccaccagaccacctccaccctgtataaacttgtagtagtacaaaggaagctataaaccttgtaaaaggaaaaacaaggaaataaaattacatcaagatccaaccgggactccagttataacaggaaaagaaagttgcctctgatttctgtcatctctgaaatattaatgcccctcttctttcattgtctttattttctcatcatatgcagcctgctctgttgtacattgttcctggtgtgattggttttgttgctgttcactgtttgtggaatggtgaagtaaagccggtaagtttgttaactctgaccatggtatttcccaacctgtccattgtcctgaaacttgagagtacgctgcgtaatttattctgttgaaggggcccctttttttgttacattactaaaaactcaaagttaatagccttcgttcatgatgcttaattgctactgcaaagacgtgggagttttatgtacaataggatggttgatataatttgttggaagagtcgctgtatttattttgatgttagtgttagaatggtgttgctatggttaagttattatgtaccacacgctgttaaatatttgattttctaagctgtgagcaatgcccgtaccatttatgcatgaaatggctttgtacgcatcgttagagattatgcgattccggtgctgaaaggctgagaacatgatgaagttttgaacatggatgatattctttgttgctaacatcaaattatttttttagctaaaaatgactagattattttccttctatcttttgatcactagataaaaatcacttggtttgctggttcgcagtggagtgaacagccaggcatgggctcaatccttatcactgaaatctgtgcgtcagtggggaacttttttcctactccctgggattgcctctatgggttaatcctgggacatttaacttcttgccacttttaagatgtggcaattaattatttgccattcactgtctatgacatgtgggtccagtggcaaataatttagcaccacttgtaagagtggcaaatagttaattattccgttaatcctagctaggacttgatacaccagtagggctcgcctcccacgtataatatatgtatctagtgtgtatgtgaaagctgatgcttgctggcgtgggagtgggagtggccgggtagtttagtttctgttatgcgtatccttagttttacctttattgttttcgtattttattatgattatacttgctgacattttattacattgccagctccttgagtacaacgagtccaaagcggaagaggaggaagcttgtgaagaagatacagatagcaagcaaaacaaaaagaaagagtagggctctaacaagtaacaatcataccttgaggactagaatattcagaaactttatgtaaggtcttcggcatctaagtaggctggatgacctttgggatacaagctcacttagaacttagaaatgattcacatgatagaatctttctggttttgagaattgtttggtctggtgagtagatgaggaatgcatcctaagtggtttagcaatactataaccggtacctcttgtttacacttatttatcctggtggttggaaggatctttcctgaattttggtatggtgaatagcgctctgtgatatctttcttggcacactgtcgtgtctgaaacgagggatctcgcagaaattcatgtgtgctgcactcttttcttgcaaaatacttgtgccattggatttttacatcctccagtgtttcacattttgaccgaattttgatttgggagtatctaaaaaaactgccgcaagtttttttagtcaaaaactattagatgcaactatagtataattagagtgtaattacattgtaacggtattataactacaccgtaactagaaatcttaagtgtaacatgtgcgaaaaattctttctagcaatttttttttcctttcatgcataaatgttgaggcgattcgatggttattaatctgatgaaagttttgagcgcaaaaaaacttgcggaagttttatagcaaatctgattttgattactattttctgagtaaattacgtaacaacttcctgagaggctgagaatcatgtattacgttgcggtgggaataagtccatttaacctccctcatgtcttgtgcttgcgtgaataacatcactcaaccggaaaaccaggtataacgcctcctcctctaaaaaccagagcaaatcacctccctcggtggtttcggaggcggttttgtcctacgtggcacttacgtgttggttgactttctatgtggcatcgacgtagcgcttatatggctctaaaataaaacaaacctaaatagaacccacatgtcagtgagtaaaaaaaataataaatgaactcggcgacagcaggacggcgggagcgacgggacaacgggacagtggtaggaacgccggcgggatcacaaagtggcgggagctcgacgggagcgatagaacagcgggagcggcgaggcggcgggagctcagcgggagcggcggggcagcgggagaggtggggcagcgggagctcggtggtagcggcaggacggcgggagtggcgagacggcaggatctcggcaaagcggcgggagctcggcgggagcggcaggacagtcgtgacggctgctgctgctcggcagcgacgttgccgacaactttgccggcatggaaggaggagctcgttagccggccatgacgcgcatggggaggagatcgtcagccggctgcgcgcgggtcctgtggtgacgccgccccttcccctttcttcaacaagcccgggcgccgtcgcccgacaatggccactatcgctgccccgccgtctcccaccacggctcccgttgccgccgctgatgtcgagacaccggtgcctactagatcctctcatcgccccgccggccactaccacggcctctcgcggcggagaccgccgctgagctgccggatttgcgcagccgccgttgtcttgccgatccgggaggtggagtcagaggcggcgatggcgatgcccaggttgagctccgccgatttcgacaaggggagcaaggtctccgtctcctccctttggaccgacggcgacgagaggagccagctcgtcggcggcgacggcagtggtggtgattcgatgacccatcccggcgaaccgcttcccctgcgcttgccgtggcaggcgaacccttcccgcgcgggcgccgtggccggcgaacccctccctcgcggcgcgcgcctacatcctccggcggtccctatccctcccgcgcgctccggcacctcccctgaccgtgctctgtccacggagagaggggagaggagagtggagagtggtggaggaagagtggaaatggcacttacatgtgggccctcacataatttttcaattttttcgatgactaggctgccacgtcagcaaaaccactgtcaaaaaccagggagttgttttgtactggttttaacacttggggaggtaatatacccgtttttctggttgagggatgttattcacgcagcgcaagagatgagggaggtgaaatggacttatttacgctgcggtggcgcgttatgccccgcgatcgtgcaggctcacatggccgcggttgaacgggaggcagcccatctggcccgttactggcttatcttgggcctttgggggtggatcgcttgcgccggccttcggatgcacaacctgtgctgtgggctgggctctcatcgtgcgttcgcgcccttcgttgccgccggcggcggccggtgttgcaagggcggtgcgggtgaagaaggtggaggtggaggcgaggcgcggcgaagaatcccccccaaggcgccgtcctccgacgcctccctctcagacggcggcgggagcgagggctcggactccggcgccgctccgatcgagtccccctcaaagcgccctcgtcgcaggtgtaggtattttcccccctaccgccgccgtcgaaagggttcgagatggaggggatccctgatcataccaaacggattcgatgtagggaatggagccgaaccaaaattaggggttgcttcccgttccgctgcccaattcgcgagttcgaatggtgatatgggtaataaaatccaagcgaggaagccaagccgcaggtggatgcgaaacccgggttgatgaagacggcgaacgcgggaggtgaacaagcctttttgttaacctatggttgttactgatgatattgatgatcctttttgttaacctatgcttcccaactttttttttgtgttctccaggttggttgaacatgggcattccggttgctcacctgatgaatggcaatttcgttacgataatctcagcaggtattacttactcctatatgattgattataacattgctacaagtaaggaactatactggtagttcagagaaaaactttcgaatccctccaaaattgaaaataaagatttgcgaaccggcattgtcttacatatttcattcatttacgtcttcgcattctgagaagctgaaagcagattttgacgactgctggattgacaaatgacaatgaccattacttgtcagagcagattcccaccttttcatattcccctctttgcagtttgcacacttcagtagtactactacatgttcttgttgtacttctacgattgatatagctacagagcagttcttcgaaacctgcagccttcaccaagtagaattgtagaaataggttcagaattcttcagaaaagaattataaccatctaatgtgatagtagtaatatttttatttgtcccattgttttcagtaccacacaagaaacaatgtgctactgctatttttctttatctcattgttttcagcatcacacaagaaacaatggaagggtgtgatcaggattgcggttgggagatttttttttttccgagcaaagagtttgcagcagttggcctttgcatcgaaggagttggatccagaaaatccaaggtagatatgcgtttgtattagattcagttgaagaaccttgcagtttttgcctgatggccggattgcagctttctatgtacctcttgttgatgttgacaagattcctgcaggagtagtatcttgtgttgtcggattccctttttttttctttttgaacgaagttctattgatagagtaggaaaaaattacaagattacaactctggagggtcataaccaggaaaaagaaaaaaaaaccccacgagacggtgcgaagttctattgatagagcaggaaaaaattataagattacaaccctggaaggtcataaccaggaaaaagaaaaaaaaaccccacccacacaccgacagtgctaacacacacacccgggagaaggctagcaccggaccggccgccgctaagcgtgaccgaccgccgctagaccaacaaaggaacatagacgagatcggcccctagaggatgccaaaatgacgtcttcaggaagagaagcgacggaagaaccgccgttgccatccgtcagggctcaaaggagtcaagactgggctttcgcccggcaaccgcccttgaggggtgagacagcacgacaacgccctcaggagggggaatgacatcgttgtcggtccggctacagccgagctgggttttcacccgccgctcaccacctgcgaatccacggctgacgcaccgatgctccaccactactcaagctctgccgacatgtgggacccctgcatcggcgtccccgccggtcagccttcgtgcgctgaagaccgcaccacacccaccggcagctcctcctcacaccgaggtcgcctcctccaccgccggccgcgcctctcgcgccaagccggcctcctccaccggatgcacctctcgcgccaatccggcctccctccatcggccgcgcctctcgcgccaagctggccaccgtcgccgccggcagtgcctctcgcgccgtaccggcctcctccaccggacgcgcatctcgcaccaatccggcctcctgtcatcggctgcgcctctctgcaccaagccgacttccgacccttctccgatcgctgtgcgccgtccaggtgcgcctgtcttccaccccccggctagccgttgaagaccgccatgcctcccaccgtcacgcctccacttgctgccgctgtcgatcgtctgtacgacgccgccagccgttgtcgcatccgccaacgtccccggccgccacacgtcgcctccacagccgcggcagctgcaagccagccgccgtctaccgccgccgccgtctccagccgtcgtagccagccgctgtcgccacaagccgccgcctcgtcgccaaccgccaccagcagttcaacggaggggatccggtctcccgccgcagtaggccgacaccgcgttgtcacgccccgaactagtcccgaccggaactagcccgtgacgctccaaattaacctgttaatcgataccagtcccaggaaacagtgctggtatcacagggagacagaatatcacagcaacagaggtctctttattatagagtagatgtacagtcatgttgggctgcggacagatcccgagctcacaactgcattacaaaaggaaagcggaagccaggacttggaccaataaacacaggcgcgacttgggaactaggccgaaaccctaaaactcatcgtagccggcttgctcctggaagaactcctcatcagcaggatccgcttcatcttcttcagcaactgggggggattatttatatagggcaagggtgagtacgggagtactcagcaagccatgggaagtaagtgtttaatgcaggcttcaaggaaaggctgatgtttttgcaattaattttatttgaactcttttctgaaacaactaagtgagtgcttctcaaacgacacggatgagacagtgcgtctcgtccggtcggagtatgtgcaatgtatcagtctttagaatttaaacaaggttggcacccggccaacagctttttcaacggccacccgggcctagctgatcccattagctgcagatttttcaaacaccgaaccccttttcacacagcaatttcacaagcagtagtcaaaccaaactacgctaggaatcacctcacatccgcccatgaccgtgggcacggctgttcgaacagtttgttaacctctgcagagggggtacactttacccacacgacattactaacccggatcacccagcccgtggggatcagccacgtcgggagacctccaagctttcatgacaaggcatttccaaagccgacacaggtttaccatatgccgacgagaggggtcccagaccaacaacaggttaggtcccataccatactgtgccaggaagcccaggggtcctccccgacaccaccccagcgaatccacatgtctctcggcatcaaggctcccctgataagctagttactcagccaggggtgtcccattccacccatgtggtcgtacttgtcttatgtttggatgaaattccaaggaatcggtccttaagtgcgagagcgggaaaccgtacacccggtacgttccccggtccgcggttttgaaaattcatttagttcgcaagcaccgacccaggtgtcgggttttccaagtcttttgtaaaactccagttttacccaagttgttactcggattttaagtttgaaggcgaccgtcgatactggcacagggtgcacgaatatcgaggcgcaactggatggttacaaggggacatggtatagcaattaacaatggaaggatcaaatgtaacaagttaggtaggtctgccaatctgccttgcagacggaacaacagattaagtgcaatcctatcaatgcataatattttgcaagcaatataattagatttcaaatataggctcaagatgttcaaaggtggcttgccttgctcgagatctggagcttgatcctcgaaatcctcgcaccgcgggtcttcgggctccgatactacacgcgaaacgggacaactcaacaaacggcgaaaataaagccctattaatgacctctaagcatgccattagaaagatctcgagatttgaggaattttggaagttgaacggagtcaaacggatttacggttggaaagatattgaatttctaaggttatttgatttttggtctaaaggaaaaaggattaaattaaatcctttttgaaaaagaaaagaaagagggaggagaagtagacttccctcgggcggctagggcgtggcccgagagaagaagcgcggctcggccgagctaatgggccggccggcccaagaggacccggcccagagcgcgcgcgggaggggaggagagagggggccggtggaccgggctcaccacgcgcggtcccgggtgggacccgcttgtcagtggctcggctcaccgtgcggagggagcatgcggcgtacgcgcgcgggcgagggagggacgcggtgcacgcgcgcggctcgcggtggatgcggatgcggcgggcccacgagcagcctcacggctcgcggtggaacgcgcgcacggggagggactgaccggggtcggctcgacccagtctaggctgagctggcgccgacgtggcgcctacgtggctgccacgcgggccggcgggaggtagacgacgacccggccgcgaatggacggcgggtggtggcggcgagcggcggagcgaaccacggcgatacgggcaaaagcgagcacaccgggcggctgttcgtgatgaggggagacgagccaacggctcggattcgccagagggagttcgacggcggcgaatcgcggcggcgacaaccggcggggagggaagagggaaacgccgacgaggtcacgagggaccgattcccgacggtgagagcatctacgcggtttcgggaactcgatgctagcgtcggattggacggagctacgccgagcgaggctagcgacgtgtgggtgctacggagctcgagcggcgacggcggcgagagcacggcgagcgacggcaacggtcggggcggcgccggctatctacggggagtctactcgagctactaccaaaagctagggggaggagatggagcgaggaggaagaacggagggaggcatcaccgagatgaggaggggcgctgtgacgagaggccgacggcgcgggagtaatctctccagcctcgggccgaggaagaggaagaagagggcgcggccgaagtccccttccgcgtcctcgaacgcaccggctcttccggcgctcggcgaaggacggcggagacgagacagagcacgggggcggcagctatggcgaggaggcgaaaacgagggagattggaggggaaggagctggggtttaaatgggcggcaatgtcggtttggggaccgacttgcgcggtcaagggcgcgagctggcgctcggcggtcgcggccaaagcggcgacagggaggatgacgccggcgagggggggaaaaggggaaaaggagggggagaaagggggcttgcccctttgccgattcgggaaaaaggaggaggggagcggggcgacgcggcagagagaggaggggcgcggcctccgtcccttggcggcttgcgcgcggagtggcgggggccaagcggtgacgacggcaatgacggcgggcggtttggagcggcgcgacgacacgggcgacagacgcggtagacgctaacgacggcggcgaccaggcggtcggccaccacggcacgcgcgcgcggcttgcaacgggagggcgcggcggatggagcggcgcggctcggcacacgcgctggctgcgggaccgagcggctgcaggcgcggcagggcagcggggccgggcggcgaccacgcggtgcgggcgaggaccacgcgggcgcgcgcgcgaacaacagcgcgcgggaagcggcagcgagggagaagcggagggggaggacttggctcggcgcgggcggcttacgcgctagagcgcgcggcccgcgggcgaggcgtatcgcatctgagcgggggagaatcggagtggtgcagggcgcggctctcgcgcccgcgcgcggcgcgcgaggtaggggcagatggagcgcgccgggaacaggagggggcgagagagagcgagagagagggagag

SEQ ID NO: 26022 - DNA, 16593 bp, Oryza sativa
aggaaatcggcccatcgacccccgggggaggcaaaatagacttttgcggaggaatttgatttggaaggatttggattcggatttgaactcgacgatagatcggggattgagatcttgagatggcacggacactagacaacaagcaaagaaacaaatttcgcaattagggtttttaaaagataatttttcccgctaggcgccacgacggaacgggcgctacacgcgtgcagccgccacgacaggtgcggctgcttgagccgccgccgcatggtccccgctgcggctgcctcgaccgtcgccgtcttcgccaatcgccgcagcggctgcctcagccgtcgccgtcgccaccagccagcgcagttgccgccgtcgccaaccgccgtagcagctgcctcagctgtcgccgtcgtcacccgccaccgcagacgccgccaccgcagccacctccggcgccagccgaccggccagatctggccacggccgccgcttgccactgcagacatggccatgccgccgcctcctccgccccgccaccactccagccgccgacgccgccaactcgccgtccccggctctctgccgcccagagcaacaaatccagccatgagggggccgtatccatgcatcccggcgctggatctggacgccgccgtcggtttctcctcggcgccggcgccttgccctgagctccgtcttgccggcgccccgaccagcttgactgcgagcgagggaagagagagccccgccgccgccgtccttgcagccgcctggctttgccggcggtggctcgggcggcggcgaggtgggggaggggaggagggggtcgggggcggcgcggcctgtttcgccgcccgcgtcacccccggaggcggagcgaccgagcgtatgcaagttcgcctttgagctcccgaaaaccacttttgaatccttgaagcaccaagaagtgtcggattcccttttgaagtatgaaaaagaaagaaaaggaaggtgatgcgatgtgttgcactccttgcgttagagagtgacttgatgaacaatatgtgacagattttccaccagattgttacattaaaaaaaattatgtaattgtttgctttgaaattgttcttttagttttgagccaacaacaattatattgttacatattgagtgaaagaacattacaatagcaaacacacatgttgtagtattataatctttcagtaaatgtacttcatgtaatatattctgcaacctgtaaacacgcaaactttgtttcgttcttctatggtatgattgctaagagctatgtgttctgtggactgtggactcatatattcatatctaatgaaattatgttgcaattttcagatattatcaatctcaaagatggaaaagagaaggcaaaccgggcataaagtaaaggtgtttattccagatatgagtcggttcttcaggtgttctttgctggtcactcccttgccacctgactttcatgcttttaattttttagatgtgactaataccttcttcagactactacacgtaacagtgtgattggcaatttggctgggacatgcacattccaggcactgacttcttgcctttgttttgctctcttggtcgagctatcacctttattatcctgtactgtaccagtctggaccacggaagccaccagttcagcattgatgccatccaacccatattccagctaactcctgccgttcttctaatgccatggcagttaagcagcaagaggtcagtactgggtactccttaatgctttacctttgttcctattcccatttatctctcgagtttgatcgttctgaaagccttaaggaatttgcgtaatgtaacacaatggtccatcttcccacttctgctatccatgaacagaacgaatgtgggtttgatttttctggtttcatgaacagaatagtacatggaaaaaaataatgcttcgttaaaatattgaacgctgcagaaacatagaatgccgcaataaagtgcagaattctgccttcaaacaaaatgaaggggaatgatttattttgattggggacaaggctagtagcgatcgatcaaagttttgtctaggttccatccagcgtgttttctcccctcagactctgtagcaatgagatctaaagttgattgtccttccctggttcttgacagctgaaaagcagctttttcataggattccaaagcctccggatttcctctagttttctcctacattccacatcggtgttggatgtcataatgctggtctaccatggacaatctttctttgcccatatggtctcacctgctaggttgccatctctttcttagatgtgccggttcatactgaaccgagagagttaaaaatatgttttgtgtcagtttcctcagtttcagaccctgattatacaataacagtgaaagtttttgtgattaggaaaaagagtaaatatgttcttgtcggtcaaacaatatgattgctatcctctgtttgcgaatggattggtgagcacacgtgcaattataatcaactcttgagcaaaccattactcctaccattgccctttgatcgagtagtctaatggatgaaagtaccctagcgtcgtagactctcttctcgtgtctgtcctcttggccccacctgcctccctttgatgttcctagctggagggggacttcgctggctgggcctggtccaccgtgcaaccatcactgtccctggctgtttgaccatacgcgggcccctcagcgacctggaaactcccgtcctagacccggtgcagggactagtgagcatttgctgcccttttgcttttgtttgcttgcctggctttctttgcgcgtagccctcgcacatttttggattgttttaagaatagttctttgaagtagaaatttttggaattatcagtaagagagtagcaacatgctaccgactagaatttagagtaatttggaggcaaggtttcatttttaagtgtattttgatcatgctaattactcataacttaagtcacaacactttgttctttaccaataggctatgcaaatgagttgaattaattgtagaatgatttaatgtattgccatatgagtgaaatgggagcttaaattaaatacgaaggtacatgttggtataaagatgaaaacatgtcttctagatatgaattaagttttgcaagttgcagtgtatcctcttgaacctatttgtattgaatggttcatacaaatgaaaaagaattctagattactatttagcgcatatttattcatagcatgcaccttttcatataaaagttttcataaaaaagttcttgatgaaagtttcttataaaagtattcccataaaaccttttcagatgaaagttttctagttaaatgtttttcagatgaaaattttctagatgaacgttttcagaaaaagcgtacgatgagaatgcatatgcgctaaatagcagtccttatgaaatcttggttctccgtgaagccgagttaacggtagtgttaaaccttcgataagttttaccactaccaattttacatgtgctatggttggttcgaagttcttttgctgctgaatgttatatgtgtcgttcctataaaatccaaggtttcatttgcaaaaagagcaatagagcacgcagcacacactccctcttcttcttcagcaattcactccagttcactttgccagcttgtctctctgattttattatccttttcttttcctcacgcagggaaaaaggcacccgttgtacacctcacctcacgctcaaaggcaacgcaagcacgcagcttttctttcttggcctcgcctcgcctcgcctctgcccatctcccctcccactcgattcctccacctctgctccgaatctccctttccgcgtgcgcgcgtcgattcctccgtgctctcaccacccgatttgggggccggtctgagatggggcagtggcactgaccggaggaccttcgccgacgtcgtccatggcgcagccgcagaagcgagtctacgaagcttggaaagggaataatgtaagatcctaccccccctgtttccctcacatacctctcttgttcttgctcgcgcttcctcctcttgagctccgaatcttgggtggacgattggtacagtctctttctcgggaaattctgtttcttgctgcctctctctttttttgaaagaaagaaagaaaaaagaaccctcttggtgcttccaggtatgagcagtagtagatttgctgggttgctctgtctgtgctgatggcctgttgcatatgtcagagtgcaatgtgatgtgttgctgcccctgacaatggttggttcgcttcgtatatgcagaggttcttgtttggtgggaggttgatattcggacccgatgccaagtccctgctcgtctctgtttcgctcatcgtggtgcctgttctcgtcttctgcgtgttcgttgcgcggcatctccggcatcagttctccacctacaacgcaggatatgcgattcctgcggttgcagtactcttcatgatctatgtgagtgcaatgtcttggtttggttccttcaggtagtagccacatggtactgcattttgagcactcgactgaatacggctttgttgtccttcttttgtgtgcatttgcaggtacttaccttgttgttcatcacctcagctcaggatcctggcattgtgcctcgcgcatcgcatccaccggaggaagagtttgcctatggcaatccattgaacgggggcacaccaggcaggctgcaatttccccgtgtaaaagaaataatggttaatgggatgcttgtgaaagtaaagtattgtgacacctgcatgatttaccggccccctcggtgttcgcactgttcaatatgcaacaattgtgtcgagcgctttgatcatcattgcccttgggttggacaatgcattggacaggtacaatttctctgtctgctaaagctatttcagctttcatgaaaattgatgagctcaacagaatcattaacttgttacatttatcttgacaccttagagggcaagtataccaagagataacccatacacaatatattgtagtttctggggttaaatttagttgttttaagaaatgtattttcctggctttggcttatgcattcattttattaaatactgttagtaagtagcaaactcgggatctcacatgtatccttccaaagagctgagagagggatgataagttttatatggattgtgcaagatagggtcaatttcgttctggacgatggaataaacccatttgattgagcacaattattaataaatgggttaacatagcaattggagcatgtcatgattgttatcatactccatagaacaaggcatggttaacatgattgttgctgtctacttagggcctatttggcaaggctcgaactcctaaatttaactccgttcattttgtgggagcactccagcccactccgctcctttttagggtggagctaaaactgtttggttgggttccagctctaggagaggtggagctggagctggagctctgccaaacatgccttattaaagagcattagtcacttctagttaatggacgcataactcattccctatcgctgaagttggtgttctccttagacctttcatgcctgatcagttgtgcaaaaattgctgtatgatgtgcttggaattattaatgatctatttcatgctggactactgtggctgtaccttttttgacctggcttcagttaattttgcatagttctgctctttatatcccaatttaacaccagttggcaggacatgcttctgttccaacttatacatgcatataataagcccacagttttttacttcaattcaggggaattccaccatgactagtttcagatagtgcataacttcagtacatttaggaaccacacattttaggtattaatactctagtatttatggactagcaagaagctattaattttattctgaatcctgtaaaatccctgcacgtcacaggatcgaccaactgaaacatttactagctggaaaacatatctgaaattgagagatgctcacaatatcgttcttgctgcaattgttttaaggaatggttcttgaaatctaattgtaagtttgattcagtctgtctcttactgctttgtttctgaccattcttgtttcatttctacattgtgcagcgcaattatcgattctttttcctgtttgtttcctcctcgactcttctttgcatttatgtatttgcaatgtcggcgttatacatcaagttcctcatggaggagggctatcctacagtgtggaaggctttgaaacactctccagcatctttggtgcttatgatatactgtttcatcgccctctggtttgttggtggactcactggatttcattcatatctcatttgcactaaccaggttagttttttaatacaaagtttggtgatttatttgtctagtgattacttttgttcatgaacacaaggttttgtttgcctgcttattaaactgaatgttaaagagaagtgttatagcatgccaaatcgctaatatgataaatagggttgtgatggcttgcgcaaatgccgggttagaataagtgatatactatatgttctatgctcaacaagctccaggaaggtcaatttttaattgcttctatggaaaatgcaaaaacaacattatagccttatgagtttatttgtcatatgctcgagcctcgaggtctcttttcccattgaagtcatggtacaaatctctaatatgatgtttcaatgttgcagaccacatacgagaactttcgatacagatcagacaacaggcctaatgtctatgatcaaggatgtctgaataattgcttaggagtcttctgtagtaagacaaaaccttcaaaacacaaattcagagcctatgtacaagaggaagtacgagctccagtagttaactttggcaggcagatggaagaagagccagctggtggccctcgggcaaaagtagaagatgatcttgagatcggtagtgatctcctgcagatctctcagcggcgcaactatggggatgttgatcttgaaatgggaagtcaggactgcagtgagatggaaggcattcccaacgccaaacttgcgataggttctgaatcgcagattcctgcaatcggaagtgaggtacgagtgcggcactcgagctgggatcgtagaagtgggaattgggacatgtcattagatgtaattggaagaagtgcatcagatgtaattagaagaagtgcttctggccatgaggctgcacctccatttcaaacagaaactcactagtcagttattcgtgcattgagaagatgtgtcagaaacctgaacttggatttcaaggctgtttaactgatgatgacagtatgacacatacccagagagcaagaaagaaaaatgcacatgacgcattttgactttgactgccgtaattggtattttcaatcatttttcatgtatgaacagttactttagtcaaagattccgtgcggttggggtcacatatttgtgttttttttttctttttttgtgtggcaatctgatctcacagcgtcttcatgattctttatgtaaattactattgcatgatactcatccacctgtaattcctctgcagcttccttcaggaatttctgtagtgcatctccattagctttcattatgatcttttaccttccattgtggtcagtatatcaccttgatcacaatgctgtttgattatatattccattaggtctcaaacctctatggagttgaattctatcttcattccatatttggtacgcaaaataaatctaccgaagtcaattgtttcatgtgtaattgctattttcaaaatagggccacattctagcagaccaaagcatccaacccagggatcataattcataacactttgggttgccaatccaactggcaatgaccggtaagaggttataccattcaaatttgtagtgcaatcttgatgctaataattttaaaagactgaacaaacacaacactttcagaaaaaggaatttgttgaagaaaattagcaaacccgaaaaggctggataatgcccgagtttgatccattaacattttttgggaataccgatccattaatatgttgtcatctttgtttgcaagcatagcaaacactcactgcttttttttctagaatatgctatttcaatgttgatatgtccatttgtaattttgtggaaattccatatgctcaagggtgagtgctgcttcagttagctgttggattctgactactgcaaaggactctactggaggactaatccatgaattctgataatgccaaaccaggcgacttcacaattctttgggtccatttggaccagagcatgtgaccagtgaatgcttggcttttgcaacggctgtttcaatgagcttatgtgaaactcaaaatatcatgttaatagtaggttgatcttattaatcattggtgcactgatactgactcccacttgaagagttgctgatctttgtgtatatcaaatcggcaaagtccactcaacggtcagtcggatatatagcaagtcatatcattactttgatcttgactatatttgtgattaatgtgctgcaatttctgaacctggttggtttgatgcgctggcatgtcaagccgtggagcctactgggacccaaaaaaaaaaaatctgaaattggtatggtagagcaaccacatttaatctgcttgataattggaacatttgtagtcatccatgcaggtttgttctttgcttaagtagtactccctccggtgtcattttaattaacgttttagacaatgacacggtctacaaaatatatctttgaccttatttttctatatatatatatataataaataaatgtatgtttacttttattatagtattttgaaagacaaatctatgggcctgttcactttgatgccattttcaaccttaccaaattttggtaaagttgctaaaaaagtggttacatttagtttgctgccaaattttgataactatataagaaatcctgccaaaattttggcaataatgccaaaattttggtaaggttttttttcatcaaagtgaacaagccctatatatgttgttctagttctttaaactaaatattttctaaattattgatgatcaaaatattataaaagtttgactccaatcttgtccaaaatatcaattaatatggaatcagagggagtacagtaccttggaaagactcctatttagtaatcttttttactgctcattagggcaagtactataagcccctacatgttacccataaatttgccacgtaggattaggtgatgaggtggaggagagaagttaggagggagagaatgagccacccctcatgcaaggggcaacctccacacaatctctaagaaaagtacaagatgatatgagagtaaactaatattggggtttgtgcattagatgtgatatgttgtacttgttacctcttaattaatgagaagatgacgtggtttaaattagatgtggcacacacctccactataaaaattgcccttacagcatttcttttcatgcaaaaagattctgctgcttgtgctacagtctcatttcatctgtaggaatctttgtgctggaaagtcgtttcatacacttcttttttttattgaacgctgaccttaacgcgttttcatcatcctcaatcctcatcactcaccagtcatcactggctagctatgctttttggtagtgatcaacttatcattccatgaaagcaaccttcttcagagatgaggacttcacacactgcacaccgcttgctcgctctctccactgtccacttcaaaacaaattccgtctggttcgcatgtcaaagcttataaatccttcaagttggaatccactacagaattcttcaccattaaatagtaatagtatcaccctttgctcccagaaaacaccaggaggagcagatcgaggaaggcgaagacttcagcgttttttgtttcgttgactggtggaatacacttttgtcctctcggagcttcagttttgttcgctttgcgtctttttcacatgcatcgagcagaggacaatggtgttatccatgtggttgcgatctgtgaattctggcggggaatgtgggttgatcaaacagacaggttagcgttgaacgtggcattgatggatggatggatggatgggcatgtaggaatggcggcggcgcggcgctgaaggtcaagttgacttggttagttgggaggcattggcgtacattccttgggaggctagctaggtttaatttaacgggtttgtctacttcatgaacaatcgctagacaatatttcaacgtgacagagaggccaactcagtaaatgacagtgatcgcggaaaaatagcaatatagcataataatattcctagttgaaaacaatcatcacgctatctcgtgctgatcgttcaaaaataatagagctcatcaatataataatatattttgacatacttcctccgtttcataatgtaagtcattctagcatttcccacattcatattcatattaataaatctagataaatatatatgtctagattcattaacatcaatataaatgtgaaaaatgctaaaataacttacattgtgatacagaggaagtaacatagtagaatccttttcagcctactgtgttaccgtagcagaacatacataacaaaacattgctaaacgcttagcagctggcaatacgaacgcttagcaatttggtgttaattgcagcgctcctgcgtgcacaaaatgaagccaacgtaaacacttcgtttgctagtattagaggaagcctaatacactaattgctttagataattatacactctctccgttttttaatatataacacggataattttaaaaaattatgtttgcttgaatgtcttatttaaaaatttataattatcatttattttattgtgaattaatttatcattaaatattctttaagcataacttatatttcttttttcacaaaaattttagagtaaattgcatccacggtataacaaattgacaggtgggtgcgatatagtgcaagaacttgagaattgagcgtccgagtacaacaacttgatgagtgggtgtgttctagtataagaacttaacaatttagtattttggtgtatcaacttggctaaaaataaatatgctaggtgggtttttcacgatgtcaatatgccattacatactaatcataaggatattatcttataatattgaatttaatctttaagaattatactgcatataatagtacaatttacatccaattaccttctagattttgtttttgttttcttcaccttctcaaatatcaactgaaatataataatttctacatccagtttaattggctttcagttattagttattaggataaaaatataaatatacttatacaaatccgcgctagtatattgtcgaaattagtacttaaaaattgaatttatataaaaaatactccaaataattaagttgtcgcataattttttaatttattgtatcaaaatcgtaccgaccttataagttgttgcatttatacgatcacatataaagtttttgtactaaattgcacctacctgctaagttgttacactagaacactcatttctcaagttattgcaccaaattacacccacctaacaagttgatgcaccgtgaatgcaatttactcaaaattttaatagaacgaatgatagttaaaaattcaacaccgtagtatattaaaaacataagtggtactgtagctacttagctggtacttaagatcatgtacattagtccctgaggcgtagccctactcacggcgtcgactttttcggccgaagccgtctcccagtagagggccacgacccctctaagggggacacgcctctctgtattccttttcgtcgagccacggagctgggctccgcattgggtgcaccgaggctagggagcggctcgtggacaccgctccaccctcggattttccccttccacccctcgccctagtagatccggcggtgaagaggagcttcgtcggtgacgatgaagagggagagagaggcggtgacgagcagagggatagatgcggcgacgacttggagatggcgccggcccaccagatccggctgccggcacgcaaatctgcgcgccgctcgccgttgaccacctcaacaatgggcggagggggaggggcggagtcggcagtggcgcactcggccagaattagaggcggcatggtggggtgaagtcgacggcggcacggtggagtaggtggccctcctcatcaccctcacggtggagaggacgcgcaggtcaccgacgtgtctccagcggtcctccttgtcaccctcggggctgccggcgatgggggggggagagagagaggcgagcggcggtggcggcggaagagagagggagagggagtcagccgatggtgtctagacgaggagggaggcggcgatggtgtcttgggtggtgcggtgcgaggcgggggggacggcaacgatgacgggtggcgggagagagacgaggcgaagaaaaagagaaggggaggggtgacgaagaagaggggcgggtgaagaaaaagaggggggagagagagatagtgtagtcggtggattagcggtagggaagtaaaaatatacatggggcttcgtggctgtgacacctattatgggcaggagtatctctgctccgttgctttggacattgaagacactataggagtggcttaccatattgtagatgctcttaaggaaacaatttctgttggggtccttggggagtcctccgctggccccctgcccccttggctacgccagcatactttctctttttaaaagagtatagggaaggatgagcttcgcacgcatcacctgtgagatcagtttgttatgtgcaaattaattaaggacgcaatgatcagcatatgggacacatctagcatccacaccacaacagtacctcattaatccaagatagttgctcctttcttgcttttagagcacaatcgatcaacgcccatgcgagtgagccctcttgcttctcttgcccatgcttggaatttgataggaggtggcaataatcaagggccatctcttccactaaatgcacttcattggaattacaggtgtctcaattggagttacattattgggacatcgagacatgttcaaccatgaggcactgtacaatatacagtgttgtctactactccctccgtacatctctgtgaatagggacaatgctagaaagtcttataatataaaatagaggaagtatatactaatatgagtgctatgagacatctcactaactggtgttctattactttcgtttttaatataagatgcaactgatatttactcaaattttgactaataatgcctactacttatccgtctcaaaatatagtaatttttggttagatgagacatatctggacctgtccagattcataatactagaatatgtcccatctatgcaaaatttgctatatcttgagacaaatatagtagtattcatcaattacttaactaacaggaaatagtaacactagattcgtcattaaaaggattgtaagaatgtttagcatgtttatctacgtgcacaaatattttagaaaaactaatagttaaataaaatttgaaaaaagtcaaatgtattatctataattgcctctcacttttctgtgattagaaaactccatcaataacaaaatgggctgtgtttagatccaaactttggatccaaacttccaactttttccatcacatcaacctgtcatacacacataacttttcagtcacatcgtaccaatttcaacctaaacttctaactttaaaaggaactaaacacagccatggtttcaagagatagatgttcatgttgtagactgcttactagtatgaaaggcatctgcacagtctcctctaatgtaatatcagtccatagataggcccctcaaatcaggccttttgaccttagacttagccgcgtttgcaagtcttcatggtgcaatagctaaaacaaacagtagctttgtcagggataacgcatgctcgacacccatgcatggagtagcatcgtcaaaactcaaaaggaatgtaaaatgtagagtagtagcttctattttgtattcttaatttgtcggtgttaaaaacccaccaatttggaagtttacattattgctctgtcttgctgcaaaggtattattcaacattttagtacatttgacatgccaaccattgccatcagcttgtcacctcctttttcatcattgccctgagatgaaatgccctaactttgccatgtgtttggcaaaacctttgctttgttaattttccgaagacaataatatttgcgccttttgtagttttttagtgccaaaagtaccaattcaatctttaagtttgaagcagcggtagtgtgaaatcaatataactgacaaaatcaacatgtcgtttgacactgtcaggtacaaatcaatcttaaggctggtttgaactcttgccattggaggaatataaagcaacaaagaataaatcaataaaccatttagctcacgtttttcgtcgtcatcatgttcttggatcaaatgcaagtaatgcaggggccacactctgctttcagtgacaaaccatgcgatttttctcaacgatgtgatgtttttaactcaacccgtacaaatgtgattgatcaggcttgcaaaaccaggaagaactcaaagccgtttgacgaaatgctcgcgtgtggctgcttttcccaggcaggcatgcacgcatgcccctcctcgagctaagaaacttgaccccctcaaacctcccaatccctatgcactttgccactatctagaagctcttgtgaaatctttgtattaagcaaagttcagagttggaaaccttaatcacattgtggattaagcatgcagattagcctaagcaattctttggattaatcaaactgtggtctgacgtgtgtgcttttagtatagcgcatagatgcagattaggtcaagtggtcaaccggccgtcagacagcaaacacgctgccttttggaaattccctattaagatagtactagtactaatgctgcaatctgatctgagtaaattttcaaatatgattaaattacggttgtattgtaaagcgtttattgaccgcatgtgaccaccgactcctaattaagctatgtgctcaagcagggccttggcagagttcatgagttctgggtaaatcagcaaattaacaccacttctgtgaatatctagtcgaattccctaaatcaaaattgacctgtttattacttctaaaagatttcagctgagttgcccttttattttttttctgttttttctgcagacagcaagctatagcacctgtttgttcagttaccaacttttttttttcttgaaacattccattaccaacttggagttgcatttcgcatgcttcaggtgctggacaatgatgtaataacgacgactatgcaactaatcacaggccactacaccctatttcagtcaaaattgacctacctagtttttagaatcggtagaatctattgtacctgtagcgtgtgtttggtttgagactaagtgggatgggttccatctatcctagtttttttttggatgtgatggttctagttgtcaatttagtttgtgatatgggaatgtaatagctttttgtttggtagaagggattaaggtgggataggaaggacaactttgcacggacgttagtgtcgtctggctcctaacggctggggcgcatttagctgtgagcgtgggggcgaggagctcgttggcgcgagcggaggaaaggcaaaggcaggtcgtggacaagcagcggaggcaggtcgcggacaagtggtggtcactcgcggaggagaggcgggtcgtggacgagtgatagaaggcgaggcggctcccggaactaagagaagcagcggtcgagcggcggcagtcggtcgcagaggtggcgcctggcatagacgagccggcggcggtagcagacaaggcggcggtcggtcgcggaggcggcggtcgatcgcaagggcgacgacggtcgcggacgaggcgacggtcggccggtcgtgggggcggcggcagtcgcggaggtggcggagtgcgcggacaagcgtcgacggatgcggaggtgatggtgggtgtggacgagctgacgccgtgcgctcgtcccgggtgggacgagctcctccggccatttttcccggatggattggtcccggatctaagaggaatatttctctccaaggaccaacccatctcactcacccctcaaccaaataccctaaaagtgggttcatcccatcccatccttgcaaccaaacactaccctagtgtctgcagtgaaaaatatgctactagtactaattattctgtttttttaacagaaaatatagagggagctaaaacacgacagagtttagaggtcatggtagttaaaagttcgtggcttatttagacaccatggtatatggtactaggagaatatatataggtcgcttggaaataccaaggttgccatataaaccataaat

SEQ ID NO: 26023 - DNA, 8941 bp, Oryza sativa
ttgcaaaataccatcgtacatgagaatgatatgggagggcctagaccaatatatcattcaactcataatttttacaatggtatcgggtaaattggccctagtagggcaaggtaccatggcaagaggtggtaaggagacagggatgcttgatgttgtctaataagatcggtttagccatcctcgtgtctgtcgttcctcctgatcctaaacatccttcgcaatggtgagtggtgtacggttggcttatgttggctcacgatggcaacctagacattagtgggattgaacgtgataccgacaacgaccggtttagatggatccatcctaatggctagttctaccgccttttgggtgaacctacttcttttcctctaaattgtttatgggatgagggtgttgaaggtcgatgccaataaggctgcacgaaagggtcttaaagtcctcaagtagcatctctagatcttgggtttgactctccctaagggagcaaatttcaagcatgaataaaagagaaaaaaaacatgaggcatctatcacttcttccggtaaaaaaaaaaaaaccttggttgcaaagacactgtgttgacctattcacatcatcacccacaacggacttcatgtcactagtgtgagggtgtcatcgctaacatcatttacgctgaggcatttaccctcggcaccaaggacttgggtgccaagctttgggtccatctttaaaacaagttctttcaaagggatctatttacaaataatatttcaaaagggcccaaacgtaaaaattcactatattcgtgatttatctgattccttagtgctggaccagtaattggcttgttagcggtcacatactccctccgtaaaaaaaacaaactcttgctatgcactcatgtctagatacatagatagggttgttttttttttctgggacggagggagtactagttttcattgaacaaatattcaaatctaaacttttgaattcaaaaacctgttatcggcccaaaaagaaatggatggctaaagtgcatttttacagacccaaaaaagacataatgtaatacgttatagatatatcacaaatagatcaaaatgtataatgcaattatcaatataagcatgcatcacaaaatatgttgtacaatatacaatccaccaaaatataacaaaagatgaagctttaaaaatgaatctgtcactttttccttttgaaatatatatatttagcaacatataaccttgccagagaagataggattgatataaattcttttttgtttacggggatatagattcatattcgattcaagttattttgtaaacctttggttgactggtttggtttcaatccaaactaacttgaacccaatatgttctacttctcgcgtgcatcggacaattcatctcggaactaaaattctaagcactgttagtttcaagaaggtatgagaccgcgtgccttcgaaggactagttctagccgtcgtggaaaaaacgattgatgaattttcgattagcccggccgagaataaatgtagccaaattcgggtcaggacgacgaaattttgcaatctccaataccaaatgaagaaacttcgtggaccagataagggacaatactgttgggtgcatgaaccacaacgtcacttggtcgttgcattgctcggtgctagtttgaccaatgtcagcttaattaaatagtgggtgcagttccaaatgacgcactttgatcgccagttactagtaaacaaatgtcaattcggctacgtttatatatttagttatatattaattattttcaaggaagtagatcaataacaatgtatataagcttgaagtgcggataaccaaacttcctacttaattagaggccgatttggatggatactaattcaaagtgtgtcatgccaattttttaaacttaaatagtataattgggatgtttagaattggaaccaaataattggtattgctgatgccctattttatcatattttaaaatgttactttaaccatattaagacttggcttcatactgatagcaaaacaatcagtaaactgcacgacgacttaagtacttttgctatattaaaaatagtaatactaaaatttacctagaatataatacttcatccgtttcatattataagactttctaaaattgtccacattcatatatatattaatgaatttagacatacatgtatttttaaattcattaatatttatatgaatgtggacaatgctagaaagtcttataacctgaaacggaggtattatataaaataaccgtagtaattaattagttaaatttcttacaatggaacctgtccaccggattcgagccatccatcgatctagcaaattatcgctaatctattagtccattctcaacccaaacactagacataatttccataaactccacgtcatcaataaactagtactagacattattcttccaatgcaaacatcatacatacttaaatttaatactacttatctcatataatgtcttggatgttgtaaaccatgtctcatgcaagacatgatttctttcgcttttctcatttattcatttgccacatcattttttattctaagtaacagtttatttaatgctatggacactattctagtcattgggttgggaatgaacttatgatccagataactacttataatttatcaactataattaccgtggttaattaactgatttttgaagaagctagcggtagcccgagtgagaccgagtctaatctgaactgcacctttttttaggcggcggctatctgaattctgaagcgctgaacacacatgttttcctttcctttttcacagtcgatctgtgtatatatatataacagtcgtctcgtccgagtccgcctcgtgcaaggaattaacggatcggacagcactctgaacggctcgatcccagtaacaatttgagcttttgattttgatcagtgcgcgctagctacagtgcactcgagcgccggcattgcctctgcagcagccgagttaatggccgaccaacgccggagatttcgcggcggaggagattggcaggcgagcgtcgacgatgtggtggacgacggtggcgagctcgaagccgcggcggcggcggcggcgaggggatcggtgctgtccggggagtaccaggctcaggagatgtccacgatggtgtcggcgctgacctgggtcgtcgccgccggccacgacgaccacggcggcgggcagtggtctggccttgtggacgtgccggcgacgacgctcgccggcggcggcggcggcgactacgggcatggcgcacaggggagctattattactatggcgcagcgccgacgtcgacaccggagttcgtagcaggtgaggatcatttccttctcttctattctttttctattttatttttaatcttattaagaatggttgcatgcttgcatcattagcaagttaagcaacagtttgcacgtcacccattcgcacttacacgcttttgcttttttttttacccattttctttttctcgacgctcttcgtgtttagcatgtgttactcatgttgcgtggtagaatcaaattaaataaaggtgtttatgctaatattgtcccgtttcaacgaatattttgatttggttccaacgagaggagtgctacgtgtcgacacagccattgaattttatcttgcattgaattttatcttgcattgccagctaagctaaagcttattcattcatctaaagactgcatacttgaaattttctttattcagcaaagaacaatggaacagggcaacttgccctgttctgacttcaaacccgattactttgtacgattcttcgaagaaaactcaaagatcatcatacaaaataattgggaatattggttaatgatgaaaaccaaatccacattagtttgctcgatcgatatatatccactttctctatccatttgaatgagctagctgatgctatccatgttcgttggtatttgaaagcccgactaattaattataattagccggccctacaaatctgcaattgcttacttcctccatcttaaaaaaaaatctaaaactgattataacattttagtacaacggatttggatagagatatatatattagtactggaggttatttttatatgggagagtacctcgggaaaaaaaaatctgcaattgtgcacaacatatacatgcaaatgatctacccgttgcacctgcatgcatggggatgtggatatttatgaaaaatgggggagaaaaacaaaatggcaagcaaagctcagagttttctctcttccaaaatttccaacatccaaaagtcccatcatcgggccatcgtacacctgcgtgcatgtggatctcaccaagagaaatgattagacaacttcacatcaatttaactcttccaagatctcaccaagaaagatggttagacaacttcacatttaactcattccaaaatttccaaatacccaacaaacatactacatgttccataaaaaaacccaattctaactatgtatctggacatacatctctccatgttcagtctggattggtcttttttgaacagatgggtacgtactgcgtactccctccattctcttaatttgttaaacgataggtatacatcaaaatttaagcttgtttagcagaacacggaaaacatatttttccatgatattagttggtttttcatctactgaaagtacctccaaatattttaggtttaattatcatagaactagagataatggtacatgtataggagaataagtcatttacatataaaacaaaagtaggaataaaatagcatgcacaatttcactaacactggtcagtaaaatttccggccttgtgacttagcaataaccatgttctccttatgcttttagtaaaagctgggccttgtgccttttctccaaaataaccatgttctccaacaaacaccgctgcacgtactaaaagattaattcttacatggtagtaactcttacgaataaggctctcaattgttcgattttactaaacgggatcgagtcataggaaatctagatttactttgccacatcagccttttttaaaagttaagaacaattttgtgcatatatatatatatatatatgtatatatattttccatctttaattagatggaacggccggtgtgatagcagcctaacagtacgcgctgcctaagttgcggttttgaatgcaattgttaggtgtcaaggagtggtaatgcatctggcattgctagctaagtagctatagcctatagggataggagagagaggaaggagagttccactttgggtagtggtagcaaaaatgtatacgagacgtacatatacgggccgatgcattgatgcgtatcagcgtactacgtatgtggtatttaacggtcaggtgaggcgtcaggatggaagaatcacaactgtgctggggaagaaagtgtaactaacggcgagggaagttgggcggtggaagtcgttaaatttgattaattagatccaaccgctacaaaaggacgatatatatcttatatttaggggagaaaatgtgtgcatccaaatttatatatacccaacattcatgcaacggaacaaaattgattacaagccttcccacgacgatgggtatatagaaatgcaatgcacaatattgcgcctaatgctaattgcatgggatataaagctgagtttgatttagcatttcggctgagctaatttatcgttatctgttaacacattttccaaactactaaataatggttcgtacaacaattttgcatatataagatttttcaaaaaaataaaataaatcattttttaagtttgtaacatttaatagttaattaatcacctcctaatgatctgcctcattttgcgtgaaacaaaatagcccatccgaactgcagtttcgaatgaaactttgatttcattgcatctaggtgttgaaaaaccttgtccgatcctacatgtatgctttactaatcaaacacaacgtaaataattaagaaaattttgacaatgtggatcacatgacattctttcttccacttaagctgaactatatattcaattcaatatactacttttctctattctaagatttcacacttaatcttatattataatatgtaagttgttacattgttacacttttctgtttgtttgttaatgtggatcaagcatttttttctcaaaaaacaatgtaagtatttcttagattgttgtaccaagtttatagagatatttacatatgttatttcaaacaaacaaactataacgatactaatttagtattataaatatttttttaaaaaaaaatctgatagatatagaatagcgattgtttatattttaaaatggagggagtacgttcttgcagctggtcgcaagctcgcagccggtcgacagagataagatgcacatttaatgcatggaagcaaagtgtcaaagtgcgtacgtagcctgcgtagcgcgagacaacggagtcgtcaaatatgatgcactatatacgtagagcttttctagcgctagctagcttagcttagcttcgcttcaattctcatcgatctaattcgctcgatcgctcgcgcgcaggagggcagcaagagcagctcagctccgacgtgccgcagggcggcgctagtctcggtctcgccatggacgagcactcgcccacatacaccgtcgaagcgtcgtcctccgccgatcagcacggcggcggcggcggcgggcggcggtaccgcggcgtgcggcagcggccgtgggggaagtgggcggcggagatccgcgacccgcacaaggccgcccgcgtctggctcggcaccttcgagaccgccgaggccgcggcgcgcgcctacgacgaggccgcgctccgcttccgcggcagccgcgccaagctcaacttccccgaggacgcgcgcctcagcagcccgcccgccggcgccggcgccggtggcgccaccgcagcggcgcagacggtgccggtggcctacccggccagcgcggtctcggactacttgcagtaccagatgctcttacacggaggaggcggcggcggcggcggccgttatcctctctactacggcggcggcgccgccgctgccatgagtagctctttggggccttactcctccatccccacctcctcggtcaccgtcgcctccgtgccgtcgtcgtcctctgccgcgtcgtcttcttcgggttacggcgcgccggcggagcacggcgaggcggtgcagtggaccagctggccggacggtggtggctggacctatccggcgacgacgagttcttggtctggttcgagccagtacccgccgccacctcggcctcctcagcagtagttctttcttcgtttcttacttcttccatggcaagtggtagctagagatcatactaggttctgaatattctcttacttaattcttgttgttttcttacttagagactactaagagcttgttattttcttccttagaaaccaagagtcttcagtttgtagctagccaagatgatgatatggtggtgttgtgtgttcaaaatgcatccatgcaagaaaccaaagaaaggtgcatggcagtgccactgttgtatttgttctttattttgatggaattgttcttttctatcatttcctttagtcaataaaacgaaaataactataatcttttcgcctgatcttgtaattagacatggatgagtgcagcaaaccacataaagagtgcaagatggcatgcattttttacctggaaaattgaatggagtaaaaaataatttatatgtaaaacttttatatctttattcttagtagtagtaggtttaaaagttaatgttaaaaataaagaataataaaaaacctcaaaatcaattctaatactaagtttcaaaatttaaaattttgactttatctgatataagccaacaaacaaaacgagctccactatttaagttttataattttcgtgaggatatttttgataattagtttctacatcgaaattaaaaggttacgactaacttttgcgtgtgtgtaatctttgcgaggatgatcttgataattagtttctaacatcgaaattgaaaggttacgacttaactttgattaacacatagagtatataggccacaaacccaaccaaacaaaagcaggtttacttacgcctcatgttctcacactaattctggcccactgagcagtctactgggccagagccaaacgcaagataagcggcccaaaacaatccgccggtgcccccgccctcgtcaaccaaccctgacctttgacctagtccacgtggaaaccgtagccgactcgtcctcgtcttccagctcagctgcagccggcgcccgcgcgggcggagcaaaccacgggcggggcgaccacgccgacgacccgcgcacacgccggcttcttcgtcctcttcttcttcttcttcttcttccacccccgcgacccgccgccgcccccgcgccgaagctcgtggcctcctccgccgtccacgtgaggcaggcagggctaactccgccgcggggcccacggagcagtgggtgggtggggcccgcggcccgcaccgtccctcggatcgcgcggggcccacctggggggcaattccgtctccttcctccctctcgcttacgaactccgctaccaaccgcttccttttccttctgctgctgctgctgctgctgctggtggggggtagacagcgaagcccgcgaaccacctctgtttcgttggcatcgtcatccttcaggtccacggccactagctaccatctagaagcttccggaagcttcgggaaggaagccggcccccgcgccgccttggcgggcctgcaatgccggaagagaaggagtacgcgcccgtgcccctccgacaggcgccgggaggcggtggaccccgaagacccggtcaagtcg

SEQ ID NO: 26024 - DNA, 24212 bp, Oryza sativa
aaaggttacgactaacttttgcgtgggtgtaatctttgcgagaatgatcttgataattagtttctaacattgaaattgaaagggtacgacttaactttgattaacacatagagtatattgggcacaaacccaaccaaacaaaaggagggttacttacgcctcatgttctcacactaattctggcccactgagcagtctactgggccagagccaaacgcaagataagcgggccaaaacaatccgccggtgcccccgccctcgtcaaccaaccctgacctttgacctagtccacgtggaaaccgtagccgactcgtcctcgtcttccagctcagctgcagccggcgcccgcgcgggcggagcaaaccacggcgggggcgaccacgccgacgacccgcgcacacgccggcttcttcgtcctcttcttcttcttcttcttcttccacccccgcgacccgccgccgcccccgcgcagaagctcgtggcctcctccgccgtccacgtgaggcaggcagggctaactccgccgcggggcccacggagcagtgggtgggtggggcccgcggcccgcaccgtccctcggatcgcgcggggcccacctggggggcaattccgtctccttcctccctctcgcttacgaactccgctaccaaccgcttccttttccttctgctgctgctgctgctgctgctggtggtggtagacagcgaagccggcgaaccacctcggtttcgttggcatcgtcatcctccaggtccacggccactagctaccatctagaagcttccggaagcttcgggaaggaagccgccccccgcgccgccttgccgggcctcgcaatgccggaggagaaggagtacgcgcccgtgcccctcggccaggcgccggaggcggtggaccccgaggacccggtcaagtcgccgccgcggcccacctcgccggcgaactccacccgcaaggtctagatcggtcttacccttccttctgccctcttaccccttccttcctcccggacggattaaagtattaaaccctaatggttgcttggatctggccgccgcgcgcctgtgctcctgctgcgttttgatttttgatgtccagtcttctgctacttagctgtttggattggaccgttgacctggccctcgcgttctgtggcttgatgggatgaacatggcacataatgcgttgatgcgcgtgttttatgcatggatttttatgtgcttcaaaacacttcctgatgatgatgatgatgcttacatagatttcgacatagtattggataaaatgtaaattctgactgttgtaaaaattaggtacgaaacacaaacaagaggatttaaattctcgagtgttgatgttggatagtttgtacattagtgtgtaggagaggagtgccctcttgccgtggacacatggatttaaagtttagatgattcttgggctaacggatcatctgggttgctgtattgacctatagttattactgcttctacacatttgggaattgtctactttagagcatgccttaaacactttctttttgtcataagcagggattgcgtatactaacagacctaaaatcttatgatggaatatgtgtctgacagtacgaatttgacaaatggcactaaatttgcccctacacgttggtccctgagtcaaactattattctaatgttgacacttctgaaaaatcacatttgagaattattacttgtttagttttgtatgcagtctgatcatgttttccatctttgaagggttatttcttatttgataaatattagattctgttgacttcactgggcaaattagacaacctggatccagaattattgtgttaacaaattttctgttttcacccaaatgagttatacttctcctgtccatgcatgtgctaaattatcttcaaaatagtagttctgtgcttaaccttgtatgattaaacaggcatgttttgctgttcttcaaagctgggtgtcaagaaaatttatgacaggatggtatgttttttcaacaattaatctagacatatcacaagagctaaagattatatccaagcctattaacctgttttatccctcttttgatttgcagcgtagttcttttccctgttgctgttacattcttcatcacctggtggtttgttaagtttgttgatggatttttcagtccactgtatgcaaagcttggatttgatatatttggtaactcttgcaaaaatgcttctctctggatatttgtacttattatggaaaaatactatactgtaatagttgagaaataacagtctgtatattactctttttttatatgtaatgcagttgtatattaacataattagactaggatgtttttttttcctgctggatttttttgtgtgtgtttgatctagacttgatctccaaatattaacttggatttgcaaatctgggtgcgaaataatgtggtttaggtgctttagtcaggtaatttagtttatgatgctttatttttattggatacaatgttgatcctgaactgctgacaatgccaataacaagacacttttagccattcatcagtatgtcgtgcaataacaacatcagctataactggcaaaatttcatggtttgttctgtgtggagtaataaaagttatgtcttgtattaatattttgttcatgacaaatggttatcacatcttttcaggcattgggtttttgacttccttgctattcatattcctagttggaatatttgtttcttcatgggtgggttcaactgtcttttggattggagaatggtttattaagaaaatgccttttgtaaggcacatatattctgcatcgaagcaagttagcactgctgtttcaccaggtgattcatacgtatatacaaatctatgtgctttgaaatagtctacccatgatatttctttttaactcattcatgtttttcacttggagtgacacattgacactgtttctgaaactcataaattatagttgcaagttgcaacactatgtttctgcccacttcatgtcttcatgttgtgtttttgtaggtattgataggttaatgtatcattttaatcattatattacaagtttccaactttgttgtaattcattttctcaaccagaattttttcttatttcttattgacagatcaaaatacaacggcatttaaagaagttgcaataattagtcatccccgtattggtgaatatgcatttggattcataacatcgacgatgatccttcaggtatttgtttatacatatcatgtgctctagaatgaatagaatcttgatggtttcagcctacacctgcctagatgattacctccagatgcctcattcatgtataacttccttgcttagcttagctgactccgagaaactttttgaatgtttttaatttgttgattttcataagcatgtgttcggttgctccttttctgtgtttccttgtttctagaatagttccctcactttgagggaagtggcaacgattagttatgttcatctgagtcaaaataatggtcacaagaaattttacaaaaccttgcttggccttatcttattagctgactattgaacttagagattatactagaagatagcttactaaagatttgctagtagacctatgcaaggccaaacagcaacacaaagcaaacatttgcagtcggaacagtgaaactgatgccttcgactttttagaaattggtgtacattttgatttagcaagcagcacaacaaatactgtacttggttacatattaattatattacagaggcccatattttgttgctctgtgcaacttcataacgccattattatctatgattgacactttttttctgtgcgctctgagatgatcatttaatattgctttacagactgacaaaggtgatgaagaactgtgcagtgtatatgtgccaaccaatcatctatatatcggtgacatcttcttggttaggtctgaggagattataaggccgaatttgtccattcgagaagggataggttggttccttttccaaattttgaagttaccgtttgtgtgctaggtcttttctcctatccaattcagtgttttatcctagtacatttctcttattcatctaatcttatgctctttgtactttttacagaaatcattgtttctggaggaatgaccatgccgcaggtgattgcagcaccaggacaaacaccccataagggtcagagcacccgtttaaacagaatgatgagtgcgtgagtacatcaggtaaaatctgcagatgcgatcaggcctgtaaacctgtcccaggcggttgccaatagatttctgatccatggccatctcaatttcagcagctgttctgttgaatatacatagtatactgatattgccacctagcttttgtaggtctgcccagagttgctgagagagggcaaatcggtggatgacaaagctggaacaaggtgattgagaagcagcattgctggtagattaggcagatcaaaatacgaaagtcagtgttgactagtccgcatcgcttaggtttgctcgctgagtgaaaagttgtgtaatctttcaatcacgctccaaatgtatatcagtactgtgaccaatagtatttatactcctttcaaaagaaaaaaaaacgatagcatttgtaccttgtttacttcactgcgtcctggttcttttatgcacttcaactaaggtcatctggaggctgtgtaccggtcttatgcacttcaactgaaaccaggttaacgcttggtcatcttgagcatgtttccatcgagaaaccaaaaactgatgtatcgtttggtccttttgagtcggttcatattgagaaattgctcggtatacaaacaagttaaacaaactgaaattttttttaaaaaaaaattgtcgaaattttatctgtagtggttatcgacgaaataactacgtgaacggtaattcgtatgtctacccctctttcttttctttttttcacttgctagttctggttagtactccctttccaatttgataatacttattattttggacaaaaacagtctcaaaaaataactttttatttaagactaatctatgtggtcaccttatttctaagacattttaaaagctatttttagttaaagattttaaagttaaataacagtcttacaaagaacaagtgttatcagcattgagagagggagtacaaagttttgtggtgtacctatcgggaaaaaaaatggttttgtgatgttgcactttacaagttctgattagtacaaagacagaagagaagaaattcgtaaacaagcaagaatggcccttctggcctaatcaaacacctccataataacacaacttttttttagatcaacaggcacgatttgttcatggcagggcagaactctctcttagaacagcacaatatccagacacaatccttggatgcctaaaaccaacaagggaaagaaaagaagcttaaaaccatttggtgcagctaaaggccccaacgtcaagcttgttcagtcagtctcacagcatggtacagcaaaagacaaagcatcggcctacaggagaagacagaacaggattcacatctaaagttcaatgctttcctaaataaaacttgctactcgtcatccgattagctggataagtttccccacgatgagtttctatatgctctgcatctgggagaatgagatcctgatcgtgttaccctccagcgaggtggcatgttttgatacaagggcttcggtcgcctcctcttcgctctcgaactggatgagcgcctgcctcttgccgttcacctcaaacagctttgtgtttacaacagaaccatgctctgaaacatggttaagaatcgcatcctccgtgatctcttgtgggagggctgaaatgtggatcattttggttggagcgcagcagtgacggtagttcttgattacattgctgttgaacctgttaagacttgaagtcgtgtagtcgtgcgcatcaggagcgcttgttatatttgggtactttgagtagttaacctcgagcttctttgcaaatagcactgccccctgtgaaaaacattggcatccaaaatgcggcaaaacagtaatcatacatatgaaaatagaaaattagttttactcaatgcaatgaagcagataattgcgaatatgagagtaccttcagataatgcacagctagctcagcctgaaacccatcagccatttcaacaagggcgtgatctggtttgttgcgcagtattttgattcggactatgttcccatatagagagaacagattgaaaagcttatcttcatttattttctgcaaggcagatgagttaagaactaagatgccaaggtttaaggccagtaacatcttgcacaaaagctttgaataccttataagttggcatatcaggcttaaactactcttgccaaacgaccactttggttcgttgagttttcactaaaggatcagtctggtagctacaattttctaaaaaatgacaaagatcctcactattcaaaactctggccaaagaatggcccaatcctaatattcatgccaacagcctgctagcttcaatcgtactcaagaacctctctacatgatgagggaagtgaagtctcttgacgagcaccccactaacacaccccactagagccatgcatctttgatgcttcctttctaagggctgcagagagcaaaatgagcatgtagcattctgcattcatttgctaaccatcttatggggcctgactagagagagggatgaatgcttgtatcagcaccttcacctatatttgaccctatcataacataacagataggcaacaagcagctgttttattccagtttggccatgaattgttgacttactgatgatttcattgactgggatggctcacataggtaaacacaattatacgacttactgtcactctacttgatctccacctagccgagtaggacccaatccacaagtgtagttggcataacaactttgattaggtcctctggttttatgttcaaaacatcagggccctcattggacttctttaacaccaaggaccaaagctaccttttagcaaaaactcagggaccaaagtgttcaattcaaacagcttaagcttagaagtttatgaataatgaatataagtggtaaggttaaggtagtcttgaacgatacagaacagatggagacttacatcagtgttcaaattactgactattagcgtgcaacgttcgttggtaccagtcaccccgggaggtaaagttccaccgaatgcagctgtgatcattgcagctcttcccatctgaatgaatcaaatgcaaatgtttttttatgagaacttatagggttattatccatctgcattttccacaaagtgaaagacatatcactggagactaacctgtgcatatgaagctgcacacacaaaaggaaattaaatcaggaacttttgcaaatatcaacaataaatatttgattcaaacaaaattgaagtgtgctacctcctggttgttggaaggcataaagaccacctggatctggatagccttgctgcttcaataattttcaaataataaaattctctatttagtttcagagcaaaaatgggtccatgaaacaagtgatgtgataacaaaaagaacataagcacactctaacctgagaggcccttggacgctgttctgtaggcaatgatgggtttgtgaaatccctgtataaaggatacaattgagagaaggcaacaagatgattaaaaaaaagtcaaaagaaaggaggagttgtgaactgaagtttaattgtactataacttttaaaggcaagtacaactccctaaaaattattgatgcttacaaattgtccaataatgtcatttgtaagtactaaggatgagaggttaattttacctagaacgatcattgttgtaatggacttgcagttcgcttagactgaaatacaaggaaacaagaaaataagattgagaaaaataaataaatttcaactaagactagtcatgggtcatactttgaatattgaatgtctagctggcagcaaccgtcatatatgttccttccctggaatattttgtttgcaagaatgaagacaccagaaatgtacacagggaaattaaatgaacaataaaaatattacatgcaaagcaccaaatgcatccatagcttcttggagtgactgatactggataagggcttgaaaacctgcatcaaacaaacaaaatgcaataaatatactttgcaagcattatcggtgggaaattccatacttatttatcccagtgggagatgaatacatgtactacctctgtcccataataattgtatttttaggatttgaatttgtcccaaaatagttatcacaatagaatactaatggtttcattaatcacttctcatttaaatttctccttattttaccctcaactaccctcacactcttacctatacaccatttaacaagggacatcatagtctttcttctcaaaccttaatatatgctaaacaaattagaattacaattattttgggacagaggtagtaccagtaactgaaaagataaaaaatatttactacaacagatagactaggccgcttggaaaaaatcatgctgtcacccacatttctttatggagaacatatgaaatttgcagcaattggatgagaggctgatatctaataatctatgtgcttcttctataattgagccatgttgttgcttccattagtactacatgcatgtaaacatctgttgctctatgatacgcaatgctgcatctactgtaatcaattgatatgcactacaacattattgctgcaacagttggcataaatgcttttgtaaccagggtacagcgtagtaatacccatattggaaattattgagtttataaaattgataaatcagccttgccattcacatgcatctgctaagtaacatccatatcaactatgcatgtgtgtgcggagtgagagagagatgggggaatctgaccagctgacttctgaaatgtgacaatcttctccacatatccataagctttgaaaacttgatgtagaacctccacagttataggatacatcatgtggtgaatagtaactaagaggattcggttgggttctgactcctgaggcccagcagcaaacaagcaccaagacaagagagaggagagagaagaataaatagagaggaatacgcagatctagttgtaacaataagatacagtagatacggtatgcaatttaactcaactatctgaaagatgaggagaaatggaatagctaatcaccctcccagttctgacacaataagtgtgtaatataaaatattcaaagtcaaatattgccacacttctattatgagcagtgattcaagtttccggttttcgcagattaatattgttttctggctctagaatacacctatattgcattactaactttaggcatcttaaaccatgccatttgagaagaattaaaccattagcacttaagtgctgcgattggagggaattaaagattccactgagtaaaccaacaatggccagcggattgtccatcacaagagtattgtgcaatcgaataaagacttgtgcatttttttttgtatccacaaacaagttaaaaatcataagtggtttaagaacttaagaatgaggaccttgaagaaaaattaataattaaaactcatgcagacttcagagctcaaacatgacattgtccacctttggtcatcttgaaaagcttaaaagtaagtcctaaagttcagaaaggaaaaatctagtgttatatagatgtgcgtgcatacctgatctgaatttcgtccatgagagttttggtcagtggtaagttcttggtgggacgaaaattgcatgtacacattccttcccctaaaatagcataacaggtgaaccacatgccaaatgagatgatttaaaatcatgaaggacagtaaaattatatgttgtgtaaagtagaatgtaacacagtaaactcagcgcattaacagtttaacacttgtcaataaaaaatcacataaaacagaacccaaaacctcctggcttccataagtgtccagaaggaggccatatttcaacagcagctaaaataataagacctatataaaaaaaactatcctttttaggagctacttgcatccaaaatcatcacatgaagagtgcaattaccttacgctaggttgaacagtactgtagtattgcagcgcactcactgaattatgcaagtcttgcatttggagaagtgcctgaaccaccagaaaccacccccaaaataaacataaatcagcacacatctacctagcagctacaggcatagcaggcaaaataacggataaggaactcgcctgattcttggcacgcagcatgacgatcttggaaacattgccaaacggctgcaatagctgcagcagatcagcctacaacaacagcaacaaagcagtgagcgaacaggccgtaaaggtaataaagctttcacagtaaaaccaaaccatctatctaggcacataataagcacgaaatccagaaaggagaagaaacaaaagatccacgattcaatcctccgtcacctcagcgatttcgtgcccgacgttccggatgtggatcaccttagacgggtccgccatcctccccgcaccgcaccacaccacaggtctacctgttaaccgtactaaggttaaggccaaaagagagaagcttccaaaccaaagaagagaagataagatttaaggcgaagagggtgcggatagagaaggatgtgaggaaggaagagggacgtccgtacggggtgctcaccggcggcggaagcagcaggacgccggcaccggcaccgccgctgctcgcggggggatggagatgagatcggcgcggaggcggcgggtgaagtcgcgaggagacctctccgtgggggtggaggaggccgaggacgaggagaggggagatcggctagggccggcgcaagcgcaagggagtggagtgagtcaggcccattacagttacaattggtgtaaaagttgttggaggtttgggggcactctgtagtctgtagcgggagatttgatcgtatactacagtatctcggtctctcggatgaactacggccgtttaaaaataattttttttgggctcgttcggtttggacgaaaaacaaaaatttggaattataaggattaattgttaagtgatattcagttcataggacatgtaagtacagaaaaatcgaagaaatatttcatccactcaaacctcttgaataatttattatatatggattgaaatttattagaagtattgttgggagcgctcccatattccaagcgccaaacgtgtatcaaccaggcccacctcaccccacgttccatcatcccgctcccaccgttatcggagtaaacgatttacttcgagaaaaacaacttctctggttacgatcccaccccacgtcccgtcatcccactcctaccgttatcggagtaaacgatttacttcgataataaaaacaacttccctttcgatcccaccccacgttccgcttcgtgctcccaccattatcggagtaaatgatttactccaataaaaacttctctacttctggtatatattctatttttcccgtacccaaccaaccactctcacccccacttcattttttccttttttttccggatctgaatcgatccaccatcccagcccacagatcggcgacgcaccatggaggacgacgacgacatcgtggcggttgatggcggtggcagccggttgatggcggcgcttgaggtgaaggcactgcttcaggcctcgctgccgcagcatctgcttcagatcgatgctgaagagacgtctggcgcatggcgaacgaggtggaagtcgtggggacgatgagttctctcagcaattcctaatgaaattcttgattttcttgcaagtattgtatacaatctatgattaattaaattctttatccttcttgattctatgcagtctgacttcgattgggttgagcactcatcttggtgtgcttctctattctcccttacatggcggatatcatgttcgtgatggtcaatcgatttggtaacatcggcaagaaactgtgatttgtttcatcaaaaacaacggcgacctccatctttggcttcgtcgccggatccaactcctactgaggtcgcagcggccagacttggtgctgcctcggctccagcctccatctctgctgctttgtcttcttgctctctctagtaggacaaaaactccattaagccatcatgaggaactggggatggcgtgtattgttgtgtgtgtgtaaaatttttattcttgtgcttttactatgatgtgcatgtaaaatctttattttttttgtcccgtgatttaggatgcagtgattcaatatataagtaaaaaaattattcacgtattatttggggtaaactaattaggccccagtaactccctccttatttatttttccttttttttccttgcttgatgcactcactataagaaatcatcaaccaaggctagcaataatgcaattactataagttaatgcaccatcaattttcatttacatcgatagtaatatgaatactacaagatttgatcaaccaatgttgttcttaatccaactactacaagcacatgtaccatcaattttcatttatgtcgacagtaactcgattactacaaggtttcaccaagcatggttgtcgttaatccaattactacaggcacatgcaccatcaattttcatttacatcgacagtaattcgattagtacaagatttggtcttagtttgttgcacaccatatcgtaactacctcgattggaaacatagataaaccaattacaacgattattttcaatagaccactgattttatagatctgtaattgatttaccctgaattcaaatagaactaatctacacaaatcgaacgtgggcaaccgaacaccagattttgcggactctggacgcgatgtgcggtgctcggaataatattccgcgctctagcgctcagaatagcgctaccgtgaaatttattatataggggctccttcattttttttctctatttctatgggttaaatttcctccaaaccaaataagcttaacttttgtatgttagatttatgggcttattttgtttggatcaatttttgtgttatcaaaataatggtagtgacaaaagttgctaaggttttagcactatcaaacttggtggtatacaatttgaactagtgtgtgtaaaaaatagtcacaatacaaaacatccatttgatactaatgaatttgccaaaaaaaattggtatgaaaattttggcttcaaaccaaataggccatatatacaaaagtttccttattttgagatgaaagaagtgttggtttactctcatctactaataacatgtggtgtcatgattgttcgacgatataccacgaggtgtctcccaaaattacttgacaaggtgacaatcaaacaagtatatatacaattcctcctatgagaataaggcatcaaaatcccgataagccaacataagctacgttgagtcgaaatttggaggaatcttaagagctagccgtcgaccacaataataggatcatttccaaccgacatagttgtatagcttaaactatggctttcgttgacatttcgtatttggtgtgtccataagacaatatatattagggtaaatagggacgtagctttatgggtaattaaggctatagcgatgctctggtgtcgttatagcatcgtggcgttcccggaagggcaaggcatcctccgccttatggcatgaactgaaggagagagggtaagagcagagggaaaaggtttgttgtcttgttgttggtcctccttgacgtcgccctatcccttcttgtgctgatggggagtagagggattgctgttgttgtgccatatgagagagaaaaggtggaggagaggaggccatcggttgcaagcctgcaagaagggagagatgataggaggatggtttgcttgctgcatcatgcataggaggaagagaaagatagatacgaggagcatgcagcagtgctgcacaatgggggatagagatctggatggaggtcaggtggtggttgctggaactgggaaggaagttgttgggtagggttaaattgctccctactaggtcaagagagggaagtagtggtcccaggctagataagtgcttaaatgggatactgttgggctagactgggataaatagagtaccctattagcatatttacattccatatttcttattctttctattatttcattgcacgtaaggtattgccatgccatatgccttgtcgctatggcggtaaggttgtggtgggtcgttatacctcgccataccgccttactaaccttgccatagctgtattacctatttctaggggcctagatctataatatgtatgttgcttccttgctacagttttgttggcatcttgcttataataagttgtgtcttctctggcttaaacttggtatgaaattatcaggtaacagtgttgatcactccttacactcaatcaaattatttctcgattagcaaaatgcatgtgcttaatttataaggaaggcatatggtccaattctatctaaaggaaatatatatataataagtttcgtcttctctgacttaaaaacttggtacgaaattactaggtaacaatattgattactcttgaactcaatcaaattatttctagatacaagtgaagataattttaattgtttgcattacccatatgagcaacttcgaagatcctttgtatacactacccatatgagcacctccaaaaatctaagacgacatatcttgacattggcgatgtcaccatgagtgtctcgcgatgtgaacgtcgcctagcactgaaagaataattagctataaatgtaatctcgtgacgtggacgtcgcctagcactgaaagaataattagctataaatgtaagcacccatatcaaatctaggatttatcccgtataagctatttcaccacaagaaaactaaccagttaaattactctcacttcgcgatatactgtacttttagtttggagttcacctcgaaattcactaagtcgatatattgtccttttagtttggagttcacctcgaaattcactaagggtatggaatataatgttgtgcgggtttccaagtaacagtgtgcctaacatcaagttatgttttcctggccatattccaacttttggctttttcaattctaagctaaaattttgtcctttgattagattagaaacatctaggccgatgaacaacattcaccgaataatacggaagctagagctgccttaacgtatgcgcgtgtatttacgttcaaccgggaaagtcgtgtctgcgtagcttaggcctctctttcccccaatgttgtgaacttgtgttcttctgcagatcaaaacctggagcgagcatcgatctagctagctaattgtaaaccacgatcgaggtttcgattaaattcagtgtaaccgcatctgcaagcatgaacactgttagttcgttttcgcttgtgccttgcatatggaaaccagatctaagatcacgaacatctcgtcgtcgcaagaaacagataaatcgatctcgagtatagcatccaatcatccatttttacaaaaaccgattgctatgatctactgcaactagaaatctacaatcttgaatcttgcatacctctaacaatcgactcaatgatgcgcatcatgagctaccatttcttgatccttagctcgagcgacatgcttgtcacgtactacttgtgccgctcgatcgatcaccttcccttgccggccaccgccgcgtcgttcgccgccctcttcgtcgtcgtcgtcgtcgtcgtcctctcgccatcctcctcggccgccccggcgacgacgacgacgacgtggtcgttcggtctcctcgtctccctgtacaccgccgccagcgaccggaacctgggcctccgcctcgcctccccaccgataaccacctcgtcgatgtcgccggcagccgcggctctcttcctgctgcagctctccacggccgcagccgccgccttgcggccggtcgccgccttcttgccgcagcgattattcttgctcacgctgtccgtgctcctgctctccgactcgcccccgccgccgtcgccgctgcagcaaccgctcagctggatgagctgctccgccgcctccatgtccagctccgtcgcgccggccatgacatcaacctccacgaacatgcccgatacaggagatagatcgagagagagagagagagagagagagagacgacgacgacgaaccacggcgaccacaaatagcccctcgaggaggatcaccaccgagccgtggatggcgcggccagccagaagcttaaatataggattccgccgcgtagcgggagagatcgatcgatcgaacgaacaggccgagggtgaggaggtgccaaggaaagacttggaaggtggcaggaaggagacgactcgtccttgtcgtgtgtcttgcctcgttttagcttttgcttggactcttgtattatcttcagtatttgccttggctaaggcgtgtttttttcaaggaaaaaaagcaagaaggttatcttatacttcctccattcaaaaatatagacttaaccatccttaacctaaaaaccaaaaaataattattttttaaatactccctcatagtttagatcaccctaataaatataatgtatgcacccaatacaattaaatatcttgagaatagaggatttaaaaaatgataatatagtgaaaaaaaagtgctagtgattaataagatatgtaaaacggagggagtgtattgattgagaaggagagagctaagggcctgtttgagatgagaaaaagaataaaattaataagatatgtaaaatgaggtgataattgagtattaattatcacaaccttgaaaatagattaatataacttttataaaagaaacataccgtttaaccgtttaagaaatgtgaatgtggaaaatgagagaattttcctctctttctacttttgctgaatgcagcctaagtttagtatatttgtcttggcaacaactctctgaaactcgaccccgtccgattacagaagttgaagccataaccgtgtaaaaacatcacgaattccgctcaattcgtgtttcttgtatatatttgattttcattggaattcaaaggatggcggaagcaaccgtagtgacgggcttgatcaggacgcgtattgtgtcggctgctagcagtggacggaggagcacgtaatagattacattgaccttgaacggagagattttggttagccgtgacggcgaatgaataggtctaaatctctcaggttgaagtattgtcatgatcgtgtactgtacatgatccatttgacgcgttgcaatgtatactgtattaaactatagatcactttcacttgggatcagtagtgcgtgatactgtatacatacaccaagtcagaagtttatgctagtagtactacgtcttaaagcaagtcagaagtcatcagcaagttcagattggtcagtcacactgtctgcagagtggagacgatgagaagtgcacatcaattgctcaatggaccagaaataatggagcaactcatatgcgaccaatcaattcattcccaattgtttcatcaattgtagcctgtggcgatttgcacggctgtttcagcacggcagaaaccggatttaccgtacttggatcattgacccaatacgcaatcatccagttgcatcaaccaaaaattccaggaaacagtcatgtactgcgtaggcaggaagtactgttgctttcaggtcagttagttaccaccagctagcagtcaagtaatacaggatagcagagccgtggcaacatggcatagatgatagatggtagaaccagagcaccgcgcacaagccaattcagcagtctacaaattattttagattgtgcaaaaagatgaatgtgcctttacaatatatgtactatatatattctactgcattctactggagtagtaccctacagccttacgacttctgcttatagaaaaggaaaaaaaaatcatagctgaactaaaagtcagcaacaacgacaacaggaacgtgtaactaattctgtatgaattatgatgctcaaacgggaaacaaaactcaggattagtagcatagcgactattccgcccttaatctattgcgatgatgaggaacccaacagagacgtacataaggaagacaggatatagtgccaacgcctttctccttgggttaacagcagcactcatgaatggatatgctgcccaggagctccaggccaatgtaaccactactgcaatgatcttcagtagtacattatccttcagcatgcaaatcaaagctccgacatccaaagggaacaggcagtatccaagaagactcaggctctgaaagaagttgatgcgcccaccctacaatggagtgtttagttattggcaagaaaagaaaatccgttggttctgaagggatttgagaattcccaagcaagcatatgatatgagagagtaaaaataccaggagcagcacattcaatgtgagaattatagcaccagcagctagtacagcaaaagcaacagcaaacacttcagactacaaaagacaaagcaaatcatcagaatcagcaagtgatatatcatgtcatgccaaagaagtagaacagcaccctcaggaaattgaactattgaatatccctggaatactggcaaatatgttaaatctctgataggaacatttacaaactacaaattgtagagtaaattgaaatagcttccttctaatgagtgtgctttctctgtgttactgatggaacgttgtacaagcattcaaatgcacgatttactaaatatggttcttattgttgcatccataattttacaacaggaaatgtattaaaaatctaataagaatatctaaaactacagagtgctgtagaaataggacactactttatcctaataggggagttttctctttgttacccatgaaaatttgcaagagcattcaaatgctcaagttactaacagtggtccttattgctacatccagaaattttcaatagccaatcctctcatactgtttgtcaacacacaccttacataagaacctggtaaacattataatctggcaaaaccaaaaatatactcatgaatcagacaaatatccacagaaaaaaaaagatgatacttcttattgatgcacaaggttggaaatgctatgtgaaaataggagtccagagattcattaattatagactggtccccaatactttcttccagtgctctaaagatggtcctaggtggcactaaagcactaggaaatatcctgttgctgcagtttttgccaaatcagcttggtaggcaccagtgctgtctaagcaggttagatgcacacctaggcaggctaggcatctttccaggaatacaactcaaatgcacaattcttcagactacgaatagtttcagtgtagacattgtattacattcatgcatgcatgaatggaggagatgtttatagatcaggaattgtcagagtatgactattaatagcacataatgtcccggatataaactctgtattcatcaaatttgactaggcaaactagatttgagttacacctcaggacttacatagtcaagtttagctcttgatctcatagtgaagatgactacttagctctactatacaaactgatccagcttttcaacattaaactaaagatgctggaatttatcttgtctgcaagatttagcatgatatgccttgtttgacatatttaatttaagatgtgtcatagtctgttgcagctacaatggtgcaaaacagtgagagagcaagctagccttccattaacaattttagtagaaatcgacacagccataaccattatacatgaatctgataaataagtacaacatttacccatttcttaaacttcatgacggaccaaatacttaagagagagatatatacagagataactgtatccagaattccatatgagatgccttggaagaagcatgtgcattagggaaattaggcataaaaaattctaggaggatgctccaatttctccaagtaattactaacacatggaaataacatttatgggactatctacacatctttcaacagaaattggagctaaaaactgtcagtttttttcccgccgcaggatacatggacaacggccaggatcagcaggtctctatgcacgtgctggttttgaattgtgcagcccgattaaatgattatctaagcaactgtgtactgttattatcctttaccaaaatcaatcaattttcagatggtaggattaacaaaaaaaatattattaatcataaaaaccattaacttgcaaattactatgtcaaacaagcttactggaaaacataacctaatttattttccatttgaaaattgaaaataaaaattacaaataaatctactcaaagttacattgtaactacactatagttacaatgtttataatgtaactacattgtaacttttgtagttacaccaaaattataccgtaattttctcttttggtgttatctctgattctcggtgcatatatagtcgtctagttgctcaagtattggcttgttaggcagcgaataatcaactcgtcggtttaagtagagaatacaatgctccagaagtccagagtacatacggagtatatcacatagaagtccagagtacatatcactgagatggaggtagagctttaatgattgccgtgtgaaacgtgaggagtttaattactgtacatatacaagagagcaaacaaatgcacgaatcacaacgtcatatctaagtaatctaacgaacgagaaaacgacaatttgttttgcaaaaatctgtcgacaaatttctagcagatcctaacatttattggatcattcaacggttagtcaagctatgattttgtaattcacagtcgtttgtcctgcaacatctgtaataactggctatatcttctttgaagcaaaatccagaatggattccattatctaaaaaaattcaatggatagtcgatgtattttcatctaatcaatgtgattttggtgattcaagtgctctacagttttacatagcattttaggttttgacattaaagggttggggaatcaactaaatctaatcgatcatggaaagagatcggacttcacataagaaggcagaaaatcaaatgcccagatgccgtggtaccttcttgacggaggctgaccaggagagggtgaggccgaggaagacgatgaagaagaaagggccccagagatcccagtcgcgcagcgccttcccggggtcctcacggaaagggtttgggaagacgacgagcttgaggttgctgacgatgcgagcgaggtcgcgcttgacggtgtccaacacgggctcggtgagcgtgttgggcggggggccgaacccgtcgccggcgatggcgaccgagacggaggaggggagcggcggagacgacgacgacgccacgcaggaggaggaggagaacggggggagctgcggcttggacccggccaccggaggaggcatcaggggggcgagctggagacggggatcgaggcccgcggagccgacgccggccgcgcggggagcaccgcgaccgcgtagggcggcgccgcgtggatgaggctctcgatctcgtccatgtccgactgcgcggacgaggagtggagcgggatggtgtcaccgtgcgacatcgcggcggcggtgtgcccaccggcggcgattttaccgtgcgatcgcgagtcgcgacggcggcggggagagagggtggagacgtgtgcgcgaatcgcagaaatggtggtggtgcgcgcggtcgtgtttttgtgcgacccgacccgatcgtgtttttcgctagtggggcgtggaatggatccgcggctcacgggcgacacgatgcggggggctccgtgcctccgtgtacgacatcaccgtgcgtgaaaccgcgacacacgggtacacgacgccacgcccggaagcacgaggtgaaacggctcactcaagagtttactgaactgtttgagggtgaagttatcgtcaccccccacaatttaattgttatcgctgttaccgcgaaaaccttatgattactatgagatataaggtgactttaaaaattaagttaccacatgtgatagtcacgattagggacgaaaacggttatcgaccgatgtcgtttccgtataagaagtaccgttttttttatcatactgttttttttgttatttataaattttgttttttttctaatttctatctacatcgtattaatatcgatactgagtactaccttcaacccaaaatagtatttttcttgtaacgtttgaccattcgtcttatttgaaaaatttatgtaaatataaaaaaagataaatcatacttaaattgcttttgataataaatcaagtcaaaaacaaaataaataataattctataattttttaaataagataaatgattaaaagttataagtaaaaacataataaaacgataagtattttgagagggagatactagtttaaatggcaagtatgataccgatttcaaccgttttcacccctacccttgtaaaggacctcagccgcgccgataatccgcggccgcgcgcggggggcctcgcaaaaacacaaaagcacacgcacgccgcgcacagcgcagtcactcacactcgcggtctccctccctccctccctcacgtcacgtcacacgcgtcgcgtcgctcgcttgcttcgccctcgtgtcgagcactctctccctctttcattccggctccaaccaaccaaccaccccccccccccccaccacggcgagagccgccgtacagccagcaagctgccgcgcggcgcgaggtcgccgaggctcgggggccggcgggcggatggcgtcgtcgagggtgatggcggcggcggcggcgtcgtcgtcgtcgtcgcccccgcccccgcccccggcggcggccgcggccggcggggccgccgatctcgcgcggttcaggagcaccagcagcggcatcggatccatgaacatggacgacatcctccgcaacatatacggcgaggccgcgccgccgcctggggccgccggctcggccccggccccgcccccggcgggggaggcggcgggggcccccgtggcggaggtcgccgcgcggcggacggcggaggaggtgtggaaggagatctcgtcctcgggagggctatctgctcccgctccagctcccgcggccggcgctgcgggtaggggtggcgggcctgagatgacgctggaggatttcctggctagggaggatgaccctagggcaacggccgtggaggggaatatggttgtggggttccctaatgtaacggagggtgtgggtacagcaggaggaggaagaggcggcggcggcggcgggagggggaggaagcggacgctgatggatccagctgaccgcgcagcgatgcagcggcagaagcgaatgatcaagaaccgcgaatctgcggcgaggtccagggagaggaaacaggttgggctggattcttcagtggggagagaatttgatgcattcatcaagtgggtttggggctgtttggctttgcacagtcatgagttcagaacatgatgctttccattttgttctcaatgcaggcgtatatcgcagagctggaggctcaggtcgcggagcttgaggaagaacatgcacagctgttaagagaacaggtactgtttacttttgcgtttttggaaatgttatctgtgaaatgttgaaatggagcatggatacatcaaccaattatactcatttgccgctttattatgcctgaactctttctggtagtaatttttcccatgttagataactgcttagtacattacattatttcagtaaagcaccagggcatattgggataaaagggacactgacatttgaactgtcagcaattcaggatgttggtgtgttcaaaatataaagttgtcatgcatcttaggatggtcgctatataatgttagtgtttttacagcatgtaaggcaatgcttgatccatggaaattcactaatcaaacagaaaatgtattttagtattaatatttcagtaccaaatatgtaaaatctttcacataagtaaaata

SEQ ID NO: 26025 - DNA, 2229 bp, Oryza sativa
agtttatctaattttaccatctctgttgaattgcaggaggagaaaaatcaaaagaggcttaaggaggtaagtttgattgtctaacataattgcttctgtatcttttttactttgaaacttgatttaacatctgtatggtacagtatcataatatgtccttaaaagtttcattctgcttgagagctgagacatttaattgagttgcatatatgtttccatgtttaaagtcgtagtgtggtttattggacatttaatacaatcttttggaaagcgtattgcagaacttttaagctttttaaaatgaaggcagtcgttatgtcaaattacatgcttccttggccattttgatctggtttttcttacaggagctaacaagcttaatgtctccatcggtgtttggtgaactaaataattaatgcactgattaatcaagtttatctgcacactatgtcagcttgcttgggattctttatttcatgtttggtaatacatgattcaaatagttttttgttatttagaagtggtccgtccagcaatcctgacaactatttctcacgacaacactgcttgtcaagttgatccacccaggtatagtacaataagttatcattttgtccctaccattgggggtggatggcgcttgctgcatgcatatgacataatgaaaatggtatcacatcttctatataacaatgtttgcagcccaaatctagtacattgaggtgttcatatagcaaatgtatacacgataaaagtccatattttctcccaatctaatttctgtgttgtttttaaatttattttgctaaatttgttgtttgttatttgctgcataagtatgtagtaagcaaaacatgccattttttttactttatttctcagaaatggcacgtgtttatgcagatcaaggaacaagccgttgcagttgtcataaggaaaaaaacacaagatctacgaagaaccaactcaatggaatggtagaagtaacccaatttctgttgttactctcttacagctacagagattctcccgttttctgtttcccctagctgatgtttcaggcgacttggtagaatagtcaaggctttcaggtgacatgaaatctcaaatgccatcagaaggtgtagctgtgcgtgatcaaaatgtcacgccattcagaattggtctgcgatctgttatttatttgtcatcaggctcatgcggctaactgtgtgtacaaacaagaataagccggtttacatgaaaggtagattaatgttacagatctgagccacctgtgttttgagtgtgtttctcttgtgtttccactgatgaaaaagccttcgatttattcttcatttcttcaaatataaaaggaaaaaaagcagtgctgtttattagctgatttgatttgagctgcttagatgtggggcatccgggcatatcacttcattgggctcgatcgtctcgtccattgtcaaaacagtagagagcatctttccatttagaaagttgcgtaacggaaattttcatcagaactggaaaaggacagcatgagtacgacagtatcggttattaaaagggacagcatgagcatggaaaaatggtatagaaatataaaaagttttagaattggtcacgtttattaaaaaataggcaaaattaaatagcgagaggttgtgattggttgagaagtagagataggtcgaaaaagtgaatggtaaagggttgtaattggtaagtaggttaaaataaatagaaaaaggttgtgattggctaagaagtgaaaaaggggaatggtggagagttgtgattggttagaaagaaaatgttggtggagaagttgttatattttgggataaatcctgagtcctaaaagttattatatttgagacatactcctgttatatttgggacggagggagtacgctgatatttaccagtacaattcgcctgcgggcctaattggcactcttggatatatactccatcccatttgatcatcctctaaatttgttgaggtcttttcaaattaatcatcatctaactgatatctatttgtttattcgtgcataaataaataaaattgttacgttttgtttgtttatgtgtgcagagtaaatgcaattatagtatgtctattcgtttatccgtgcataaatgacatcgtcgcatgtcttgtatgcattcaattgcacatttgcatacccacatgtatgtagagcatcttatcgatgaggtttaatttca

SEQ ID NO: 26026 - DNA, 30274 bp, Oryza sativa
tcgcatgtcttgtatgcattcaattgcacatttgcatacccacatggtatgtagagcatcttatcgatgaggtttaatttcaaaaggaatgtttttttttgccttggtctcgacaccatttgcaaatatgatggtcaaattgaaaagagggactattatattccaattcatttgcaaattttaaattttacaacttcattttaagaataatttaagttaattttgtcattttgttgtctactctctcgtaatataactacttgtagtattcaaaatttactctacaatatagttacttcttcgtatataccgatcataaatatttcttgtttaatttctttacctatttcatctcaactaatcaatcacaactatcatgtatttaatttcatctctctctcctaatcctggtaaaaaattttcagaagtgattatattttaggacaaaaggtgttcctctctgttttttttaatgatagcgaaagaaatatgtactccttatgtttcatatcataagtgttttgacttttctcttagtccaacctttctaaatttaacctagtttataaaaaaatataataacattttctatacaattaaaatttattcaatgttatatctaatgaaactaatttggtgtggtagatgtgctagatttttttataaacgtagtaaaacctaaaaaagtttaactagaaaaaaaaattaaaactacttataatatggaacggagggagtataaaattctacctaaaatttcagttacaattcagaatctaaattaaaaattacacttgcttgttggtggtaaactgctctacaaaatatatatgaattagagcaactccagcaaaaccctaaacgcaccccccccaaaaaaaacaattttggagttaagagtcgacagcgaggcgcttgtggtgacttcgtcaatctcaaggatttactggtccagtcttcaaagatgctcataggggtagaatttgtgtgcgtgtgtcggtgacatgggaccgggagtatcatgacttagagacttgaggcagacacgatcacccacgtggcctaaccccctcggggggggggggggggcgggcccgagggtgatatggccgcccttctctttgtctccccgaggggtcgggcccgagggtgatatggccgcccttctctttgtctccccgaggggtcggaccactcccgtcttggccccgagggccgaggcgccccgaccccttgtgggttttgcgccgcgtatatgaggtaggtgagcgtagcagggctcacctaaccacatttattgcggtttggacgagcgcgtcacgccgcatgtaacgcagtgcagcgcgctcgtttatccggtctgtgatcagtcacagaccggtcagatcatgggttaggtggcgacaggcggtctgacgcacgcctcgccccatcccgccaggacaagagcctccaagcactcgtccctatcaggaagcggcgtggtaagctcctggaaaaggcccgttggttccggtcagatatatgccacgcttcttcctaacctttacaggcaaaatattgtatgaagaagggcgaacatgcagattgttaaactgacacgtggtggacaagaatgaccgatttgtgaccggtctgacaatggtcatgtcgtcagcagacagccatgttcccacgtcgcgcctgcttccggcggaagtggaggtaggtatgggccgtcccatcagaaggtcattcggacggcagccatacaaatctctgtccattaatgaagagaagtgaagtaagaaagagagggagagatggtgcatgtggtatccccttgagatataaaaggaggaccttgcccacttagagaaaggggagaaaaaaggatcccagaacgattgggggctggctcgcactttgtagcttcttcatacacagatccaccaaaacacaggagtagggtattacgcttctcagcggcccgaacctgtatacatcgcccgtgtcttgtgtgatttcactctcgcgaactttccacagaccaagagcttagaacctcacccagggcccccggccgaaccggcaaaggggggcctgcgcggtctcccggtgaggagccccacactccgtcatctggcgcgccaggtagggggctctgtgagtgatcttctgagctctcgcactctttcgtgtgcgccaagcttttcctgttcagcccgatggccgaacaagcaaaggcacacaacctctctccgagtgttagcggtgacgacggggagccgaacccacgccgtcgagctcgtactccaccgccccctccacgccaaagtcctaggcgagaagaggcgctcgagagggttgaaggatccgcgacttcgacatccacgggtgatggggaagggcggcgagatggggagcgtcgcctcctcgtctacggcgacggcagcacgccccagggcgcgctccaagctgcgggcgcgctcctacgtcacccgcccattgtccctgacccggagtctccagcccaatgttggctggacgacgtggccaacttggtcatgacggcacggcagcgcctaggtgctggtgggcggtcctccgccaccaagacctctggcgctgctaccaccggctccgtatcgtcaaggcgaagggcgcggcgagcggcggctgttgctcgccattcggccgccactccttcgtcagcgcctccgacccaggaagatctgcgtggggggccagatgcccgcatcgatatcgagcgccggcgtaatggccgacgtgctgcccacgcaacggagggcgccacctcgtccggagtgtcacatcaacacggacgcggggatcagccctccgtgcccccggttggtggtgtcggctgtagagcctttgtggcgagccttcggaacgtccgttggcccccaaggttccggcccaccatcgccgaaaaatatgacgggagcgtcaaccccgccgagtttctccaggtctacacgaccgggatcgaggccgccgggggtgacgacagggtcatggcgaatttctttcccatggccctgaagggacaggcgcggggttggctaatgaacttgccacccgcgtccgtccactcttgggaggatttgtgccaacagttcaccatgaactttcaaggcacatatccgcgcccaggtgaagaagcggacttacatgcagtccagcgaagggatgatgagtcacttcgctcatacattcagcggttctgtcaagtccgcaacaccataccatgcatccctgcacacgcggtgatctacgcgttcagggggggtgtgcggcacaaccgcatgctcgaaaagatcgcctccaaagagccccagactaccgcggagctttttcagctcgcggaccgagtggctcgtaaggaggaggcatggacctggaacccctccggttccggtgtggcagcttcggccgcccccggatccgctgctcagacagggcggcgtgacaggaggaggaagaagaggtcagcccataccgacgacgagggtcatgtcctcgccgtcaagggcgcttcgcgggccacccgaaaggggaggcctgcgggcgacaaaaaaaaggaggccggtgctcctagcagggagcgcccaaccggcaagtggtgcatcgtccacaacacttcccttcacgacctcgcggactgccgcgcagtcaaaagtttggctgagcggacgaggaagtgggaggaggagaggaggcaggagcgccgagagggcaagtccccggcggttccttacggcaatcggcgaagtgaggccaaacagaaggcccccgccgaggacatcgatgacggcgatgatgacctaggtttccaagagcctggggccaccattgccactgtcgatgggggagcgtgtgctcacgtttctcgccggagcctcaaggccatgaagcgagagcttctggccgcggcccctactcatgaggcgacgcgccgggcgcggtggtcggaggttgccctcaccttcgaccagaccgaccacccaccgtacgttgcccggggaggacagatcgcaatggtggtttctcccactgtttgcaacgtgaagctggggcgtgtcctcattgatgggggagcagccctcaacatcctttcccccgcagcctttgacgctatcaaggccccggggatggtgctccggccgtcccagccgattatcggtgtgacgccgggtcacacttggccgctaggtcatatcgacctcccggtcaccttcggtggatccgccaacttccgcacggagcgggtgaactttgatgtggcggacctcagtctgccctacaacgcggtcctagggaggcccgcgttggtgaagttcatggcggcagtccactacgcctacctccagatgaagatgtcgggccccggtggccccatctctgtccatggcgacctcaaagtcgcgcttgcttgtatggagcagcgcgcggaccacctcgccgccgcgtccaagcccgagggtggcgacgagaggcttggcacctccgcccccgccgccccgaggcagcggatagtcacatgcgacgaggtcccggtcaaggaggttgccctgggcgacggcccgtccaagaccacacggatcggtggtcttctggacggcaaataggaagacgcgctcgtctctttcctgcgggcaaacgctgacgtcttcgcatggagaccggcggatatgcccggggtccccagggaggtgattgagcaccgtctcgccgtgcggccgggcgcaaggccggtccggcagaaagtgcggcgccaggccccggaacgtcaagccttcatccgcgaggaggtggcgcgacttctggaggccggattcatccgcgaggtcatccatccggagtggctggcgaatccggtggtcgttcccaaggcgaacggcaagcttcggatgtgcatcgactacaccgaccttaacaaggcatgtcctaaggacccttaccccctgcctcgcatagatcagattgtcgactccacagcggggtgcgaccttttgtgttttctagatgcatactctagttaccatcagattcgcatggctagggaggatgaggaaaaaactgcattcattacccccataggaacttattgttatacgacaatgcccttcgggttaaagaatgcaggtcctacttttcaatgtactactcgaatttctttgggtagccaaataggacgtaatgttgaggcttatgtcgatgacttgattgtaaagacgcgcaaccaagagaccttactctcggatctagcggaaacttttgagagtctccgctccgcccgcataaaactgaaccccgataagtgcgtgttcggtgtacctgcgggcaagcttctcgggtttttggtctctgcccgaggcattgaggccaaccccgagaatatacgagctatagagcggatgcccccccccagcaagcttagggatgtgcaatgcgtcaccggttgcatggccgccctaagtcggttcatatcgaggctgggagagaaggcgctacccttatttaagctcctcaaacgctccgggccgtttacttggacggaggaagctgaacgtgccctcactcagttgaaagcgtatctcagctctcccccagttctggtcgccccggagccaaatgaacccttgctactctatttagcggcgaccccgcaagtggttagtgcggcgttggttgtggagcgcgatgaggacaatcctcattccgcgcacccccaccctgtgctggcttggcccgggagagagcagggaggagaggcccccgagccgaacggtggcccaaggcccccgacgaccggagcaggccctctgcccgcttgtcagacggtgccaggtgtccccgacacccaggatggcccgagggccactgcgggaaggccgcacctatcgccctctgaccccgaggctaaccctgtgccgactcgacccgggagagagcagggagaagaggcccccgagccgaacggtggcctaaggcccctgacgaccggagttggccctttgcccgcttgtcgaacgacgccaggagcccccgacccccaggacggccccgaggccactgtgggaagaccgcccctgtcatcctccgaccccgaggtcgtcggcacagaagacaagtgcgccccgcgaggccgcttggacgaagagtgccccagggacgtggcccctagcgaagaggatcggccccaccgaaaggtgcagcggcccgtctactttgttagtgaggccctccgggatgccaagacccgataccctcaggcccagaaaatgctttacgctattctgatggcctcgaggaaactgcgccattatttccaggcgcatcgggttatggtggttacgtcttaccccctcggccaaatcttgcataatcgagatggtactggacgggtggtgaaatgggcaatcgaactttctgagttcgatttacactttcaaccacgccacgctatcaagagccagaccctcgccgactttgtggcagagtggaccccggctcccgagcccgtctcagtccccgaagccagctcgggcccctcgcagctgcctcacaccgcccactgggtgatgcagttcgacggttccctgtctcttcagggcgccggtgcgggggtcacgttgacctcgccgagcggagacgtcctcagatatttggttcgccttgactttcgagcgaccaataatatggcagagtacgagggactccttgcgggactcagggtggcagctggactggggatccgccgcctcctggtgttaggcgactcctagctggtcgttaaccaagtctgtaaggagtaccggtgctttgacccgcagatggacgcttacgtgcgccaagtacggcgtatggagcgtcattttgacgggatagagcttcggcacgtgcccagacgggataacacggttgccgacgaactctcacggctcgcttcctcgcgagcccagaccccaccgggcgcctttgaagaaaggcttgcccagccgtcggcgcgacccgaccccttaggggagacggacacgcatgacaggcccccgatgcccgtcggagtccaggcctcgggacccgaggggagcgctcccagctcccttagattgattgcttggatcgctgagatccaagcatacctcacagataagactctacccgaggaccgcgaagggagtgaacgcgtccagcgcatctccaaacgctacgtgctggtagaagggaccctctatcggcgcgtggctaacggaatcctcctgaagtgcattcctcgggaacaaggcgtcgagcttcttgccgatatccatcaaggcgaatgcggatcccactccgcctcacgcaccttggttggcaaagcctttcgacaaggtttctattggccgacagctctcaatgatgcggtcgacctggtccggcgatgcagagcgtgtcaattccacgccaagcaaatccatcagccggcccaggccctgcagatcataccactttcatggccatttgctgtctgggggctcgatatcctgggaccgtttaggcgggccccgggcgggtttgagtatctgtatgtcgcgatcgacaagttcactaagtggcccgaggcttatccggtcgtcaagatcgataagcactccgcacttaaattcattaagggcatcacagcccggtttggagtgcctaaccgtattattacggataacggcacccaattcactagtgaacttttcagcgattactgcgaagacatgggcatcaagctctgcttcgcctcacctgcccaccccagaagcaacggccaagtggagcgcgcaaatgcggaaatcgtcagaggccttaaaaccaagaccttcaacatcctcaagaagcacggcgattcgtggatcgaggagttgccagcggtgctctgggcgaaccgaaccacgccaagccgagcaaccggggaaacgcctttcttcctcgtctacggcgcggaagcggttctcccatccgagctcaccctgaggtcccctcgggccaccatgtactgcgaggctgatcaagatcagcttcgcagagatgacctcgactacttggaagagcgaaggcggcgcgcggccctccgagccgcgcgctaccagcagagcctgcggcgctaccatcagcgccacgtccgggcccgatcactctgcgtcgacgacctcgtcctacgccgcgtccaaacgcgtgctggattgagcaaactctcaccaatgtgggagggtccgtatcgagtgatcggtgtcccccggccgggctccgttcggctggccacgggcgacggcacagagctgcctaacccgtggaacatcgaacaccttcgtcgcttctacccctaaagggggatcgggtgtcaggtttcgggctcgggccaaccccgcacccccctcgggcgtgcagggttggccgggggctaccacatatgcatattcttttttctcttatatctgtatttcaataaaagcattttcgatttcctaaaggctgtatctgtgctgttgtttccttttgaaggatcttgacttgaaataggtcactcgtgttcaatcctgccctcgggggctcgggtcggctaaaatcgccaaacggggcccagaaccgagccgtgccccggggcgtggtgaactccgggggggaatcggcaaaaacccacaatcgggtcacccataaccctcggtcaccacgctcccggcctggccagtctcgacatgtggatctccccaggcactagccccgacccgagccatttgaggactaggacctgggcacgagcccttgttcaagccaagacacaaaaggaccgcggcacagacatcctcgtctcatacacacaacaaatagaattgacacaaaaaaattcctctttatttgattgcagattaaattagtctatacaagaagggggcccgaaggcctcggaagaagaaaagaagaaactatttaaagattggcgggggcctgggggctcactccgatgcacccgggtcgccagcctcgtcgccactgtcgcccacaccgccgtcatcgccctcctcgtcggagttgagggcgaacgcgagccgaggggccgaaccctcgaagctgtggacgatatggtcggcggcgtcccggacctgcgcgcgcgcgccgtcctcggtcccgggagggaactcgtccagcgccgtccatggggagaagtcgggatccctggcttggtaactcgccagtacgagctccaccgctcctcgagcgaggtccctcgaggatgacttaatcgtcctctcgagctcctcggggagccgttggagagtcccggccatctctgagaggcgctgagcgaggcccccctggttggcggcgtacttcacagtccgcccgccccaaaggcctgcctgccggccggcgtgatctagacgggagacggcgtcccgaagcatgccgggccctacctcgcctgccaaacggagggcctcgacctccccggcggacgagtctagcgcgccctgcagatcggcgatggtgtgttcggcagctgcgaggcgggaggctaagtcgctttcgcccgtggccgccccgccgctgcgcgccctcgcgtccagctccttagcctgcgcctcgagttcagcggcccgctggttcagtgcggccttctcggcgcgggcaccttccaaattgcggcgcgcttgttcctctagcacagcctcacggagggacgcgctctccgccagccgttgcgccgcggcctcggcctcctcaagagctcgctcccgctcggtgagcgcgtcctcgcggaggcggagtgcgcactcctcctcggcgcaggcggcctcgtgcgccgccagcgttacctcccggatggcaacggcggcctcgcggtccgccaggtccctctccacgacgccggcgcgctcttccagcgccatggcacgggcctcaagggcttcttcacgccgccgggatgccacctcggtctccgccgcccgccgttctcgggcagcggcagcgtcaaggaccccccgggcggcgtcgagctttttccctagctccgcctcccagctcccgtattgaaggcggagggtgtcctgcgcctcgttcatcatggtggtggcgatgagggcagcctcccgctcctcctccacctccttggcgatctcccccagcaccttccgacgggcttcgagctctgacacgtgccggcggtgtgccttgcggcccacctccaccatggcctccaccgagcgtcgcccctcttcgacacgcgcccatgcggcgtcaagctccgcccgctctgcttgcagggcctccacctgggcacttaacccgtccaacaccgtggtgtttgcgacggccaaggcctgcagaaggggttctgcgctcagtggagcaacggaaggcgtggggaagagccgcctcggtgaggatgccgcgcggctcggcccgccgatggacgtgccggactcagggatgtcccccggacctggcttgtcctgagcgtcgcccgagggagtgggcccaagcgatgcgcccgcggcctcgtcgcgagctgcctcggaagtcgtcgccgcctcgacctggcgaagtctggcctcctcccgagcggcttctttagcttggcgagctcggacggccacctgggcggcctcctcggcttcccgtaggcgatccgcggcttctcgccggtcagattcctgcctccgagcctctgtggtcgctgggtcctcggcctcagactggccggacttggaatggcgggagggacgcgacgggatctcgctgaaacagaagaaagaccagaagacaaacaagatggatgagtgaaaactcgcgttgagggaatgaatacggccacgatgggcgtgggacgaacctgtgagggggtcggttaaacgaccaccttggaggggaaataaggtttccccgggatggttctgtcccccccgtcttgcggagccgtttcttcttccgctccccctcgggctgcgacgtcggcgtggccccctccgggcgcctgctgctggcacgcgccgccccgccccctcagggaggagatgggggaggggttccttcctgcttcctcttcccccgggcgtcggcagggcggccgctccccgggcccccgtcgcggggcccagaagcacgaccccctcccggggtagattgttcccctctgcggctcccgcccgcgccatcgtggcctcgaggagcccgctcctccgacgccccgaccgcctgcatgatggtcaggatggaggcgcggtctggatcgctgcagagggggaggactccttgaggaatgagggatgcctccacggagctgagattcagcacccgttggaccactatcttgaagtcctcaggagcccagtcccatctgaccccctggtgggtcctcatacagtcctcggacccggtgtactcccaggcgccccgggcgcgccgctggagtggcgcgatccggcgacgaagatagtcgccgaacaccatggcccctgtgagcccctgggatcgcaggcccgccaggcggtcgaggacggcgtcgtagccatctcccagatctaccggcgcccgccagttggaggcctgcgctggaggctggctcggaagtcggaggcgcgcttcgtcggcgaggggggtgtagaaccagtcgctcttccaatcatcccacttcttgcggaggacgcagggaatgtagcggttcagcaccggcccccgcggctggaagtagcaaccaccaaccaccgacggcggcgacaccggctgtacggtgaagaaccaccggaacagccgaagggatgggcgcaccccgatgaacatctcgcacaggtgcgcgaagatggccaatgtcattaccgcgttgggggtgaggtgcgccatctggagatcgtaaaactctagaacatccatgaagaaagaagaaaatggcggaaccagccctgccatagcaaaagggaggaagaagacggaccgccccgggtagcgtggcgccgggcatccctcgcccagcgagactatctcccggccggtggcagattccggcatgaagcggcgcggcagcccggcctgtctctcgctcacgatgcgggaaggcggcagcacgctaccgtcaagcggagcggagccccgtgccatgacgccggaagaagagatgtttgagagcgagcgcgtgtggcgaaggtagggcacaggaaacaaggggttagggcgcaagcggcgaagacaaggggaataatagcgagaggaaggaagcaaatctcttcctcggcgactttatacccttgccaacgctgtgcccggctcctcgtttctcgcgcccactatcttgccccctcgtttctcgcgcccacgcttccactaatcccattcgcccgtttgcggtgcatgaggtggatatgcggctgtggcagtcgagatggaacatctcgtgcgcgcgttaattacgctcgccgaccgaagcgccatcatcatatctccaggaaaaacgaaccggcttgtcccgatttttagaccggccccacctgtcaccaggccttaggaagtggcgtcacgcccgaccgcttccctcgaggagggcgatcgccctggcataacgccgggggctactgtcggtgacatgggaccgggagtatcatgacttagagacttgaggcagacacgatcacccacgtggcctaaccccctcgggggggggggggggggtcgggcccgagggtgatacggccgcccttctctttgtctccccgaggggtcggaccactcccgtctcggccccgagggccgaggcgccccgaccccttgtgggttttgcgccgcgtatatgaggtaggtgagcgtagcagggctcacctaaccacatttattgcggtttggacgagcgcgtcacgccgcatgtaacgcagtgcagcgcgctcgtttatccggtctgtgatcagtcacagaccggtcagatcatgggttaggtggcgacaggcggtctgacgcacgcctcgccccatcccgtcaggacgagagcctccaagcactcgtccctagccggagccggcgtgttagctcctggagatggcacgttggttccggtcagatatatgccaggcttcatcctaaccattacaggcaagatattgtatgaagaagggcgaacatgcagattgttaaactgacacgtggtggacaagaatgaccgatttgtgaccggtctgacaatggtcatgtcgtcagcagacagccatgttcccacgtcgcgcctgcttccggcggaagtggaggtaggtatgggccgtcccatcagaaggtcattcggacggcagccatacaaatctccgtccattaatgaagagaagtgaagtaagaaagagagggagagatggtgcatgtggtatccccttgagatataaaaggaggaccttgcccacttagagaaaggggagaaaaaaggatcccagaacgattgggggctggctcgcactttgtagcttcttcatacacagatccaccaaaacacaagagtagggtattacgcttctcagcggcccgaacctgtatacatcgcccgtgtcttgtgtgatttcactctcgcgaactttccacagaccaagagcttagaacctcacccagggcccccggccgaaccggcaaagggaggcctgcgcggtctcccggtgaggagccccacgctctgtcagcgtgcgttcataagggtgagtgtgcgcgcgttatgaatgtcaacgttgtattgtgtaattctaaaaaaaattatttagagttaagagtttttttaagaaaagatatagccttacccataccaagagttatccgagagtgaaggcctccaatcctatgagatctaggccagaccctatgcaccgttttctattttttgggtggcgagaggacattcccactacaaccccctccagcggcgaagccaaggcccagcgacccaggcaaattgcccgggctccacaactacatgcaatcatgcccaatttcataatataagaatttctagcattgcccatattcatatagatattaatgaatctaaaaattttatgcaaatgtataaaatataaatcgcacttaaagtactatgagtgataaaacaacccataacaaaataaattataattacataaattttttgaataagacgaatggtcaaacatgtgagaaaaagtcaacggtgtcatttattaaaaaatagagggagtatatgtctagattcattaacatatatatgttgtctacattcattaatatctatataaatgtaaataatgccaaaaagttttacattatgatacggaggaagtactttatttattgttaaattttctccaggctcgtaaagatttctggatccaccactcgccccctccacgtcctcccttcagcacaagcaccaccgcaccgccagccctcttccagccatttccgaccactggcttgatacttccccactccccatcctccactgcctccttaggctccttagcaagccattattaccactggctcgatacccttagcaagccattatttttctttggaattgtggtgttttaagtattgttagtttgaatatgattattctatgcatgagaaatagttaaactatacacaacatagagtacacattaaaatataagagaaaaataaataaagttgctagagttggaaaatatttttaggtcctcaggaaattggaccagcccccattcccaattcagcctgaccttttcattttagggttatggacttttaaaacgagaggctgttgtctgagttgctattatgaaacacatcgatagtctccattccatctgtgcttgttttcgttgaaaaaaaataggtggacaaagagaagtatgaactagaaatttcaatgtttttcaatggaccgtatacatggataatccgaagaaaaaatatcttacttttcaaactgatcacaacgctgtgatcagagtatgctgtacaaacagggtaaaaaacacggtaaaaacacaacaatgtgaaaaggaacgcacagacttgatatatagtttcctcaggagtcctctgcgagattatacatttgacgaaaaataaaaatcacattaacggtaggccagttctaatctctctaaaccatggccacatgatcatcggcaaaagcttctcaaatataaacgagataaagagagcatcacatattacgaatttttacataaataccagggaggacgatccacagatggactcatctcaagcaaacatgaaaatggtaacaagaatgccctcagagctcatacaaatatccatcgatggtgcgggagacagcctcaaattgtgtgaaggatctgtgatgctaaaccacttcctgggatgatggtaaagtacacagccttatatttgagggcacaggttggtagctgcaaatatgcaggcatgggaatgatgatgtgtgcgagttggggatgaaaacggtcggaaaaatgctcaaaccatttccgttaccatatttgagagagagagagagagagagacgcacagagcgagagagagagagagatgggtacagcacttcccagaaagccaaacaccatctctgtatatcaagtttcatcattgggcttcaaatcaaagcatggcacctacgtagtgctaaaccttggtgaaactgccaatatcaatcaaataaaacaatgatccaattcagaatcgcaaatactggccaagcaacaacacaaaggtactagagagtagaaacacaatatgatattgaacagttaataaaaacaaacctacacaagcgacaacaaaaatgtactaaaagaaatgaagcactcattatgtgatattataacagaaaagaatgcaaatgatgagtctctcgtcaagccaacatacccaaacctgctggaaacaaaaaatagaaagtgtccattttgattaaccccttaacacttgtccaagtccaggaatcgctaactcaacaaaccgtggccattcaacattacccacataaatagtttctttgctgcctaggtggaggggccataccaaaacttataattatgtgctaagcagtgctgactcatcaacatgttcacttgtacacatttcaccagcatggttttgggcaatggggagtttgtaatgattttgatagatcaaagatgttaaacatgcgatatttgtagttttgggttgccgcgaatgttcaggtaaaatggccaatagtacaataaaaagaacattgacaaaaaaacttacaacttgtgcatgtgcagggaaactttattgatggcaagtctctctgatgcatttcattgatggcatatatggtcagtgatttgcccgctaaaacttatgcagtacctgcattccaaacagatccttcgatgacaaattccctactcgtgcatggattttgagggaggagagaagaccaagtgccatctatgcatattaagtttttattattaggcaatgcatttagatatgctactaccaagcaaagcaacattgtaaaaatatggaaatatgaacctgctggtaatcaagaccatggctatcgcaggctcttgattcatcgtattatacaggaggtaataaaaaaaggtggtaaactagatgagagaaggaatatcgacaagatatgttaacacaaaaaagagataaacaatgtagtggcataagttgaggtattttgaatctacgaggaatagacaaggtggagatatttgaattgttctgaacatcaatcactacatctgcagccatgatacattaagtgtgtacttgtttgcacggcaatggaccaactccgtcagatagtaaatttctgggagttacatcaggctattaaggagacacagagtctgagaggcaagcaacaaaactaaaagatccaaacaaaaagattgaaaggtcgatattaccaaatggccctctgatttcacaactttgtttttcatcttaggctggctaatgcggcagccctcaatgctggcactgaagcatgtctcaagggaacggcagaactggatgatgatgatcgatgacgacgacaacgacgacaactgccacagcagtggcaggagcggaggaggacgaagaagaagaagagaaaaagaaagaaagagagctacttttccaaagcagaagcagcagcagaaaccatggtcctgccaattgcgcggaccgacatgtcagtgtttctccaacccctgagcatgcttcagcgcccagatcattgaggagccaacgccacactagccattttcagctcaacccattgcagatgcaaagggcaaccccattagagctcaagtccgagccgatctatctatccatccatccatcaaccaatcgatttatcgattcacgagggtcttagtcacaatcatcattgggccaatggcgaatccaggcaaaaacgagagagatcagaggcaccatgccacagtgaaaacgaaacaagcgaaatgcataagagacaggtgcaccagaaaaaggaccatccatggatggactcatctcaaacgaactggcaaacgtgccataagaaaaataatgccctcagaactcacatacacagtatccattgatggtgcaggagacagcctcaaattgtgagcaaggaaatgtgaggctgaatgaattcctggaatgatgatggaaggttaagctagctagctacacatgcacaatcattggaatgaaccattccaaatgatgacatgtacgagagagagagagagagagagagaggagagagagagagagagagagagagagagagagagagaggacggatggatggatacagatcatacagcacttccaggaagcaaaacaccatctctgtaaatcatgtttcatcactgggcatttaaatcaactaaatcaaagcatggtacctgttattctactgcagaaggtactaaatttaggtgaaattgctagtctgaatcaaataaaacattggtccaattcagaatcaaatccagatgctctgcaaaggtggggaaacatatatgactacgtggtcttgaacaaggaaaacttcaaccaagagaaaaggaggggaaatcgtgcaagtgagaattttccttttttaaaaaggaaagtcataaaaaagaggggaagtcacgttcttgattgattgtatgaaggggattaagaaaggaagcaaatgagttatttctcaaaatatcatggctcataagtggatagtgatttggttttatgatatggacgactgtcatgaagtccaaaaggtaccacttcaatacactctggtttcttgaacaaaataaataacatggcaatgaaaaaaataacaaatgaacttatcacagtgtaaataaagtaataaactagtcaatctgcagaatgaaaaccctcagaagctctagcctagaaaaggtgtcgaacttatcacttggagcacaaacacaagctgacttagaataagtcaataagagtatctaggaaccgtcatctgggaagagttaaagagtcagctctgctgggtgtctatcagttaaaaatgagacgaaaatactggccgagcaacaaacagaaaggttagagtagaaacacaataaacagtttaacagaacaaacctacacaaaccacagcaaaaatgtactgaaggaagtgcaaatgaaaagcctctcatcaagccaacatattcaaacttgcagggaacaaaattttgaaagtactaagtccattttgattaaccccctcaactcttgctcaagtccgcaagttaaaaaacagtgaccattcaatatttgtacccacgtaaatagtttctttgctgcctaggtgtgttttgagtatgatgtgaggagccatgcaaatttttattgtgctaattgagcatttcaccgggtccactacgtccatttgtacgcatttcaccggattggtttcagcaatgggatgagttgcaataactttgatagttcttgaacatgtagtttggggttgaccaggaagttgaggtggtaaaatgggcaatagtagactaaaaatatcgaaaaaacatacagcttgtgcatttgcaaggaatgttatgccctcaagactcacttatgcatttcatttatggcaacatatatggtatctgattttcccgctaaaacttagcggtacctgtattccagacaaatccttttgatggcaattcccaactgctgctgctgctgctgtcacatgaggggggagatagaggggggaggaggagccgaggaggaggaggaaaccatgtgccatctctgcatagtaagttttcatcattgggcaatgcatcatcatgctactaccaaccaaagcaacatggtaagaaaaaaaataatatgaaccagatggtagtcaagatcatgcctattgcaggctcttgattcatcacattatacgggagatgataaaaaataataaggaatacaaaatgagacaaggatgaaccagaacgtatgtaacagtatgatcctaatgccctctggcttaagacataaatgcacctctgcatttcaagatgacacaagagacgggcatccaatttgtaaatcaaaattagaactcgacgaggcatgttaacacaaaaaacagaaacaatgtagtagcataagttgagatatttttgcaattgctagcaatagacaagtggagagatgtgaaccgttctgaagatcaatcactcagacatctccaaccatgatacattacgtgcgtgctgtttacacggcaatggaccaatttcgtgcattacatcaggctattaagtagacacagagagtcagagaggcaagcaacaaaaccgaaagatccaaacgagaagacagaaaggtctgtattaccaattggccctcagatttcacaacttcgttttccatcttaggctaatgcggcggccctcgacgctggcactggagcatgtctcaagggtacggcagaagaggacgatgatgatgatgcacgacgacgacgacgacccgccgcagcggtggcaagagaggaggaggaggaggaggaagaggagaaaaaagaaagaaaaagagcaggttttatagtatagcagaagcagcagtaaaccatgttcctgccgcgtgggcgggcccacatgtcagtgcctctccgacccccccagcatgtttcagcgcccagatcatcgaggagccaacgccgtactagccattctcgggacctcaacccgcttgcagatgcaaagggcgagcctcaaatccgagccgatctatctatccatccatcaaccaaccaaccaatcgatcgattcgcgagggtctaaatcgcaatcatcatcgggccaacggcaaaatccaagcaaaacgagagagatcagaggcatcaagccacggcgaaatcgaagcgagcggaaatgcaaagacgagacggtaggggaagcggatacgagtaaacctcccgccgaagcggggccggaggccggaaccccggttgatcggatcggcgagctccccgtggccggcgggggctccggaggatcggagagcacgagggattgcggcctctccgcctccgcgagacaacccgaaaccctagttttgcccgtgctctcgcgttctctcccatctctcttccctcttcccggttgctgcctttcgaggctaccaatggcgcgactcccaaagaaggcaaggccacgcggcagccgcatcggcgcggtgtggtcatgtgggccgggcctggttcgacgtgggcggaagttttagcccatctgtgtttctatatgggccgtaaaatcacctgggtcatcgtgtgctcggcccatattgtctccaagagctcccctaccagcgattacaggcttacagcgtgtgatcatggcacttctatatcctatttccttcaaatttaaaaccgggtaggggtagtgtcactaaactcgtatttggatccgtgggtagagtttgatgatttttgtttaaacttgtacttgaaaaaacaatctatagggagtagtgaacaaagtctgtgaaaatgaagatatttacttcatatttttttagctccagtgcttctaaaagagtaaattatatccatggtatatcaatttggtagatagatgcaatttagtacaagaacttgagaagtgagcgttgtagtgcaacaactaattaatagataggtgcgatttagtgtaaaaacttaacaaattgtactaaattgcatacgggtgctacaacttgcaaggtgcgtgtgattatagtacaataactttaaaaatatatgtaacaacatttaattattttgatcattttttaccataaatattcaaattttaggtattaattttttaatatactcatggaatttgtagaagcatacttcaatttagtcgctctagtaactaacaatcaattaaattttaatatctaaataatatgtattccggttgagattttaaaaggtgaagaaaaaaaatccaagatgatggtgtaaatcggatgagaaacataattcttgaattatagattaaattcaaaattataatggaatatccacagtattgctatgtgatggcatattttcatattgatatcataaaaaaaactcatctagcatttattgaccaaaataacatatagatagccgagttactgcaccaaaatagtaagttctcaagttggtacactcatctagcatttattgaccaaaataacatatagatagccgagttactgcaccaaaatagtaagttctcaagttcgtgtaccagacgcactcacttgctaagttattagggcatccacaatgtactccaaaagtagtccataagcaatataatatttgattcagccacctagcaacattgtgaaactagtccatagaaaagaaataacaaaagctacccataagtatatgggctgcccatagagaataaaatatattatttgtctctatctcttctctcctactaatactatttgctatccatatacattatgaaggttacaatagttaaagttcatatatgtgggtcccatctctatggactacttttgccatatacattgttgttgcccttacacttggacgctcaattttgaagttattgtactaaattgtatccacttgccaaattattatacctggagtgcaatttactctttttaaaatatttgcaggtccattgctgcttcactcactcatcagtcatcacgaatccatatcagctatttatctcaaaagaaaaaagaaaaaagaatccatatagctaccgagcccaggttctacccgctgaaaaccagactcggtaaagccattggaggagaaatcctattctcttccacaatccgccggtatatctccattccagattcgatctgtgcaagcgacacttcttacggcgcgtgactgcagccacaatgcgaaagaagaagggatcggattacaccatcattactcgtactatgggggaatccattacgcttctcctcctcatagtgggattccgccgcgtcgtcccatcatgctgtccaacgattcgatccggcaaagaaaagcgaagggacaaagaacgaaattgttccacctgaattatagggaagtaatgctctttactatgctcgcatctacaagccactctccagtctccactcaactgaatagacagagagatgagattttattctttgcttccctatctgaatatgcagtcacaccatgtttagtttttaaataattctttaaacttccaacttttccatcatatcaaaacttttctacatacaaacttccaacttttccgtcatatcgtttcaatttcaaccaaacttttaattttagtgtgaactaaacacaggctcaatatcatttctcatgtcgaataaactggtggaaaattaactcgcaaacacatagtagtactgaagaaacttcatcaagaagtaataggactacgagtaatgctcccttaaaaacacctgatttgatggcctctccaattacgtgccacccagcgacgagatcacgagaccactcgccctgcacaaggcaaagtataggcatcagtgcatcaccatcatcatcagatagatatgcacactgtcaccattatgggaacaatgagaacggggcactactgatttgcacaaagaattactccaccatgcaccacatatattcaattattttccttcactcgtgctctccaagcatgccacaacaacatgttccatggaagaaagaaggaggatttcatttcggtttccagtatgatgtgcattccagctcaatcacattctcccatcaccaagaaaaatactcattcttctcatccagtcacactcatcatgggtccgtccataagtactcatccttttactattttaattgctcctcctagctgtactactcattgttgtcaccacagaaatgtatcttcttcctctccaatggaaagagctcagcttaaagagagctaagacacccagctttattcaggagataaaaaagaaagaagaaagcacaggtacatgtgcaatgattctcccattagtcacaaacactgtatttcgcgcggcaagcaaggggacatttgtaaatgatgccatgatgatacattgtggttgtggcaaaccttattaaaatggtagtagcagtagtagtacaaagtagtaggaagagtaatctgaaaaagaactaggaaggctccatcatgtgagacaagtccagaacaaccggatgcaagcatgattctgatcttatagaataatgcaagcacacatgcacaacagcacaaatagttgtaaaagaacagccttgaacccacccgggcacaaaataagtgaagcactgaatctttcccttttctttaccagaacacggcatccatgcaaagcttaacaaagacatgaacggatcctttcagcttaaatccggaaccgcatgtacaccacacaaatggaaaaatgcaatgcatgaaccgctgtcccaaaggaaacctatcatggtgctaccaggtgaaacatacaggctgagaaatccagttccaggctacaagcagaaatacagccaagacgacacaacaaaatgcaaacatgatctagagcccttgggcattacatttctcaagttgctctctgttgcatttccagttctgcctccattagagctcactgtttccctcattcgcaggccagttttgtgtcgaagctacttaaacatattgcaaatgcctggaaagctgagagcggatagcggtaatccattgtgaacatatcttttgctaccttaccaaactgtagaataatcttgtcctgctctggtggagcaggttgtgacggagttggagcccctgcgggaggctgtgctggtgcagcaatcaactggaaattctttaccgacgcaatggttacacgcccacggaaattaaggcaccagcattggagctgctcatgccacctaggggccttgttgcgaagcactagtggcctctccttattttgcccctcttcatcaccatttatggtgcctccagcaatgtctgaaaagcgagcactgctgaaatcacgggaactactgaaatccatggaccgatccatgatggatgacttagaaaaggaggtggtgctgcgaaatgactcctcgaaagctcggggaacaatctgctcgggctggccagggacaatgccaccaggctcgactgaggaggcaggtatggagtgcatgacacagtgcatccgcctagggcccctggtgccaagaacattaagctcatatgtcacctgagctatgttataactaccagacggcatcttaggagacactttcttggagttgaatcttcggctgctccgtccaacaggagggattacagccccattataagagggctgtgtgtcatagattataaattttgtgccaaggaagtttgacctaaaaatgaaagacacaacaaggttggtttgtatcatcaaataaatggagcgaaaggaaaggtgtaccatctgcacacaaaacagttaccttagttttccaatataggtgctgcttgatcttgaaatgttgtctgcatccattgagataacatattctgtgcaggttgttttgcggtgccttttagcggacaagaggaacttgccactatccgcaagtacagctgattaacaaaaatcagtagtgagccaacttattcaattcaggtgaaatcaaatttgccagttgtttaaacattccataacaaaaatatttggagaaaaaaaaccatgtatgtgcacacataaatgagggataaaaatggtgctagatggtagtagatgtttaaccaaaagataaagccttgcaatactgttaaccaaattaagaaaaaaaatctggtcgtatgagtgaaagaagcacaagacataccagtactcaggcacaagtagagatgataagttgatttagatttatcccgctttatgaaacattgaatcattccatctcgagggccaggctgaaagtcaaaacaaggattatgaatttgagaggaacaaatgaataagcaacaaccacacttgcaggttgctatcactaaggtacgaaaatataattcttaacaacagtcagtttaagttctgctttcattacaggatgtgaaattttacctgctttagagagagcgggaaggtaagcttcccgcaaaactccgggctcagcacaatctctttacacatctccctccatgccttacagacggcagcacaggacacgacatccttgcgtgacggccaggtgctctcactagcctccagcctccggatcacatcgcggaggagctcaggagggaggctagcccaacgactctcctggattatgagatctgcatcacagagctcgtgaaccgtactctgagacttgcctctatggtggccggtaagccccgatagaccagccagggtgacctcaaagcttcgcctcgacaggctaccaaaactatccctaacatcacgaacaatgctgcgaaacgacatctaggctcgctgaattcagcaaactgaacttgaaacttagcctgcccaatatattatcagcgaagaccaccgacaatcttcgcagctgtgtttccacttatggtacaattggccacagtcccagatcacgctgacacggtaagaattactgctttagttgtgttcacgcacaagcaatcaacaatctatacctgcgagaagaaaagaatcttggtgagaaagcgtgcgaatatatgctaagaacagcgaataataggccaattccaagtatagctcgcaacgactaaatcagagtttgtgaaaaacatatcatactagcaaacaagggagttgtggagagagtaaacagcctatactttttcaggggcggatccaactagggatatggggtttcagttgaacccccaaatttggggggggggggggggggggaacaaacaacaaactgttacttgtattaaggttaaggctctgaaattaagagaagagcttcttcccagatctagaagagaagctagggttaacaaacgcaaggaaattccacacaaaagaactcccggtgggagagagatgcatcagaaagaggatgtggatgctcaccaggatcccctcccctgctctgctcgccggatggagatcggcgcccctctcctgctcagccgcgactcgtcttggcgcaaggaagcgggggagacgactgagagatgggagatttctcgttctcttacgccaagggaaggaacggggaagatactcgagtactccaccagacaccagtccaccttttatctcatttttttcacattaccactagctatgttattcaatctttaggatgattttgtagctcacatgtcgatagtacttgaaaaaaaaaaatacaacaaacttagttaggaattatgtcagacagcaaactccttaaactaccgacaaccactggttatcactccacacaccactaccatcgttttttctccatgagccaccatcattccccctctccaccttcgcatgcgcaaccgtaccctctagacatcgacatgtatcttctcctcctcggtcgtcatgcacgctattgtcacggttgtcctaaaggccgatggtgtcgggtttgcagggactcgggaaagcaggagccgacccctccttgctggatctagcgattccctaattgtcggagggaaaaaaaaggagagagcgagagaattagtgtgtgaaaagcatgagccgacccctctttgctggatctagcggttccccaattatcgaagagggggaaaaggagagagagaattagtgtgcgaagtagttgtagactaactggacttggaggtggagcggcggtggagttatcggatttggaaatggatagaatagggtggtttaaattagaacaaaaatataaaaatataaagttagttgttattaaatggaaagaatggttaaagaatactataatatgaaaactttaaagaacacatagcacttaattttttttctatagcacaattgatgagttgtctattagctgatagtctcgtgctatactaagcacattatagctttatcgtctctgtatagtatggctagaccggtctacttaactactaataataatctcatgatatgttgatacacgacgatatgaacttctgctaaccaatgcgcagagtcagaaatttaatcttgtgggggtcaattactagtagtttgtatttaagtaggaccatttctcaacaattttgaatttatacatggaaatcaaggtttatggggtgttttttaaaaagctgtagagttagccgacctcatagaatatgtctggatacgccactattgctaacacaggttgattaactatggttagatagatttggctataaaagaaaaaaataataaccttaattttgcttgatataaagcattcgattgtggtctcctcttctcatgcatgatatgggatgactatatcttatcaatatgtatattattttttacatatatgttaatgtggtctaatatttttctcataattaaatggatactaattaaatagatactccctccatcaacaaaagttacacctatttcacatttgagtttttccaaataagttgtttctatttgtactcttcatgtattcaagacttaaatgaagagataaattaaatgttttattagaacccaaggaggcatctaaatactcattggttacatgctttcattcactccttgattttgtagtatccaatgtgatttaatttctccttggtcttggtgtcaaaagtaatatgtgtaagttttgtggatggagggagtagtacggaatagatagagtattttttttatatttctcctactccctccgtctcaaaaaaaacctgggtttccgtgatcaacgtttaactgtccgtcttgtatgaatttttttataattagtattttcatagttgttagatgataaaatatgattaatattttatacgtgacttgtctttttaattttttttcataaatttttcaaataaaacggacggtcaaacgttggacacggaaacccagggtttgtctttttttttacggatggagtacaaaatatgaatagtgcagtaatttacatgttcaccgtgcctgcaacggcacgtaaaacgggaccacacagattaccccttttaggttgtgtttatttcagcgcaaagtttggattttggttgaaattggagatgatgtgactgaaaagttgtgtgtgtatgacatgttgatgtgtgatggaaaaggactgatgtttggatctttggatctaaacacagccttaacagttttacagcagcaactttaggcacaaagcaacacatgttaactttctctcacatctgtccttttccgtgcagtgcagcctgtgcctgtgcaggcatgctctccgttatccgagaaggggaaaaaggtgttggaattaatagatgggctaaggcccattcgaagattaattctttgaaaaatcacaaaagcccacctcatgggatggtatgcatatggagtttagtaccaccttacttattctaggagagggggacctccttaaaagggaggatgcccttctagccacttgaagcatgtgtggtggagagaaggggggaacacgcacgcgcttgcctcgcctggcagggcaggcggcgcgcgtgcatgacgtacgcgttgaatggtccgaaaaattggctcctcacccttgcgcagatgcagcctccttttgcagttttgttttgctgcaggaaaattcggatttgttttgttgttggaaacattccgaaaaatccggtgcgtgaaaacggcgtggagtccggataagttacacggataagttcctgcaccgggagaaggcggcaataaggtttttgggaagcgcttcgcgcgactgctccctgttcgtccgcgacggctcgccttcctctccattcgcgtgttgcgcgccttcgtcgacgctcgcaaccgcgagtagttcctgccgagcaaccggtctttccgccacctcggtacgtgtttgacatgttgcacatatttgatctgttcatgttttactgcttagtttacatgtgtagatctaatgatgcgttaatgatattatacatttgtaatgtcatgatttatttatggaatatattaaatcattatatgcctatattctcaacaatccaaaaaccttattataagcgctgtgattttactatggctggttttgccgatgcactgaggccggataaatttaccggtgtgcactttaagaaatggcagatcagggccactctgtggctgacagctatgaaatgcttctgggtgagtactggcaagcctataggcgttcttaatgctgatcagcagaaagaattcgatgaggccactactctctttgtgggatgcattcttagcgtgcttggcgatcgtctggtggaggtgtatatgcatatgaccgacgctaaagagttgtgggatgcactgaatactaaattcggtgctactgatgctagcaatgatctgtatatcatggagcagtttcatgactacaagatggctgacaaccattctgtagtcgaacaggctcatgagatacaaaccatggctgaggaactcgaactccttaagtgtgtcttacccaacaaatttgtggctaggtgcattattgtgaaattacctccatcttggagaggtttcggtactgcactcaaacacaagagataggaatactccgttgaggggttgatagcgtctcttgatgttgaggaga

SEQ ID NO: 26027 - DNA, 5893 bp, Oryza sativa
tatggcgctcagtgtgacgggggcccaccagctattggactggccgcccccgaacaggggcggtcaaggtccgttgtgccgttgggcccgacggatgggagatctatctaacattctcccccttgatctcactatttcttttagctttttctattccatcacagatttgtaaatagagcatgtttcatcgtcacggtcaatcaccgatggattcgacagccactatacatatctctattcagaaacagatacttttacttttgggccctgtagtccaggattcataaggcttcccttaaacccatgccagctacatgttccttgaacatgttgggtggtaggcctttcgtgagcggatccgcgagcatcctttctgttctaatgtgctcgagactgattgtttgatcccagactttgtccttcacaacatagtactttatgtcaatgtgtttggcagcaccacttgactgattgttgtgagcatacattaccgcgggtttgttatcgcagtataactttagtggtttcttaatactgtcaaccacctttaaaccgggtatgaacttctttagccagttcacctgccccgttgcctcatttgcctcatagcatgctataaactcggcatacatagtagaccctgcagtgatagtctgttttgagcttttctatgaaatagctcctcctgccaaggtaaacacgtatcccgatgttgactttgtattatcttttcaaagtcaaaatctgaataccccactatctggagtgattctgatcttctgtaagacagcatgaggccttttgttccttgcaaataacgcaagactttctttaccaatttccagtgctctgggcctggattactctgaaatctgccaagtaaccaggtaacaaatgccaagtcagatcgtgtgcacactttcgcgtactgtaggcttcctatagctgacgcatatggctttgttttcacttcattgagctcatactaatttctgggacattgcgatgccccatacttttcgcctttcactataggagcaggtgtcgcatcgcatctgtacttgttgaatttcttcaacaccttttctatatatgccttttgagaaagtcctaatgcatactttgttctatctcggtgaatctctatgcccaaaacatatgaagcctcaccgaggtctttcatgttaaagtttgagaacaagaatttctttgtttcctgcagtagactgacaccactactagccagtagaatgtcatccacatacagaattagaaaaatgaatctcccattcttaaactttgaataaatacagttgtcctcgacattctcttgaaaccaaaatttctttattgtcccgtcaaacttcaaatgccactgtctcaaagcttactttaatccataaatggatctctttagacggcatcccatattttcgtttcctttcatgacaaaacctttcggttgcgccatgcatactttttcctccaaatctccatttataaatgccgtttttacatctatctgatgtaattccaaatcataatgtgccaccagtgccattataatcctgaaggaatctttacaagagacgggagaaaatgtctcattgtaatcaatcccttctcgttgcgtgaagccttttgccacaagtcacgctttaaacttttctatattccctctggagtcatatttggttttgtagacccatttacagcctactgttttggctcctttaggaatttcttctaaatcccaaacatcgtttagtttcattgatttcatttcatctttcatggcttccaaccatttagatgagcgagcgcttctcatggcctcttcatatgaggtgggatcatcctccacatgcgactcttctatattataaacattatagtcatcacggatagccgatcttctgactctttcagaccttctaggggcctccacatttggcacatcctgtacctgaggctcttgttgagtctcctgtactagcacattatctgtttgaggctgttgcagttcctcctatggtgtggcaactatttctgttgaatcatgtataacaggttcctcattttcattcattgttgctataggagaggtaacaacaggtgctggtaccgcaatgacaggcattgtaggcacaacatcagcaggtagagagaagaaaggttcctgagtcgacggagcgggtatagacacccgcctctcctcaagatcaatttctcgaactaccgagctccccctaatcatttcgtcttccaagaagatggcatgtctcatttctacaaactttgtataactgtttggacagtagaaacgatagccctttgatattccaggatagccaataaaatggcagctgactgttttgggatccaacttcccaatgtttgggttaaatactttagcctctacaggactcccccacacacggaggtgagctagcgagggtactcttcctgtccatagctcatatggtgttttgggcaccgatttgcttggaactctgttgagaatatgaatggcggtttttaacgcctccatccataaacccagtggtagtgtggagtagctcatcatgctgtgcaccatatccataagggtacggttacgcctttcagctaccccattctattgaggttcgcccggtgttgagtactgctactattccattctctagcaagaaccttgcaaaaggtccagggacttgcccataaggcatatgtcgaccatagtactcccccccatggtcagatcttaccactttaatctttataacatgctgattttcaacttcaactttgaatatcttaaatttatccaatgcttctgatcgctctttaattggataaatataaccatagcgggagtaatcatctgtgaatgttacgaacgagtcatagccatccacacttttcacaagaaatggaccacaaatatctgtatgaatgatctctaaaattcctgcgcttcgttttgcaccctttttgatgctctttacaaattttcctttaatgcattctatgcattgttctaagtctgagaactccaatggacgaagaatttcattcttaacgagtctctcaattctccccctcgaaatatggcccaaacgtcagtgccataatttcgatgagacatcgggagttcgctttcttttcatgttttcttttgtcaacgaggacacaacattcacattctcagaaagagataacacataaagctcgtctcgcaacacagcaagaccaatacatgcattattataccatagttcacatttgccacttccaaagcggcaatcatatccatcaaaatctaactttgatacacttattaagtttctttgcaaagaaggaacataaaagacatttcgaagtaaaagtgtgaagccattcgcgagctctagaggaagatctccaacagcttcaactttttcttcaactccattggcaactctaatggagctttcacttctttgcatagtcctcgtcgaacggaatgcctttaaacaattacaagcatgaatagttgctccagaatcaatccaccatgtagatctagagtaaccaacataatgagattcatttacaaatgtaataatgttctcatctttccttgccatgatcattttcaagaagtcaggacagtctttcttataatgtcctatcttcttgcagtggagacactgatctttctcaacagcgaactgttgttgctgaggtagatgctgagactgtttagcttttgaggtgggagacttgtggttctttttcttgttatctttaacatagttaattgaaccaccatttgactctttgattctctcctcctcttgcacataattagcgatgagcttttcaaagttccatttctctagacttatgttgtagttgataataaaattgtcaaactgctttggcaatgaggccataaccagatggaccagaaagtcatctgttatgcccaaatccattggcttcaacttggaagccatgttgctcatcctaagaatgtggtctctaacaccacctccatggtacctctctgtcacaagctgcttgatcagctgtgtagcataagtctttgaaaagccagtgaactgactttttattctttcaaggtactctgagacagcgtcacactctggaattgagcctaatattgtgggctcaatcgtgttctttaccacagccaaacatttcttgttggctaaggaccatttcttttgttcaatgtcatacgacatgacgagaggagcattgtccctctgactcttttgccagtcagcatctgactcattttcacctttgataagttcaacaggttctacaggacatggggtagtcaacacccagtccacctctcccatgataaaagcaaggtcgagttttcttttccattctgcgtagttatctccttgtagggtcggaatatctttaatgcaacccatcaaggagtagccacctgaaataatcatgtatggtgagaacaaaattaacattaaaatattacgcattaagcctacatcaccgttgggcagaattagacataacacatataaccataactataacattgcaattatcaacgttggtcagaaaattacaacatcatagcacataattaatgttcctaaaattaaattctcccgttggttcgaaatttaattttagaaacactaattttcatcaatttcatctatttgtagcagaagatctatataaaaatcatatgaacagtagcaaaactctataatttactctctgtgaaaattctcccgttggttcaaatttaaacagaggtaaaacatgcaaataaaactattcaaactctattgaaatttgcatgaaaattgacaaaatttaaaaagaaaaatgctaccgttctcttttctacatttttggcccccgagggacctcaaacggacttttctcggtcggcccacggccttttggcgtgcgcgggcgctcccccttttcccccaggccgcaacatgggcctgggccaggaaaccgccgcgcgcgcgcccctcttgggccgctttcagcccggccgccgtcggccgtccgatcggctaaggtttagatccaacggccgggcgccgagatcagagggacaaaaccccgacctcagcctccggccggccgaaccctagcctctcttctcttctctctcgcgtgaccgcatggagcggcgtcgccgtcgccggcgaccttcgcgccggcgcgccatggccggcgtgcttttctcttctcttctccccccaccgtctctcgccctccacccacgtgaagtgagagagagaacagcgacgatggaggtggcggcgccgccgcgggatctctcaccggcacgcgcgtgcacccgcgggtgcgcgcacggccgtcgagtggctcttcggcggtgcctctttgcccctcccccctctgttgccggcgtcaacgacggccggcgacgaggtaagattagggttagggttttcggttcttttgatccgtgcagatcttgtgcttttctttcttttgatttctttccccgaaccgatctaatcactaggaacgctctgataccaatgttaaactttgctctaggatcacctaggttagatctaggtcgggtggttctatttgggtagatgtttgaacaatagagattgaaaagggagagggtttagatagaccgaccggttgaggtgttggaggatgaagaagcgtcggccatcgtcgtcatcgtcgcgcggttgtcgcggatgcggcgccggtgaggtcatcggcgatgacgactgcggcagtggcggtcgtagatgtcccggcgatgaggcgtgacgtggcggtggcgttttccgtcactggctgcgccccctctcgatcggttagggtttgtggg

SEQ ID NO: 26028 - DNA, 23703 bp, Oryza sativa
atatcatatgcctcgcttccttatgatgtgtgtgatctatactatctttttcaaaagaatatacctagttaacatgaatccaaaattttaaatttaatagtaacaaatataacttttcaaagaactatatactacgaaccatagtgcggtttatatatgtaataatatatggagaaactcataataatatgatataggatagatgtaaggccattaatgtctaagcattttaaaattgttatgaaaatggaacatgcaatggttggttcaattttagtgaaatgtaaaaaccctttttttttacgaacttattgcattttttattacctgctttattttatattttataccagatcaaaatataggctttttggatctttaaatcattgttttaattataaatatatacaacaatatttagattagaatgcatatcttgaaatttatgcatgttttgatattttttattacttttggctatataaacaggaaggggtagagtggggagctcaagccgagaaggtatgggttgagtagtgccgtgttgtgtgtatgtttgggaggagggcaaactggagggctgttttttttctattttatctaaatgatttaagtaaaaccgatgatttatttttttctcaatttttttgttatttttttaatttttaagacgtaacacattgcggcataagattttctaaaaagtatatctactggttgaaaataatggatctacctatttaagttgaaactgatggtcagatgatatttcttccaatttgtaaagttttatttttatttaaggcgtaacacgtgacgccttaagtgcgctcagaggatgtacaatgatttatgataatataatacttattttcatttagtattatggtatgtcttttttctatttggttaccatgcaaaggaacggtgtctaataaatcacgtattttcatttttatagagtgaaatatgggtaacatggataaattatctatttaattataaataaaggaaaaattcaaataaactaacattatgatttaacttaagaattataatcatttggctttctagttattgatcttttttacttagttaaaaattaggagacaaagaaattaaatgagtgaggagaggaagagagagttaaagggaagagatcgtgcgtgcatataattgtaataattatttttaccgggttgtagtgttttagttgcaattacttttttaactaaaaattgaaaaacaatttattgattgattaaaatctttccttttttacttgtcttctctagtatattcacagtagatattaaaaataggaactataatctaataatgttattttggcttattctaatgttataatgggggagtagctttttaaagcattcctcagagttaggttcattttacttttatccatatagatctaatttaattattccaaagtcagatatggtgacaaaatatgtaccattatctttctataattttataattgttcaaatggcacataaaaatcagaaaattatagccccaaagtgacatatttcttctcaaagttgatattacagtggatatgtaaaataataatgtcaaaatgtaaaataagttcatgagttcatgaaatattagttgtgtgagttagatgttatagttgcttattttttgcacaagttttgctttctaactaacatattttggaaacattactcatagtatattcattttacttttatgattgtagacctaatttaattattatgaagttatatatgatgataaaatctatattattataattattttatatgtttttataattgcttgaatggcacgcaaaagttagaaaatctaaaccaaaatggcattttttaaaagctaaattgtagtgaaatatggtcttcaactgtaaatttagttataaacaatctaaagatttacgcggatcagaaattagttgtatgatttagaagcttaattgtttaacacaaaattattgcttatctaactaataagccatgaaataggagaaggaataggtgaaaagtgaagaaatgaattgaaggaagaggaggcgtacatacatacgtttgtttttgtaaaaaaaaaagaaacttatacatacaggcttaggtgggcccgggtttaggagaggaattttttcttgaaaattaatctaatggttgtaaataattgttccaccaaatttaatgaaaatatgttttgttattttagaatttttaagaatttcactaatttattggagcatcacatggcaacttaggagcgtttgtaggatgtcatatggcgaattaggagcatttttgggaaatttaatggacttttagacatctaatctgatgttctaaaacattaatcaggtccaccaatttaaatgaaaatagacggtgatatttatataaatttatagagtaatatgttttatcattaaataatagtaaatcctattttaaatatcatcatttttttcttattgattttatggtaattccgtgcgtcgttttttccgacgcgaacagtagataagcttcattggtttcttcagttgtacatacgtaagtttttcccatatacataaatacgtaatatttaggacgattttttttaagattttgacctttctcttaaaagttttatttacgactttattttttaagatggttgtatatatttgtgttgtaaagaccttcagaacaaataaactctagactcaaaccagtcaaaaccatggaatcaagtagatatatgaattaaaaattatagcaattaatttgaacttatctaacttttgattccttttatctgaaattgattgcttaaaaataggaatagagaataggagaggagggtatggggtggacggacgtacgtacgtaggtaggtacgtatataggaggtggtggggtaagggtggggtgggatttaaatttaatataatagtctaaaatctcgggtccatcaatttaagtgaaaatggccggttagatttgatagagccacgtggcggcctaggagtatttgtaggagcaccacgtgacggcttaagagcgtttgtaggaagtttaatgaacttttagtatataatagatagatagatagatagatagatagatagatagatagatagatagatagatattgccatcttgccaaaattttggcatagccaaaacttgttaaggtttattttggctataatttaaacaagcccgaaatcaacaaatagacaaaaaatggaaaaagaaagaaaaaaacagagatctaggcaacaaggaactgaaacgtgtaaaagaaaacaattactccgttgcaatcttgatgcgtgtcccttggttgattacatcaggcatagctagatgtgtgattttacaagggtatcgattattccagcagcctcagaaagagaagcaagaaaaaaaacactaagaccccggaattatgcacgaattttggacaattcaactatactcgtgctgtcttgcataacacgcctgcattattagaacggacgtgtgcagtagagtggccactagatcgcacttttaattattttgttcctcaactgaaggggctccatcttgatctgagatcatgctcaattggtgtgtttttcttacactagcatattgcctgtgcgttgtgacaggattttaatcgatgaaaatgattattaatctgctattatcattattttctgtatacatcgtctcttaaattctactccattcgtttcagattataagactttatagtattgcccatattcatatagatgttaatgaatctagacacaagtcttatatataagacagagaaagtacatatttataattagcatatgagtcatatagcctctcacggatatcattttccttgccacaaaatatagagatggtgatggtgcggttgacatgtggaccatttggccccatatgtcctttgttcactccaataaggcagggagtttgtggtggttgtggtagattcatcattcatcaccaccactattccttttttaaactagtatagataccactatgtcaacttgccagattaggattgtactaatgtttcaacctacaatgcgacttgcccaatttcttttggatctttgaaaatgaagtgaaaccatcttcaattcaaatccatgaaaaataaggaaaacaaaaaaattgaattcagttttgtctttttgaatcaacacagagtgatcaaacccaaacagtataaataaaaggctgaaatagaatattctgtatttcaacgtgaccgtacaggttaaacgatggttttcatacgttaagtcatatctgaaaacaaatcaacacacacgataaaatgaaaactagacaaatagagatccatgtaacaaggatttgaaatatctctttaaaaaagaattgctctattgcatcatggttgtgtcccttttgatacatctggcatagttacatgtgtgattttacattggcagcaattattcaagcactctcagaagagcagcaaataataatcctgaatctacttacagagaagaggatacctgaaaaaaaaaagaaaaaaaactcaaagcctcataaaagctgtatatgcaggtgactctgatatttggcttcaagacaataaagatggattaactctcaaaaatggttcctctcaatgtgttttcctcttgcttgcaaggtgtggaaatgcaccgaggatgttgtgtgctatcaggtcctgccttgtcaagatccccacaattggagatatctgaaattaaaaaaaaaaacataagtttcatcaccgaactatgcacaaattgagttcaacaaatgatcactaacccgtattctacaaagcaaagcaaaattctagaaatgataagacactgataagacactaaatccccagttctgtaacaaaagaccaggacagaacacagattctgcacatatctgatttatcaagcacatacagaatccagagattattgtgatcttagaacaacatttacttgcattgtgatccaggaatgtagttggaaaataataagtaaattaataaacaaatacttactccgtttcaggttataaaacgctttgactttaatcaaagttaaactgtttcaagtttgactaaattcatagacaaatatgataatatttataatactaaataagtttcatcaaaccaataattgaatatatatttataataaatttgtcttggttgaaaatgttattattattttttctataaactttaatcaaacttaaaacagtttgacttggatcgtcttgtaaccagggagtaaaattcagtctgtgttttggcgctgacctcgggtccttggaacttgggcatgatgagcatgtggcggagcgcgacggagcggaacagcacgacggccttcgccaccgacatggtctccaccacggtgtacggcgtcgtgttcgtcagcgggtggaggtccacgtacatccccatctcctccggcgagatctccagctcgtccacgccgccgcacttgtccgcgagctccgccgagctgaacatctcgcgggcctcccactcctccgtcctcctcctctccggcaggaaccaccgcttcctcagcgcggcgacgaggtgcgaccggagcaccagcccgtgcagctccgataccccgggccgcggccggtccagcaccgggaacccgttgtgccgcgtcgcccggagcgcctccaccaccgtggacacgcgctccaccacctggagcgccacggcgcggggcttggcggcggcgagctcgccgacggtgaggtccttcatccacggctccggcttcgcctccaggaacgggaggcccttgaggtcgaggatgatctcgtagatgctggggttgaacgcgtcgccgacggtcttggcgatgaggaggacgaacatggtgattgggaggaggaggaggttgttggtgagctcgaggaagatgacgacgagcgacacggtcatccgcatggaccccgacatgagcgccgccgcgccgagcacggcgtataggccgtggtcgatgcgggcgaaccgcgacagcacgagcgccgtgacgcggccgtaggcggagcccatgaggatgatggggaggaagagccccgaggggacggcgatgccgaaggtgaagaggcccaggacgcagtagacggcgaagaagatgagcagcgagtcgagcctgaactcgccggcggtgcccgtggagaagatgttccgcgtcgcgtcgacgttggtggcgtggaggagggtggcgaggtcgttgtagtggccctcggggcagttgaaccgcttgaagttgccgctcttccccagcgtcgggcacgcgccgccgaacgccgggtcgcacggcgtgcacggcacggcgaacggcgtcacgtacagcagcgccgacgtgagcgcgcacacggcgagcgccagggcgagcttcgcggcgcggcccttctcgttgatgaggttgtacacgcggagcaccttgtggaggacgtggttgtacagcgcgccgaggacgccgccaagcacgccgacgatggtcaccgggaggaggtcgccggcgtggtaccggacggcgacgtcgccgacgtcgaacaggatgagcccgccctcgccgaacagaccgcaccgcccgttcctgcacacctcgatgaacccgcggaggacgacgacgacggtggccgtgctgaagaaggtgcgccacagcagcgcgctccgccaccacgtcgccacctcctccagcgcgaacagcacgccgccgacgggcgcccggaacgccgcgcacacgcccgacgacgcgccgcaggtgatcaggtcgcgccggtcgcggtcgttgtcgaagtagcgcagccaccgcaaccggaggcgtgccggccggagccgccctggctcagcaagttcgccaggcacgcgccgatgtgcaccagtggcccttccttcccgagatccagccccgacgacaccgcgcagatgctaccgatgatctgcgatgatcatacatttttttctactcgtcagtgtgtgcgcgtctgccgtttaatcgaaaaaaaaatgttgttccgacacgttggagaagtgtgacattttttttttgtgaccttgacaatgagctgcggcgcgccgaacatgttgggcgtgtcgacgccgttgaggtaggccttgatctccgggatgccggggccggcggcggtcggggcgaagacgacgcagagcatggcggcgatgaacgtcaggccgaagttgacgccggcgaaatacaagaaaccggcccagtatctgcagtagggtgacggcaaatttttcaccatcaagaactcgtcgccggcgatgaggaagaagaaggaggagttgtgggcttaacttttcttgcggacgagctgcaccatgtggagcatcttgaggccggagatgttctcgatggcgaggttgatgagcgacgcgatgacgccggtgaggaggccgacgaggaacgccatggcccacttgaggaagatgtactgcagcacctccacgttcgatcgcctcctccagtcgtgcttgaacagatcattctcgataattctaccaaattcacacatcacaaattgaaaaaaaatgcaagaacagattaattaaaccaaccgatcgagaatcaacaaatcaagaatccaagaattgatggactcgtgatcgagcacggtgaattagacatggaggaggaggaggagaaaatgctcactcgtagtcgaggctctcgatgtgggagaccttggcgccaaccatggcgaggtggctggccgttagcgtgttgctccgcttcagaagcggctgctccagcgagctcatggccgcattgcccgtgcacccggggtcctcggcgtcggtgactccgtcctcgagcttgcgctccggctcgccggcggcgagcctcgggctctgctcctcctccatggacagagctctgcttcttggagcagctcagaaacaacaagatgagatatgtgtgtgtatgtgtgttgggacaattggagggaggggaccgtttcaatgctcttatctgtggttctgcaagcaatagtggtgaggtgtcctcatataggggaataaaatatttattttgggggtgtttttgcaaaaaaaaatattgttgttttgcctagttgatcatttcacatggatttgaaattttcatgtttgattgagtttatgttggcaatttggtgcaagatagggccattggattagtctgatgaagaacaaattctttgcattgagggggcaggggcatgccctttggggagctaggaagggtttctcttttgcataaagtgaagggtgaaatgtagacagctcacttgatgcccacttggtcttggactcttggtgacaattattatttttactatggacaaatgggatcttgtgaagtggattcagagaaccatctcaaaggatgccaacaacaaagcaacagtggttgtcagtatctatgctgggttgaactttccaaaggttttggctcagatatattcagggttgataaggttgccatttgattaattagcaggtccatcctgcaaatcatcaacaattggaatgttgtcttgctaaccattctatcattctttgccaaaaaaggaaaaagaaaaagagaagccattctatcatcagacaacacttgctcttctagatatgagatgcaaaaaattcagcttctgttcaactccattttgatttgtctaataaaatttctgtccctaatatagcgcgctatgagtctatcttgctatttcacgtcaaaataattttcagtccctaagaaaaccaggttacaaagtgtcaatggagttgatggagaactaaaaaatccggttgtgccaatgcaagagttgtggtaagatgacatgaccatgaaacagaagaaatgtgattattcttatttttcacaacagcgatgcttatagtcataggtacaagttaagaaagtccaacagagtacaataatttgtgggacctaaagatgaatttcttatgtttggagacttacatgtcaattcctctaaggtttaaacttaccattctttttgtacatagcatgatgtagtgcacttttgtcttcaaaacgtgtctaatacgcagtacctgaatcactaagtatgtctcagtaataatatgtttgcatgtgtctgacaagcatcagttaaatctttgtctaaaagtatcagttaaatactttatgctctgtctgccacacgtgcttatcaggcaaaaacactgtttatgattatgatttactacggtcactgtttggttgagatccttcgatgtttctccgtagttatggtgaaagctcaagaaggcaagcatatctattttaatcattactgtatatgtccatttaagttcagggattagatcgtattatctgttagatgtgaaaggatattaattgaatttaactggaaccactgtctcgtttattcaaataagaaaactctagtattgaatagctgattatgctgttgttacaataatagtaaaattttaagatatttatttatgactaatatataattctatatataaacctgtccttatgccttgtgatttgtgaggcagcagagaaatggttggtttatcgataatcaaaatgaccagaacaaataattctttttttataagagaagatcaaataattcaattagtgcatatgaagatgaaatgaccacatttcttgtgttcccgcaaacagctgctgaagagaaaatacttatccaacgcgaaaggacatatgcttaattcatctccattttttctgttcagaatatatatatatatatagatgcttagcaaaagttgatcaagtattagtcttctaaactttatgtttaattatacgcatgtttcatacggctgcctagatgtttctggagataataaagagaccacattgacattgccttgggctggcctagaggagtggcaataattcaattgaatacataaatgtttaatctttaaactgtttttttatgacgtcccagaaaaccctcacaagaaaagataatgttacaggtcatatttattttgtttatgtttaattgttagccacgtattactatctagttcttattcattgtgaattaattatcacacagaatatttcgtcagacaaaatcaaatatgcagaagaaaaagttataatttatttggcttcagtcctatcacaaatgtgttggacttgtcattaactatgaatatttttattcaaaacaaaaaatttgaaagcttcaaatattaatgatacttgtcaccgtttaggaacttcaataggcgattaacatatatagcccaacccgtctcttcggagaaatccgataaattagaacgccacaaggacacaagaaaatggtttggattaagctatatcctttttacaaatttttgttgactctcttaggttatgctctgagcaattcatactggcatcattgattcttttctaaatgtaaatcattctagaacgcataaaaacgctatattttttctcttccaccctgcttaccaaatggaaccgctccccttaataattaaactactattttttttttgctgtagtataactgaagggcaagaaagtaatttgatcaacattctttgtgcgcgacacaaattcaaggctgattattatatatgtaatttgggggagggggtacaattcggtccatattaccttgcagttcaattcctttcttcttttccttccttttcaagcttttatcacatgaatttatttgtccatctcatctcctttacattctcctgaaccatctggaaaaatgaatcatgctctgaagataagagcaaaatgaagcttaccaactagaaaagctaagaagtggttgaggtccacaaatctgcacactgctaccactgatagcagcacacatgcagaacaaacacagccgtaccaccgtctattttgttttcgcttttgctagttgctcttctgtctcttcagggctcccaaagggacatttggacacacatggataagagctcatcattatcaagatctagtactcatttgccctttacctgttcttttctgctttgtctaggcataagccaactcacatgaaaagttagccctttaggattaaaggaagatataaacattacattgaaacaaacatggatgcatgttgtatttgggaatcaatcagccactgatttggaacatcaaaagatacaaggcatgattggtgccaatttaaaacccaattttagaaaataattaagggctttttcgttgcttttgcttcttaggatttgccttttgtgtttgagagcaagagaaatgaaaagattgagaagatacacaaaactaattgagctattagcgcacaattaatcgagtattaattattttaaacttgaaaaataaactaatatgtgtcgacatttgatgttgcgattccgatatttgcatagtatggggatcgttggtactaggatatatgcgagattgaggtaaaagagacggagacgaggatttttatacaggttcgggcccttgaattgtcaggtaataaccctacatcctgttggccgaagccggtcgttgctcttattcaccataatcacactagtataatatttggggtagcctatctaactgttgtcgacatggcggccgtgaaaccatcccgtagtcgacaacagggtagtcttcctcctcgagttcgtgcccagcgagatcagagacagcgctagatccctacagccggcctctgtaggtaccggatagggttggaccgggcatatctctgatgtcgatattcggcggcttgtcttgacgtatgttggcttgtatgttgtggcttctgttgttccatgtcccctctcctcctagggggccttgtatttatacccataggtgtctccttgtccaagtagaactagggaaaccaatatggatacaatccgagtagtacttgtcgtttccatgtagaattctagtcatccttccttatgcggaactccttctatatccgaaggttgtttccgtataagacatgtatgtggtgggtcctgccgagatttagttaactacttattaggtacgtggtatccataaccctgacaatatgattttttttcaagcaatttttctatagatattttttaaaaagtaaaatattgtttagcagtttggaaagcgactattccttttttttttcctactatcgaacgcagagaagtataaaaacatttcccaaaagttagtttttatcaccagtaatttaacttcggtttacacttctgttcttcgtagctatagctcttccaccttttattggaggatttcccgtggcattggcaaaggtagagagtcgtaattcgaagtaaatgtgtgcaaacgtaactgaaaatttgaatgccacattcctgcatgcatatatattttcctatcttcttgtactattttatattcttgatcgagagttgtacacgtctccatccctataatattgctttcatttcactactacccccataggttagcagcagcattgggtcatccggccatcaaatttttgctgaatcgatcgatctctctgaccaggttcctttgtctgccatccctgattgccgagtagaataaataattcgtgtgactcggagaaatgggcgagggagcaagcaatgtccgtggaccatggaaatgccgatgcaagaaagggtttgtgtttagttcacaccaaaattgaaagtttggttgaaattaaaacgatgtgatagaaaagttggaagtttatgtgtgtaggaaaattttaatgtgatagaaaaattggaagtttgaagaattattttggaactaaagacgacgcaagtgacaggtagtcgaagtcgacgacggatcgatgcatgatttcggcaataaaaatagtaaaacggggtccaataatgcagcgtgtgaggcaggacaggtaggcagggaggctcacgatcccaggcttccaagtcacatggattgtgaccggtgattgggcagtcaggacacccaaaaacggccttctgttgtcccaagggccggttttatccacacctaaaagcggccccttggttgtttctccgttttgccactggttgtttgcttgtttgtcgtcaatgccaccggtttgaggaggttcagctagccttcaggctttcctcatagccaaaaatgtcaatttttcacggtgttaattacgtggaaatcatgtaaattcatgtgcattcttcagattcatttcatttatgctggattaaaaataaaatatatcaccaattataagtgatggagagaaatcgctcaatagcaaaataagacggttaaataactacaagggaaattagttctttgacgattaattttgatataaaaatgttttttcaccacaatgtagtaattgtggccaattctgaagttgccactagtcgccactgataatcgagccacaaataatatagcgatgattttttgttcgccacatatatttataagtattagtgatgataaaatttatcactgataattgttacataaaaaatgacatgccgtcacaaataagtttagaatggtggcgatagtttcatcacttacgatttttatggtggcaccaaaaattgccacattttagtagataattatgattgaaattgtcactatcatgatttacaaatgtgattatttatgtggtcacttcttctgttagatctgtggcagtgttatgtcacttttgatgttttaagtggtgaaattgcttctcacctttgcatcattaattttcgctgattaaaacacgaataatagtgatgtgtttaatgtcacaaatgaatagttcgtgttcattttttatcacaaataatcattttttgtggtgagtacaacaatagaaaataagtatattttcagtgttttgaatgtacactaatataaacagtagatgtggcctcctaggcgccacgtgacagctaacttgagacatttatatttattcatactaggtgattccccgcgctttgctgcgggaattactaactaattctcaatatgttttttgacatattgataagtatattaaatatgataaaatgatagatcgatttgtcaaaatattgtgcaaatgatgtgaggggtgataattggatatgcttgcatgttgtatgcttgcatgaggttaaatatgtaattattgatagtgggtgatgatgttccacagtcaatattccaccgtcaatagattagacatcaagtgtgatatacatactcttttcattttgacttttttattagtcattctttttaaagtttgatctagtttataaaaaaaatacaataacatttgtaaaaggaaaaagtacgaataaccccctgaagtattgggtaagtatgaatttgaaccccccccgagcagctttgtaagcgattttggtctacgtggcagtccagtcagcaagttttttaataaataaaggatagggcccacctgtcagacataatattctctctctctctttccctctcaccccctctctctctctctcccgttagatgccagcggctgcggctcacgcgccggcggcagtgggcgcctcctccgccgccgtcctaatggcctccctgagacggcacaacgatggtcagagcggcggcggcaggccatgggtggagcggttgtggcggcaagccgcaggcaaagcggcggggcgaaccagtggtggcagagcgggacgggcagagaggaaggaggtgactaggccagggagcgggctgaggagggaggagaccggcgagggaacggggaggctgggagagtcatcggagtcatcccccagccgccgccgtcgtcgttcgagccgctcccgccggagtacgatgagcccaaccatactcgttgctgcgacgaccacctctggcccgatgacgaccactatgccccgctacccttccccgacgcctgctgttgctcggatctagcgcggcggcggagagaagcgccgcccgcctcctccctctcgacgcgctcgccgcatcccctccgcgggcgcttgccggcatcccagctcgtcttgacagcctcccctcttttgtcccctcctcccgccgccccgagctccggcgggcgtggtggggaaagcgagacgggcgacaggtgccgaggacattgaagatgatgacggcgagctcgggcgcggtggcggcatggcgacggccacgaccatgtcgacccaccactgtgcgcgctgacctcccgacggcccgagagagaggggtgacattggggcacttcgccgccctcgccactttgccgccctccgcctcgacaggggggcacaggcgccgtcacgctcactggccaccggccgcctttccaccacgcccgccacgcccgccgcttgcctcggccccaccactccctgccacgctcgctgcccgtccgcgcaccgctgctgctgccaattgcctgtcgacacgcgcctgagagagagaaggggggagggggaagactgaagagaggtaatgacaggtgggccctatatttttcttttattttttttgctgatcggatttccacgtcgacgccatgtgcatgtcacgtaggagcaaaaccgctcagtattgagtccggggggggggggtggtaattcagccggtatcaatagtttgaggtgtaatatgttcggttttggttcgggggggggggagagagtaattcgtactatcgcaattgtttggggtggaaggggggggggtaaaacatacttttttcctttgtaaaaaaaaagacatgttatcaacatatgttcaattttacattaaatgaaacaatttggtggtgtagatgttgttaaatttttctataaacttgatcattactaaataagtactaggaaaaatcaaaatgacttataacataaaaacggagtgagtatagtctgcactgtgctctttaatgttatctatccatttcgaaacaagggttgcaatcaattctcctatctatgttttataactcaaacattatttattcatattagaaacaaagtacatggtttatagcattggtaaatccatcaccacaaacatttatcccctagcgtgatagagaaaatgaccagagacccacagcgaacctttgtgatagtaataaagtgtggcgtggaggctttggagcacaaatccctactactataaagaggaagtcatcctcctccaccttctcgtaaaaacatctttcctaacaaaacccgtccaccctaaaaaaaatgttttctaataaaaccaaccatattcccaaaaatgaacagtccactagatctaaatcctcccactaaaccgaataaaaaaattcattgcaacagaaaacaaggtgagtggcaaaaccgacaaaaaaaacattgtaaccctccacatatgaatgataaactaaagatctctaaatggaaaatggctgaaggttgaagaaactgtttaactgagaccctccaattttttatcttggatccgcccctgatatgttgcacactacacggctcacacgggaggtgcccacatggcacaagatgatgatgatgaggcttggacggaattcttgtcggcgaattcggttctccacgtacgcagcagagagatggacgttaataacaaatctagcgagaacatgggccaatgcattatggagcttttcttggcaaataagatagttataatattccagatcggcttgtctcttttctgttctcatgtgcaagcaaacgtaggtatactaggagacgaataaaattttcaattctcatgtgcaaaccaacataggtatggtaggagatgaataaagtttaaattcatatgtgcaggtgaacgtagatattgtaggttacgtcaaaaaaaaacgtagatattgtaggagatgaataaaaattttggagcgagcagagctggtagagaatcaatggaatcgatgtgtggaaagaaaaatatacattattttttagccacggttggccacgaggtaccacgcagtcctagggccggccgcgtgtgaccaataaagatgccttgcatgcatacgtgttgtttggtcatgcggttaagccatgggactgatatgccgatgtcggatttatccctgcacggtgatacgtgtatatttttacaatttttttaaagacaagtatataactagaaaaacattaaaaatagtcttttttctctatgtgtgcatggtaatcgtcccttgggaatcgatgggtcaaccgtcggaattttatgatattttgctcccatttggaatagttggagattttaagagacacagttgatgacaatctgtaaaatactctcttcgtttctaaatatttgacgctgttggcttttttaaatatatttgaccgttcgtcttattaaagaaatttaagtaattattaattctttttgttaaatatactttcatgtatataaataattttacatatttcataaattttttttgaataagacgaacggtcaaatatatgctaaaaaatcaacgatgtcaaatatttagaaaaggagggagtaggcctttatatttttcttgctatagctcaaaagctagataagaaatgtattgcttagaaaagctgaatatttcaagaggaactgcagctgaactgcttttgagtgctcatataatcacgtccatggtattaaacagatccccatatatgatgaaatttgattttggtgtagtagagttactatgccgcattatgcaggcaggacaaatagaactgcaggacagtggtccagcaacagaagcaacgaaacgaagaaagtagcgttgagacaagtttttgcactgcagtaattctcggaggccaaaatccatatgaaattatgaatgtggagatcttcgtgacataattctgacagggaaaaatggcatgaggttccatgggctcaggcctagcccatacttcttatcagagccaggcaaaacctgaagtccagctccagcctcttttggactccacccaaaaattcataagatgaactacagaggtggaacacctcctccacctcttgaagttaaatttagaagctagagccataccaaacggaccataaaatcggagggacatgaagaaaccaattgttgagcacacctcacagtatcacgcgaagacaagaaaccgctattgcaaagtggataaacaaccaagatatacaattctatctcaacacccaccatgttgtgcactatatctagtataaagccagcccgtagcccagtaatgataaactgtaggtatatgaaatgaaaaacgtaaaaacatcagaatgaacgtgcaaaacaaagaattgaaaaacttaagagaagtatgagatgtgttgtttggatcacagcaattgggtaaacacaggaaccttgcaaaacaactagaaagtataattcccttggttaatgtatgatggtttgggtcattttggtgcttcgttacttggtttgccctgggcttagcagatgaattgaaaaacgaattctttgcaaaatgtttcaatttctatggaaactgtgaaaaagaatacaaatgaatgaatagtaccaactcctataggttttgaattcccccagctttcctaaaaaattcctacaaaccagagtagccctgaaatattttgcagcagagtgaaacccttgaagcaaaagtagaaaataaaaccctgaaatttctattctatcagcattcagtttacattcagagagatttcactacgattaataacctctgtatgaataaatgattccatgttccccaaaacacatcaacataataccagagtccctgacactgcaaaacaaaaagtactgatataccttgtttccaaaccacctcatcaacttccaagggcagattgaatagttggaatagcataaaaaacatgcatttcaaatcaccataaattcacaacttaagaatggatactgatacatgtctaaacataatggcttttaatcttcaaagctaaattgttgggtgcaactgcaaacaatatgatgacatcaacttcaatcaacatgagaaattaaaatgaggtgcagaactacaaacagaagattcaaggtgcagccgtagatgttttgttatgttaaaatgaggtgacaagtcatccataattggcaatagaagatttaagaaacaataggaattgatccaaactgacaaaaaatcaagtacaggaatacatgccctgtttggaatagcttaactcaagtttttttggactggatttttctaggtccagaaatttgcggagttggaccacctgtgagattaagcttgttaaaacaagaaattttgttaacatttgagatcagaaagaggatccttcaatttaatctacaaactctactttctatacaaatgcagtaagtagttggaaccaagccaaactgagccacagtattcaccatgacattttgatattatgcagatgatccttgttgctaaattttttatattgaattctagatttccagtataaccaacacagaatccatgaaacaatacttgagtgaacaaggggtaaatcttacaaggacagaataaaacattgacagagcagaacagaaaaggctgatattgtagatggatgagtgtttacagacaagagtaagcacaaatagtcaggaatgcttagtttacgaccttaacttaaattgatcatgctattgaaggtcatcaatcaagaaaaaaatgtcaagaaacaacactcgataagaaaacatcacaactaccttaacacaatgaatttggtttctaggtaatttctgctgaattgtagtccttagcatactatgatccattatgtgcacaagcggtaccagccactggttgaattaaccacaaaacagattttaaaagtatcaggcagcaggggcagaaaacttatcataaggtgggcaacaccaaagtgcagcgaggacaactttgtttgccaagcatctctgccagtttcaatgtcacagttgcaataattagttcaaaagctcatgcagtcatgctcttgtctaagactattaccacataccgattttctgggcaattaaagcagataacaggtgaccagcaagcaagctaattctcacttctcagcaacatgctatgtaccacaagtatgtagcatccccataatcaaaagttgagcaattataatatcatcataagaacaagtgtccacagattaaccgatcaatcaagaacatctgctaccctgaacctgaaggctactacttgttcttgccggccttcttcttacccacggtggaaggggtggcgctgacctgcgggcgcgggtggcggtcggcctcggcggcgtcgagccacttgagcgggtggcggttgaagaagggccagttcgggacggtgacgagcgcggtgaggacgaccccgccggcgtagacgagcagcatgagctggaagtccgccatggcgtagcccaccacgaacgccgccaccgccgacgccaccagcagcagctgcatcagcatctccgcgagcttctgcccctgccaatccatctgcgagcaagcacacacggggatcaggcgaggcggatcttggatggatggatggatggatcttgggtgcgctgatgaggaagaagggggatctgagggaaagaaggacggggtgcccggataggatggaggaggaggggttggttaccttgggtgattcggccggcggcgggagggggagtagccggaggagaggacgacggcggggaggagtaatggagcggatctgttcggaatgcgcggcggcggcatctacggggagtaaggtccccgaggctgtctgtgctgggcaagcccagggccattcaaggcccggttggacagagtgatgggatgggtcgtgttgggttgggctgcgctgtttttctaatcctatcttagtaaaaagtataccgaaggtacctcaacttgtcattgagttacaaaatcgtcctccaaccgcaaaaccagatatccgacgtcgcttaactaatcaaaaccggccacaataggtcctttggtggttttgatcccgattttatcctacatggcggctgagtcagtatgggacccgcatggaccccgcctatcaacatgccatgtgagcaccctctctcttccccttttatccattcctcctctctctctcactcttctcttggcaagccgatcggtagctgggaagaggccgccgagccgaggtggcggcggcgaagcggtcccgcatgggcggccgctgcggcgttgggcgtggaggccgacgaggacgtgatgcggtgatgatgctggtcctcccatcctcatccaccgcgccgccattgctgccgacgccacagacggctcgcctgctcccgtgccgccggccaccggcgagaacgtgcgaaggaggaggtggggaggtcgacagcgagcacgcgtaaagagggaggatgcggcgtgggagccgcagtgcccgtccgcacggggccgcttcgccagcggcggcgacgcagccgatgccattcgcgacctaccaccaccttgattaggcgtccttcttcggatcttgctcgcccgtgacgccttcatccttcttcggagcgacgacgggcggtgggcggagtagagggacgatgggcggtgggcgatgcgacgtgtgcccgcagggcgaggaggggctgctcgctgcggccgggcgaggagggaggcagtgcgcggtagccgggtgaggaggggcggtgcgcggtggcagaggagggaggcaacgcacggcggcggggcgaggagaggttgcgcgcagcggctgggcatcgcaggcggagcagccgacggcgtggagctgccacgctcgctggtgaactttccctcctcctgacggcaacgacgacaataaccggaggcagacctctacaccatcgacaccaaaggcgaagacgaagaggatgctgacggtagacgggctgtcacaccctgaagctcttctcccaagcccaaatttaattaataaatggtattgagaaattaccggtgtaaaagcaagagagaaaccctaattgaattaatgcaaataataaacggaaatggcatgtggaatttttcttgagttctacatgtcaaaatatgctaacaggatttttagtgaaattttcagagctctagaaataattttaccaattaaaaatgagcacaagcattatttaatccctggaaattcttttcccctttctcctttttctttctccctctttttcctaatgggccgccggcccattccctatccttctccctcccgcacccttgctgggccggccgaaggccacggcctagcagccgcccgcacccccctcctctctctctcccggggtcgccgacaggtggggcccacctgtagggcccgtctacaacctccacccggaggaggaggccggcctccccaaccgccactcccacctctccctcgcctcccgggccacgtcgcccatgtcgccgccttcccccgcgcctccccgcgcctactccctctctctcccgcccgcgcccgcgccgacacggccgggattctttttttgaatcccgccggccacaccctctctccaccccatactactccggtgaaatcgggccatttcctgctcccccgagccctctcttcccctatttaagcatcactgcacctccctctccctttttccccatttcgccgagcctcttcgtgctctcctccgccctagcgccgctgccctcctctccgccgccgccaccgccgctccagtcgccgctagcagccgctagccgtcgcgtcgagccgcgccgtcgacaccgtcgtgttcgccgtcgtgcgggccgcctcgtccacccctcctccgtcggaatccaccgccggaactcctccttcgttgcgcgccggtgagcaccgccatggccgccgccttcggctggcgttcccgctctcgatgatctctctctccctctctaatcttccctatttttgttccttaggtcctcttgaagcccgtccgcctctcgccgtccgccgtccgctgctcgccgcggcattcgctgtcggtaaggaaccccctcccatccctctctctctctcccatactgtcgacgctgttttgtcgcgtcgcctcgctttggggccgtgccgccgtgcgtcgccgtatagccgccgccgccccgccgctgtctgccgcatcgccgccgccgtccgccggtcgctgccggtgccgcgctgtcgccgcgtggccgccaggaacgtgtcgtggggctgtgtcttgtgggtacaggtgtacacatctgatcagagtaatactattcgaatagccatgcccgcggttatgggcggtcaaccagattcaccgtgattagtctcaccctagtttagtctaatggaattgattagttcaagaggatggttgggtctgttgcaacgtggtgtagcgttggacagtggatggtaaatattgtttaattattacaactgttttactgctttcaactactgtttataaatgctcgctttatgcaaatgaaccgctctagctaccctttggttatatcctacatcataccccctctttcggtatgacttgctgagtacggtggttgtactcagtcttgctct

SEQ ID NO: 26029 - DNA, 3656 bp, Oryza sativa
cagagtaatactattcgaatagtcgtgcccgcggttatgggcggtcaaccagattcaccgtgattagtctcaccctagtttagtctaatggaattgattagttcaggtggatggttgggtctgttgcaacgtggtgtagcgttggacagtggatggtaaatattgtttaattattacaactgttttactgctttcaactactgtttataaatgctcgctttatgcaaatgaaccgctctagctaccctttggttatatcctacatcataccccctctttcggtatgacttgctgagtacggtggttgtactcagtcttgctctacttttccccaacccctgagtttgagtatgcgtcagatggtgtgttttccgaggagtaggcttcatccgtgccgtcgaggatgcctgtggagtggtgttcccgctgcaatctaagtcaaggcttagctctagttatcttttattttccgctgcatttatgtaagacttttataatatttgtaagacgtggatctgtatgtcaactttatcgtttgtgtaccccggccggtcctggacgggggttttaatgcacattctacttggcatcttgggtacctacctcgccaacatggtggttgaggcatctggaggcaccgctaaccacgcctgctaggaggcggcatacctgatgatggccaggcttcgtgaccgccacagctacaccttccgcagcacggcataccgcttccaccctcgccgagcagatgatgacgacttcagtaccttccacccgacggctggcgagaacgacaccaccttcagccacatttgtgccgtgatgaaggggatggacaggatgcactctgacctggacaaggcatccaaggccttgaatgatggaaaacttgtgaggattatagccttgaaggatgagataacgcgcctgaagtaggagaacgctcagctgaggggtctcccagctccaggaggggtccggatccgcaccacgcccggcaagactaccactgcacccgtgcgcactcagcttgcgcccaggaacccacctcctccagcaccttccgcatcaccagcacctctcgcagctccagctctagctcctgctccagtgtcagcccccgtgtccgccctctccttcgctccagcttcagcctttaggggtccagccagtggcaatggaggttggttgcctgctactcccagtggcagccgcgaccgcaacagcagttccagcagcttagagccgggcagtggcgagacgtacctgcaggactccaagagccgctcagagggaccaggagacgagcaggaggacgccttcgactccactgaccgcaggagccgttccgagcattaggctcattttcagttagcatatcgttctgcttagtaattgtctgttagtttgtgtgtttaggtttgttcacttgtgggtcagtcgacggtcgatatcatatgcctatgatatggctgtcctaataaggatttgcttgctgttttaagtgttttaatttagatcagaacaattgcagtttaaatttctatttaataaagcttagttcctgagcatctactcttcccctccgtctgctcctccttcagatggtctacaccaggaatggcggccgcacagcgggtgagggcagcagtggcgaagaacgcgccgatggtggacaccccaacagcgcctccggcaatggttcgccaccgctccccgagaacccaatgcttgcacaagtgatggcccatcagacccagatgatggcggccatgatgcagcagatgtagcagcagcaccagcaaatgcaccagaggatgcagcagcaggctgatcagcaccagcagcagtttggtccccctccccctcagtccaagccgccagagtttctacgcgtcaggccacccaccttctctagcaccaccaaccccatggaggcaaatgactggctccatgccatagagaagaagctcaaccttctgcagtgcaatgatcagtagaaggtcgccttcgccacacaccagctccagggtcccgcatcagcttggtgggacaaccacgtggcaacccgtccgccaggcacagaagtcacttgggtgaagttctgtcgcagcttcaagaaggcgcaggtgccagacggggtcgtggcacaaaagaagagaaaattccgggcactcaaccagggcaacaggacagtgactgagtacctgcatgagttcaatcgcctagcgcgatatgcatcggaggatgtccgcaccgacgcagagaagcaggagaagttcctatcaggcctggatgatgagctgaccaatcaactgatttccggggattacgctgacttcgagaagctagtagacaaggcaatccgccaggaggatcagcgcaacaagctggacaggaagaggaaggccgcctagtttagggcacaccggggaggtcaccataggctgcgcttcactcccagacagcagggtggacccaccaccatgattgttcgccagcaccacccctattcttccggcaacttccaccagggtgccagtggatgtcagaaccaccagggaggtcagcctaaccgcagtgcagctccgcgcctaccaatggcaccagcacagccaactccaccaactcaagccaagaaggagaccagagcaaagccagggtcctgctacaactgtggcgagcatggccactttgctgacaagtgcccaaagccaaggcgtgccggaccaaggttttctcaagctcgcgtcaaccacgcgtccgcagaagaggcacaagtagcaccagaggtcgtactgggtacgtttcctgttaactcaatccctgcaacagtacttttcgattctggtgcaacgcattctttcatttccaagaggtttcttgggatacatggggtaagaaaagaggagcttagtacaccaatgagggttcataccccgggaaatagttcaaccacggtcagttatagcccttcagtgctaatagaaatccacaaatcacaatttctagccaacctcatccttcttgaatccaaagacctacatgttattcttgggatggattggctgaccaagttcaagggtgtcattgattgtgcaaatcgcacagtcaccttgatcaatgagaagggagaaacagtggtgtacaagtcaccagtctcaccgaagcagggaatctccttgaatcaaattaaggtggaaaatccggtggtcaccgaggagaagagtttgaggaaattggaaggtattcccatcatctgcgagtatccagaagtgttccccgatgtaacgccccgattttcgttcgggattaaaaatcattaaataatgcattttctaaaaattaaataaaagttaatcaatttaatcaagtgaattattgggcgaattaaaattttcccttaaaagatcattggccgagaatattttgtaatattctttgtgccctaaaacactctccggatttttccgtgaattttcggagctcaagaaataattttaaaagcacaaaattcattttaaccaattaaaaaaaaagaaaacaaataaaatccccctcccctcccttttgggcttggcccaagccttccccttctcttccgtgggccgcgtgcctactacctctttcgggccggccgcgccttgcgaaagtct

SEQ ID NO: 26030 - DNA, 7023 bp, Oryza sativa
tgcttaataaccactagcttagttgatgggataatacccgtattagaccttttagtatcaaaattaagctgcgtgctcgagacatctgcccatgcttcctggtcgtaattatccaactaaaatgcgactgaatggtgggctgtgggtgcatggttttgctggtcgcacccatggcagttaaggaccggttcgtgggatgccctgaaagaacttatcgtacttaccacaagccagcgtggggaacggctgggcttgtagtgtagctttcctctagtcaacgcatccaggcaagggtgggcgtgatggagcggggcgggccctgcgacagcctctgtcgcttccggattcacctaggcacgagaggggactgcccgttgcccgctggggacgggggtgaaacctgaggtgtggtgtgcttggctagagggggttatgcgaagggtcctgtcacggcctctttccggtatgtcgtggtggcatgtcggtgcacggaaacgtgtcgtggggctgtgtcttgtgggtacagttgtacacctctgatcagagtaaaactattcgaatagccgtgcccgcgattatgggcggtcgaccagattcaccgtgattagtcccatcttaataaatcgacccaatacactgtagttctggtgggttggttgggcctgttcaacgtggtgtagcgttgatcagtggagatgtaatgttactttaattactcaatagttttactgttttgctcaataaaatgttttacaaccgcctttatgcaaatagccacaaaccatccttgtatccccttgcacatctgcatcgttggtgtggcttgctaagtacggtggttgtactcagccttgctattattttcccctttttagaagtgtagtgcttctgagctgaagacgaagttagaagaccaaggctctgaccctagttgagttttgcctgtggagtggagctgatgccccgctaggatcgcttttttccgctgctgctgcttttgtttcggtgtgaggactaagtgcctcttctgtaagtattttacgttttatttacgtttggaactgtatattacttgtcgttttgtgtaccctggctggtcctggacagggatttaatacacaaaatagtctggaaatttgggctaaatttctgggcgtgacaaagtggtatcagagccaacttgattataggttgagccaaatggtcaaaccctaaggacaagttttctgaaaaccctatttgcaaaatgtctcctcttgcccttcggcatttctttgcgaaatggtttttaaatttctcctccctgcccctccaattcttttagttgtcaaacctggaggacaaaccgccagcgtcatgcctgttcggaagtcaagtcgagcctcaagcttcgtgcaaagagcgaaaagatctgcccagagtcgtcgttccgcgaagattaaagaagagtttccccagagatgacctaaacccaatctgtcccagaagagtagtttcgttagcttctagatcgtgtgttgtttgcttgtgtgtaggggtatggtttgcgtcattggtggggatgcgaccatactaggttgtttgcttaagcaacttgaatcaataaaaatctactcacaacagatcattagtcaagtggtttaaggtcttatctttagcaacccctctcttccacctctcttccgccctggcagaagatggacagtgttagagagaagagcaacgatggtgtattaaagtcacagatcaatggttcagttgaaagctgcaaggtaccccaatgccagaagaacccctgctcctgattaacttttggtgtccaagaccagatgatgggtgtattgatgcaggagatgcaaagcttgatgcaaggtcagatgtagcggaagtaactccagccgcagtgtgttgaggtcagaatcagtggatcagtccgagacaacaagctaccagctgagtcagagcacctcgctctggtcagattatggttagccaaggtcagatgatggatgtgtcagatgttgatgcagcaaccacagagtccgatgcaacagatgcaacgacagtgtctccaacaacaggtacaagctcagatgcaagccggaatcaggatcagagccaaagccagtttgttttccaagagcaagcacccgcaaccccaaatagtagaccaccaagcccttagcagaccagcacagccaagccgccactaatcctaggagcaacaagtgatacctacagaaggtatgggtttcgagggcaccgataaagattctattgtttcgctagcaactgcttcaaggctacagaatcagcattagtagggcaatcaatgtcagggaatcagtgatctactttaactacagagagacagctcaattcttcagcagcgactgcagtcaatgtctcaagcatcagacttcaatgtggttatcaacatcagccatgcacctcatgctgctccagctcagtggtctggcaagaaattaatagaagagttgcaccaacagtgagaaggtctcgttcctttcagctaccaagaggattgatggttgtcttaggaacgtcatcagtcaaagttttgttcttatgggagcttcagctcgtaaccaacaaaaggacaagtcaaccatgtcagaatcacaatgggtaaatgtgctaccgattagcagttcggtaagcaagagtcaacaattgtgcacaggcctttggtgttcaaataccgtcctcatgcatagaagttccaatccagtgatatagttggaaggggaatattgaatagagtaggagtcaagcggttctttccttttcacctttgagtatgcaaaagcaagttaacatgtgtatctgcaagttacaagaaaccaagagtttcccttctaactcatcgcacttttgttgtgctccaaaacctgtttgcgagccagtaaagaaaggattaaccaatgaagtgacaatggttggatccatagcgctcgacactatgaaatctctctaaaggcagtatcaagggtattcaagtgtaaggagtaatgaaaaaaaaattcagaagtaacaccatacaaggaatcttgggaactctctactcgtggaaaccgttagagaatggtaagctgcaattacaccttagtggtacgattacgaatcatggatggttctccataagttcgaagcaaccactatgaattccagaaatcctcatgatgtttctcggaagttggcagaaattgttccatacatgggcgagaaatatacaagaatcagggtgtgtggcagagaacctcttttctacatatcagctttaccgaagatatgaatgtgaagttgttatcatcagagagtagaaactctcggcagcatcaaagtcagttttcggcagacgcccagattgcagtattttggggaaagcagttgcagggcttatagtacgtcaacccaggaagagtcaacaaaggaggatcgacgaagtgtaatgtcgtgtcaagagaaggactcttgagtttgatctgctaagtgatcagtgcttgtttcacagagtgacagctatgcaatctgtttaagcatatggtaccgaagtcaggccagaagcatgttagttatgccagcagtagaactgacggggaagtagtcaagagttagtaagatcaggagctaaatgagaatttctttatgaggagtttcctatcaacaactgagggttaagttccaagtcttgtcctggatgaaagtgcatcgtcattgctttattttgattgatcgatgaagttttctattttcaaagtcagggccattcgtaaattcgagaagtgtcgatttttcttcaaggacaatagttcaattattcccggtcacgcgaaagtatgactactctctataaggggggtaggtcgcagagatgagttttggttcacctcgttgccgtttcccttaaagattcaacccagtgcagcaagttggttagtacttgaaagagccagctgcaaggcgtcagcagagtaacactgatcccaagttgtctaattgaattcgaaggtacgccggtgaggccaggtcaaccgtttggcttaaagaagtagcatcaggaacagccgcaatccagacaaggacagaccaagccaatttcctgaaaatacttgtggtttgaatcaagagcaagtcaagcaaagtcattgtctgtgggttacggaagtcagtttcaaggttttggaaaaactacaccgatccccggtcagcaaagtgaatcctcagtttatctaattgccagcattagcaattcagtccaaaaaaaatagaagttctacgagcactagcagttctggtcaaggtcagactaatcagagtcggtacgtcagtttatgggaagcaacagaacagcaagcttatgcaggtttggttcatcgagcaatcggtcagttgaatcagaaagaggcagcatgtgtaagcagatcagtcagaccgctcgccagcaccagctttctttctagccatcccagaatctcgggacgagattcctataaggggggtagatttgtaacgccccgattttcgttcgggattaaaaatcattaaataatgcattttctaaaaattaaataaaagttaatcaatttaatcaagtgaattattgggcgaattaaaattttcccttaaaagatcattggccgagaatattttgtaatattctttgtgccctaaaacactctccggatttttccgtgaattttcggagctcaagaaataattttaaaagcacaaagttcattttaaccaattaaaaaaaaagaaaacaaataaaatcccctcccctcccttttgggcttggcccaagccttcccctcctctcccgtgggccgcgcgcctcctccctctctcggccggcccgcgccttgcgaaagtctgctttacgtcccccggtttccctcctctctctccatccggccgacaggtgggaccgtggaccccacctgtcagctcctcctcctacctctcgccggccaaccccaaccgccattaccggccacgtcccgccaaatccggtgccctcccgctcgcgccttcgcgcccaaaccaagtaaaatcggttcctcaccacctcctccaccaaatccctcacttttccccaatttttggcgccaaatcgagcccccacttcgcccacgatgtcgcccacgtcgccggccgttgccgcctcaaatccaccacgtccggccacgatttctcctccccaatcctataaaaacgatccctggagcatcctctctcttttcccctcctcacccgagcccgccgcgctctctctcgccctccccacgccgctcccgcgcgccgccgctcgccgtcgacttccagccgcgcgccgtcgccgctccagacaccgccgcgttgcgccgccaccaccgttagcctcgttgtcccgagctccatcccgacatccactttatttcccagaaccactgccgtgatgccgtgcccgcgcacaacccgagccgccgccgcttttgccgcctccagccgcctcttgctgtagcgcccaggccagctgcgcctcgtccgctgctcggtcgtcgtcttccgccgctccaacccatcctctaagttcgcctgtgagctctacctcttgtcgtcgccatcggccttcatttccagtcaccccgcatcggtcctcccctccctaactccctcttctccttctgaaggtcaagggcgaccccgtccgccctccgtcctcgcaagccgccatcgggcaattgtcgtcgctgtcatcttcctccgcgccggccgccgcttccggtgaggacctctcctcccttcccattttttcccgtccccctttcttgccgactgccgcctcttggggtgcgtcgccgtccccgtgcgcgccgctgtcctccggccgcccgccgccgttccacgtcgccggctgctgccgccggtggccgcatgccgccgccgcgccttggctcggccgggccggcttcgtgccgcgcctgtgcccctggctgccgctcctctcggccgcccgatcggctcaggccgatctgggctgtccacttggtggacgcgcacccgaggccacgtgtggaccatgtccaccgtgcgccctccccctttgagtcgctgacatgtggggcccgcgtgtcggcgccggccgccccttgctgacgtcagcgaggtccatttcctttgtaaaaataaataataattgcgcaataaatcgagtttaattctagaaattcatttaaatggctcaaaacttctaaaattgatatctaattcatacgaactccaaattgggccattcaacttgcaaaattcatctaaaattgatctctatatgtttgtttactttttatgtactattcccttggtttttattagagtttttccttgttttgcgtgccagcgtgtagttcccgtcgtttcggaagtccgcggtcgcgaggaaaagagttcggaagatcaaagtgaagaagcaaggcaagtcacacattccccttgagcatgttgatcccaatttacaaatgttttattgtttgcaaataaatatgcatattttgctaattacatggggtcatggttttacctatctgctcgcttgtgccatatttacttgatatatgtcctttgtcaacattgggtaataaatggactagctcatgttacttatgtgacctagctagaactatatgcttagccatgcttaattaccactagctcagttgatgggataattaccgtattagaccttttagtatcagaatgagctgcgtgctcgagacatctggccatgcttcatggtcgtaattatccaactaaaatgcgactgaatggtgggctgtgggtgcatggttttgctggtcgcacccatggcagttaaggaccggttcgcgggatgccctggaagaacttatcgtacttaccacaagccagcgtgggcaacggctgggcttgtagtgtagctttcctctagtcgacgcatccaggcaagggtgggcgtgattgaagcggggcggccctgcgaca

SEQ ID NO: 26031 - DNA, 17653 bp, Oryza sativa
ttttgtcgagaagaaggacaagacgaggagaatgtgcgtcgattatcgcgcactcaatgaggtcataatcaagaacaaatatcctttgccgtggattgatgatctgtttgatcaactgaaaggagctaaggtgttttccaagacagacctgcgatcaggctatcaccagttgagaattcgggaagaggacattcccaagacagcgttcaccactcggtatgggttgtatgagtgcacggttatgtcttttggactcaccaatgcacctgcattcttcatgaacctgatgaacaaagtgctcatggaatttctgtataagtttgtcgtggtattcattgatgacattcttatctattccaaattggaagaagagcatgagcaacatcttcatctggtactcaagaagttgcaagagcaccagctttgtgccaagttcagcaaatgcgacttctggttatcagaggtcaaattcttgggtcacgtcattacagcttagggtgtggcagttgatccatcgaatgtggagtcagttaccaagtggaccccacctaagacagtgtcatagattcggagtttccttggacttgcgggttattaccgtcagttcattgaaaatttctccaggattgccagacctatgattcagttgcttaagaaagacgagaaattcaagtgggcagccgagtgtggcaagagttttgaggagctcaagaagaaattagtgtctgctccagttctgattctgcccgatcagacgaaagacttccaagtctattgcgacgcgtcccgccaagggctaggatgtgttctgatgcaagaaggtcaagtggtcgcatacgcctcgcggcaattgcgcccatatgaaagcaattaccctactcatgatctagagttggcagcagtggtccaccctctaaaaatgtggcggcactacctcatcggtaaccgttgtgaagtttacacggatcacaagagtctgaagtatatcttcacccagcctgatttgaatctccgacagcgaagatggttagagttgataaaatattacgacatggggatacactatcatccaggcaaagctaatgtggtagcagatgctctgagcaggaaaagctactgcaacgccttgggtattggagacatgagtgacaagttgctacaagagcttgaacatctcaacttgggaattgtagaacatgggtacgtggctgccctggaggcacggcttacgctcgtggaccaagtccgagcagctcaggtaaatgatcttgaaatagctgagctgaaaaagaatatgagggtcggaaaagcccgggacttccatgaagatgaacacggcacaatctagttgggagaaagattatgcgtacctgatgacaaagagctgaaagacctggtactcagcgaggctcatcagactcaatactccattcatccaggcagtacccaaggaggaggccggcctccccaaccaccactcccgcctctccctcgcctcccgggccacgtcgcccacgtcgccgccttcccccgcgcctccccacgtctactccctctatctcccgcccacgcccgcgccgaaatggcctgcacctccccgcgcctactccctctctctcccgcctgcgcccgcgccgaaacggccgggattcaatttttgaatcccgacggccacaccctctctccaccccccactactccggtgaaatcgggccatttcccgctcccccgagccctctcttcctctatttaagcatcaccgcacctccctctccctttttccccatttcgacgagcctccccgtgctctcctccgccctagcaccgctgccctcctctccgccaccgccgccgccgctccggtcgctgcaagccgttgttgccgagccgcgccgtcgacgccgtcacattcgccgtcgtgcgggccgcctcatccacctctcctctgtcggaatctaccgccagaactcctccttcgttgcgcgccggtgagcaccgccatggccgccgcctttggccggcgttcccgctctcgatgatctctctctccctctctaatcttccccatttttgtgccttaggttctcttgaagcccgtccgcctctagtcgtccgccgtccgccgctcgccgcgccgttcgccgtcggtgaggaacccccacccatccctctctctctcccgtactgccgccgccggtttgtcgtgtcgcctcgctttggggctgtgccgccgtgcatcgccgtgtagccaccgccgcgccgccgctgtctaccgcatcgccgccgccgtccgccggtcgccgccggtgccgcaccgtcgccgagtgcccgctgggccggcttaacccgtccgtgcgcgccgccgcgtgctgccccgccgtggctgccacgtcggcgccacgtcagcaccacgtggtgcccgcctccctcccggtccgagaacccggtccttcgcggaccggcatcccgagcctatgacatgtggggcccacctgtcggcgctgctctctctctccgatgacatcgccagggttaaatattatgcaataaatcaattaaggacttttctgtttatagtaaaatcacagtgaatcttctaaaattcatagaaaattcatccgtgctccgtttaagcccattcaagtcttagtaaatcaagaaaaatgcaaagaatccattaaaaatggttttgttctctatttcagtagtcttacagcctgtttgcattgtttgctttgtatgtcgcttagattctggctctcccgacgctccggtgtacattgagatagttgccgaggttcctccagtagcagagcaaggcaagtcatgcttgtcacttgaacatattgatcccataatgcaaatgctctattgtttttctttaaatactgaattgttttataatgttactatggaatggttacctactgtttcagccatgctatttgtaccatgctcctttgttagcttgggatataatatgaatagatattggattagggaatgcttagccatgcttaattcaagtagcacacaatgggccccgcaaaaaaaagtagcacacaatgggggaattacattaatgcatagatatcagattctagtattgatgttggtttagtgccaccattccggtgttggttaattaaaagatacaaaatggtgggctgtgggtgcatggttttgatggttgcgcccatggcacttaaggacaggttcacgggaaaccctggaagaattcctcgtacttaccacaaccagcgtgggcaacggctgggcttgtagtgtagctttcctctagctgacgcatcctggcaagggtgagcgtgttggagttcggatgggccctgcgatggcctatgcggctttcagattcacctaggcacgataggggactgcctgctaccttgcaaggagtgggggtgaaacctgaggtgtggtgtgtttggttagagggtgttatgcgaagggtcctgtcacgacctcttttcggtatgtcgtggtggcatgtcggcacacgggaacgtgtcgtggggctgtgtcttgtgggtacagttgtacacctctgatcagagtaaaactattcgaatagtcgtgcccgcggttatgggcggtcaaccagattcaccgtgattagtctcaccctagtttagtctaatggaattgattagttcaggtggatggttgggcctgttgcaatgtggtgtagcgttggacaatggatggtaaatattgtttaattattacaactgttttactgctttcaactactgtttataaatgctcgctttatgcaaatgaatcgctctagctaccctttggttatatcctgcatcataccccctgttccggtatgacttgctaagtatggtggttgtactcagtcttgctctacttttccccaaccccagagtttgagtatgcgtcagatggtggcttttccggggagtaggcttcgtccgtgctgtcgaggatgcctgtggagtggtgttcccgctgcaatccaagtcaaggcttagctccagttatcttttattttctgctgcatttatgtaagacttttataatgtttgtaagacgtggatctgtatgtcaactttgtcgtttgtgtaccccggccggtcctagacgggggttttaatgcacattctctttggaattctattcgggaatttctgggcgtgacacgggcggaggcgttgaagatgagcatgaccgcgggctccgtaccgggagccggagcccgccttccattctccagcaagcatgcagctccacgccgtcggctgctccgcttgtgctgcccagccaccgcgtgccgccccttctcgcccagccaccgcgcgccgcctccttcttcgcccgcacgtgagctacccctcctcgcttggccgccgcgagatgctccgcccaccgtccgccgtcgctccgcctactgctcccctctgcccgccgctcgccgttctgtacgagtccgggatagagagggggggatagagagaagagggggctgacatgtgggaccacatggtccccaccttttcttattttttgtgtggttgacatgtgggtcccatggttttttaattatttttctgggatccaattgccacataagtgccacgtcaataccacgtgggatgaggacctagtcaaagggagccacgtaggcgccacatcatccaacaccgggcacaatacttccgaggtaccttttctgcacggttttataagttgagggatgtgttgtatccggttttctagactgaggatgaaaaaaagactgggcgacaaattaagggacctaaactgaacttattccccctatagttcaacaaagaaataagttcacctgtcgtccctcaacattacaccgagtttgtggaaatacgagaaatcttcacccctaaattatacaaaaccgttcaatttagatcccatggcagtatagaagcctggtttcgctacgtggcatcccactcagcaaaaaaaatattaataaatatatgggacctatgtaagtgagagaaaaaatgatgtgggccccacatctcttctttcctttttctcttctctcctctcttctcatttgctttcttctctccaccacgcgcggcggccggtggcagagcaggcctggcggcgcgccgagcggacactgcagccagcgcagcgagaatgacgatgcacagagtggtcgcagcaacgggcgagcgcgcggggaagaagagggagacggggaaaggaggcggccgacacgatggcgccggcgatagaggtggagagaggcggccacgtgacggcgctggcgggagagggggagagaggcggccggtgcgaccgctcgtgacggcaggggaggcgcccagcacgggcgggagaggggaacagaagtggccagcgacggcgaggcgagagaggcgaccgtgtgttgcaacgggtgaaatctattttaatgttattattgttatatggtttagtttagatgaaattcactatgagagttcgcttggatatatatatttctagaaaatcatgagctgcagttaggagtccgatcgtctcaagttagcatgcaagtttctttaaacatatttcttacatgattcctgctgtattaccaaaagcgaacgatcttaaaaaccgacttaaatacggatatgtatttctaaaagcaaacaaagttaaaaactgacccatacacgaatgacgtatcaaaataccggcaaaaatatcttcaacttttataaaaaaaatgcccttgtgttgcaacgggtgaagtctattttaatcttattattgttataaggtttagctgcttaaaacctaattctgaacaaacatgtagctatttcatttgacatttttaaagtaataagaaactcttacacttttaagcctttggtctttttaaagctatgagacactcttacattgtttaaccaaagaggctagattggagtagcttattcggagatacaactctatataagccaaaaagtcggcttaaaaatttaagccaataagcctatgcattgtcacatccggaatttctaatcaaaattccaaacgcttacatgtgtgtaaaccctcgtccacgaatcagccgaggcacacaataacaaattgataatagagtacaattattactctaattaataagcgaataaaatgttattacagaggtagatagttcctctgtcacgcccggaatttctatccaaaattccaaacgcttacatgtgtgtaaaccctcgtccaggaatcagccgaggcacataataacaaattgataatagagtacaattattactctaattaataagcgaataaaatgtcattacagaggtagatagttcctctcaatcaataaagttctgagcagtggaaaaaaaaaagaaatagcgcaggcgactcctctccataggcagcttgaccagggctacgcctaatcatccacaccatcagcatcactgtagaactcctcctctgatgaatgattgcaaggtgagtatatgacatactcagcaagccacgcagcaaatatgcaagtgcacaggataacaaaggatggcatagtatagtctcatttgcataaatagcatttaataaatatttcagaatttaataaaacagtagagtagagtattaattaaacaatattaatccaacgctatacagcataccctgttgcataggcccaaccgttctgaacaaccaatcccagttgcacagttctatctccaaaccaggaattaaccattccaaaccaggagctaaacaagttattaccaagtacagcatcatttattatggtgagaagtgtgaaactaatcacgaaagacattgttagacccgcccataaccgcgggcacggctatttgaatagttcaaactctggccagaggtgtaccactgtacccacaaggcacaacctcaacatcatgtcaaccatgcgtcgcgatacttgacaagtacccgaatagagattgtgacaataccctctatataatataattcaaagcagtgcactgttcccggatcataatcacccccttataaacaaggtatggactccccagcgacccccgttggcttatctccgccacttcacagtctggtgctctacgatgaaccatactatacagaaagtaaagccgttgcccacgctggcttgtggttggcatggtaaatgtttcacaaccgaaaatcgtgaaccggtccttaattgtcatgagcacgaccatcaaaaccatatgctcacaacccaccattatcaggttttagttggcaaattaattacttaaccaatcatgattaaccatcatgatctatcattaagttatcattaaataatagtgaagcataagttattctagtagtgtgctaatgtttctaagcatggctaagcaatcatatctaatatctagctgaactaatatgtaaagctcaactagtcaaattataataacccacggtatcaaagaataaagtaatcaagaacaaaaagggctataacaaaacaataggttatttccacccaatgacattcaaaaatatatgcagtagttgaatagaaacaatagctttaaacaggatcaacatgctcaaagggttgtttgggatctgtgtgacttgtcttgctggccttggaactcttcaaactcttctcctgcaaatttggactctccgggaacgtcggaatctaaagagaaaagagcaaaatcaccaaaacaacacataaacaagcatgaacagtacatgtggatatttttaacatgtagatctcaattttagaaaaatttagagacttgaaccaactaaatccgagctaagatgaattagttatgaattttcaaagattaaatcagattaaatcatttatatagattttaatggaattatgacgcaataatgaattatttttgaaaagaaaaaggggattattgcatcagcggctagggtttacggtggaccgggtgcacggcggcggctcacggaaacgaacggccgaggtcgatcctatccaaaacgaacggccgagatctaatcggttcatcgcgggtccacggcgaccggcaacgatgatgtcggcgatgacgtcctcaccggcggcggctcgaacgcgcatgctcgccagcgaacgacggcgcggcggtgcaaacggagggcaccagcacgtagagggcgacgcggcgatccttaccgaggcacgaacggcggcgagcagcgaccggacgatgacggcgacgaggaagaagcggcggcgacggtcagctcgacgacgacggcggccttccaacgatcctcggcgacgacggaggggtggacgaggacggcgacggcttggcaatcacgatagcggccttcccgagcgacgacgacgaccggagcgacggcggtgctcggctaaactcgcggcggcgacggcggcgcacagttgaacgcggttagagcgctacgagcggcggcgagctaaggcgagggtggcggcggagagaggagggctcgggggtccttttatagcggctagggggcggcgaggaaggcccacggcgctagagctctaccggcggtggaaggcgaaggcgagggaaagttagggttcgggagaagaaaacgaatccgaatcaaactcaaatccgatgatttccaaaccgaattaggcgacgattccaaaagagaaaagatagaggagatcaaggggatcatttcccctctattgatttcacaggagaaggaaaggcgcggccgaattggaagggcggcggcggcgcggctcggctagggttcgggcgcgaggaggacgatgggtccgacaggtgggacccacctgtcagcggccaagggcgcgcgcgcgcgggcagctgcgggcagactgggccgactaggccgggaaagagagagagggcggttttgggccgactttcggcccaaagccaaaaggaggatttttaaaaccttttcaatttaaattattcatgaaatgcaattccatttattaaaaatacttccttggttcaaataaatcccagaaaaatctaggaactatagaatcaagcaaagtatttaataaaattttatctggcccacttttatattggaatttattatttaaaattagatcttctcttctaggcttttaaaattatttctaataattccagttaaacaacaatttatataattaaggctttttagggtgtgacagcatttagatgacattttgacttgtatatgagaaaaaagtttcgctgctagattggtttgtggatccccaaattcgagtgcttaatttggttgcaatctatcttgttcttgcttgtgttcttcgattcgcatgcagtgattagccttcttggcgaggtcaaccgggttttggcatggttgataaccagaggagacgtggtgctgccattgcggggatcagtagcgtgttcgttcagaagccggatcaagttgtgtcgtgactccgtccaaatcgactgtttaaaaatacctatcagaagattgggacctaacaccctcatcaaaatggaaaaggagggcccacatgttaggtgtaactgtccggaagctgccttaactatcaaaaccgccatgaggacccacctgtcagtgagcagaccgaagctagaggcatgttgggccggcccaggctggtggcgcccaaccagctcggtcctccatgtggacgctccagatgctctctcaatgacggttgcaggggcaaaatggacaactcgcatgggtacaaccgtcataacgaccctataaaaggaggagctcgcttcacttctcaacacactcaagcaagctcaagattcctctcatactttatattagtaatttagtgctaagtggaagtagtatagaatagttctcggagttctcggagtcttcggaagagtttcggtatggcttcagtagcttttctattctcttctgtaatactttcggaattaatgaaatactcttcctattatattttcggtattttctttagtatgagtactgctcttactttacattcgtgccgatataattgtgtgggtagcttaccagagatgtgcaatggtgtgggtttaatgtccggttcgttggttgctctatgtcatctgcagaggcgtatagaagtattcattaatgtaagcatgatgcttaggttagtaaatatcattaattgagcatatatgctacgggacagtagaggtgggccgctgatggtgatagctcagtacgtttattgcttctacgttagtatatattcctaaggcaaattcctggggagggtactcctttgtatttagccccagttgaacggccatgacaggttgtcgtaaggaactcggcaacccagggtggtctctcgaaacaccagtagggcactattagggtgtattggccacataattgtatactagcaaatgtagagtaaagtttgagtgtatactagaagtacaggaattgagttctttctatttctcttatcacttagttagaattatttatatgaggaattctataagcttcgcttcgtgtcactctacccttatattaaattaacccctgcttagactttgatgaaggcaagtaatatatatatgtatagattggcatggctctctttttcacaatcttcccttgggattaaacaaatacgataccttggaatatttccgggtgtaataatacaatggtatattcgtgcgcttgcggattacttctgtaaccataaatatgctaggactatttctgtgccattgatgggaataaatatttctagtaatgtcgttaagaaataccaacagctgtctgggtcgagggaaatgagagaagcaagttcgagcctagcgtgacaatatacgggaacgaccatacgaggaaatctatccagcctttctacggatgttacgatcccctgtcataccctctattcttccctagaggagagagtggttggcatcaaggtcttccaaaggacaaaataaacatgaggatgcaaacgtgcggaatggcgatgatcttggtaagtttatcttcaaactaagttgccttatagaatgataattgtgcgttacatgattgtactaacccagacgtttgtcacgtgtagaatgtaacagcaggatacaactctctataagggactagtacttcaataaattccaatcgcatcatgggattttcaatcctatacttcacggtgaacgcctgttccagcagttcgccgttgacatgcacatcatggttgagagctcccatctggactatgtgaagaacaaccagaaggagataagggcctacctatatcaaagggttgatggatagcatccaggctggggagagttgagcaagtgcagtctgcaaacggactatgctgctagcgtcgttcgtcggtggtggccgaaatatgaagcgtcgatacatggaggccatggccttagtacaaaactacaggaagccagatgtattccttataatgaccatcaaccccaagtgggatgagattacttgcgagcttgagcctggccagacaccacaagatcatcctgatctcgtggtctgtgtgtttcgagccaagttagaggacctaaagaagtagttgttcaagaagcacatccttagcaaagtcattgcacacgtttatcttgttgagtctagaagaggggtctgccacaggcacacttttttctgatcatgagtggtcgatacaagctatcatcttcggagaaatatgaccgcatcgtctcagttgagcttccgaacaagaaataatatccagagctatacaatatggttgtcaagcatatgatgcatggcccttgtggtcgactcaacggtagatgctaatgcacgcgagatggaaagtgcaggaacaactacctgcgagagttcaacgccacaacttcgcaaggcaaggattcatacccgttgtataggagacgtaatgacggtaagtgtaagggggttagaggacatcctctcgataataggtgggatgtcccgtacaatccttatcttctatggatgtacaactctcacatgaacgtggaggtttgctcgagtatcaaggcagtaaagtacctgtttaaaatacatatacaagggacaggacaagcctcgatatccataaacgaggtagatagcaacggtgaaatcgatgagattcagcgctatagggatgcgagttgggtgacccctctagaagccttgtggcatatatatggttttgacatatgccattgcatgtgccaaacatgcatatgttggctttcaattcagacaaggatctccgtgatgttcttgataaggaagacccaggcaggtcgatgcttacagtgtattgcgaggctaacaggcagcatgtctgggctcgagatatcctttattgagatttcccaatgtggtttacttggcagacggcaggtaagtactggaagaaaagagatagacggggcaaggtcgggagaattgtgtgtgcccacccgacagagggggagcgctactatcttcaggtgcttctaaaccacgtggcaagctccacctgattcgaagaccaacacactgctaatggtgtggtcatgtcatcgttccatgctgcagctgaatgaaggtgtattatagaggcagacaacaccctcgactagtgccttatagaggccggggtcttctagatgccagtgtcactacacaggttatttgctaatatatttgtgtactgcgaacctagcgatgtccttgctctttgggacaaacatctagatgtcatatctgatgactacacactattggagaaatgatctttgctgggtcactcaaaaatcacattagtcccgctttgagtaagaaccgggactaaaaatatatttgaaacacacaagtaattttttatctttagtcccggttagtgttactaaccgggactaaatattatttttactcccggtttaaaaacatgtgagagccctattatatttagtcccagttgtttatactaaccgagaccaaagttaaaaaaatagtgaaaatccctgccccgagccacgcgctacctcatcctccccgccttgtccttatcctctcctcttctcctcctcccctctcattttctctccacctcctccccctcccccttccctcctctgacgacggcgatagcgatagcgggcggcggcccagcggaagctaccgtggtggcacacgaggcggcagtggtgtagggccggcgtcctcccttccgccagatccagcgggaggggaggccgggcggcgacggcctggcggaggcggcggggcgaaggcggcttggcggcggcggccgggcggtggaggccgggaggcggcgcacgggcaggcggctggcggcgacgtgttttgtgattatttttgtttttggaataatttgtaaattttgttgtagattattttagatttgagcatgattttgtggatgattttgtggatgtgatgagaattgtggctgatttgttgtgcatgatttggggataatttgtggggatttgagggtgacaatatatgcaagcagcaaaaaaataaaggaaaaaaatgcctaaccaaccatgctaaaggtggctctatgatctttagacccgatataaagatctatctttacttctagttattttaaccaggactaaagatagacatctttagtgccggatttggcatcccggtttacaacccgggactaaaatggattacaaatcgggattgaagagcccttccctagtcgtgacaggcaaaacaacacatgctacaggcaatgggtaaggatgaaatagacgaaatcacatgatagtacccgagaagatcccagagattattcattttcccgagattcacgtaaaaaatgattgaaggaaaggaaggagcgtgaaacctcgtcgcctgctgcctacacaggccacgtgataaggcccatcaagattaggtccgatatattaagattagtcaaccgataatcactttccatcgatcgcacaactcgccgaataaacaacggcgacgccgccgccaaattcaccgaaaccaatctacaccaccaccaaacgatggatgcatatgcatcgccgtcaattcccccctcgccgccactgccgccgtcgccgacactgccactgccgccgactccaccgccaattaatgccgctgtcgccgactccgccgccgccgccattgtcgtcgccgctgccaccgccccaactgtcatcttcggcgcggccgccgccttcatacgatagaagcaaacactctcagcacagatatcgatcaattggtaagttaagcaccttgcttaattagtccatgaaaactatatagctatatgctctcctgcgatttgtgatacttatagcgggcagtacattagctaactactaaggttaatgcatggtactgtagattaatgtatggtactgtagattaatgcaagttactgtacattaattaattgaagcacctagctagccatccactgttatattataaaataattacgtatatatcaattgcattaatatatactcctacactagcttatgcgcagttctcaggcttggctctttacttatgttaggaaatcatctctcacgctcgcaaaactgagggactgattaatgtatgattaattaaatattagtcttttaattagaacaactagatttatatggttttataaaataactttcaattacaattttctttttttcataaaagcaccgtttataagtttgaaaaacgtgcacgcaaaaaaaaacaatggagttgagttgggaactccaacaaaagaactcagcataaaatcaaccttggccctcagcttattttacataaagaatacactgtgtggcatgattcaccaagaaaaatataattgatagctatgatcgagcaaattaaagcattgtaccaaataatgttacaatgatactccctccgtcccattttaagtacaaccataattttccgtgcctaactttgatggttcgtcttatttgaaaatatttttaaaaaattaaaattataagttatgcataaagtactattcatattttatcatctcataacaataaaaatactaattataaaaaatttcaaataagacggatgattaaagttgggcacggaaactcatggttgcacttaaaataggacggatggagtatttacgtacctgccaatggaacatggagtaatttactataaaaatgtataatatttattggttattatgctatatctttccagtgttatataatttccttgtgcaatatagatatccttgcttaatctcatgtggtactcaggtcaatcaagatgctgacatgattataacctgaccctcgaagaaagcaaaaaaatcggaatgtaagggtaacactacttatttttcgtctcaatctatttaattatgccaaagacttatatacaaattatttcaatcactaacatttttggtgactaaaatactaatgtgagctgatgtgtaactgaaaggcaatttaacttggcttaacaaggaaaataacgtcaaagaaaaaagtatttttaattttctatcactgatatccattttagctaggccatgcgtgtgtgaatgagtgtatatgcagacacactatattgatataataacgagtgcaataagatgctatgctgattaatttatgtactgtgcatgccgaaagtttgatctatgtgtatatggtatttacgaaatataattaggttccttgttttgtcaaatgcagcaccacttcagactgacgcattcgtccccaacgctcactatgccaagtggtgaaatagtctgagcaactgtcaaccagacttaggagcggatgcaaatatgtgtagtagtactcttacttttttactgttcatatcatccggttcatattgatggtcaaatattaattaattgtctgatttcgtaggagaaatacaacaagataaaccattacatggaagtgtcccatcaaactacgagcgttctgtttgaacttattaactctacttttagtcaaaattttatttgatagtcttttaatataatattaattatgatatcacatttttattacatgataaataatccgaggagcatggaggatccaaagtcagcatgccaaatattgatgtaccatcgaaattgatactatctatgtttggccagaccccagcgagtatctccctcaaggtacattattgtttcacatacttatctttggtacaatgtatctataacatcttgatacagaattccatatttgttttacagattatgaatcccattaaactacgagtgttcttgatataatggctcaattatcgattgaatattctactgaaaactgtacaatggtggacatgggagaatttcttgtctggaaaaatcacctaatgagccttctctctgaagatgaatttgtgaacgatgatgtaagtacaactacgcaacgttagaatttaattgccaagatattctttagtaattatagatttttaactgaatcaatagatcatcagtgcatacatacattgtatgagggagcaagcaaataacgataggaaagtgtattatgaaaacccttttctttctgacttgctgaaaggggctgaggtcaatggagtagacgaagatagtgataactttattacaaaaatagtgaataattaccttttcaatgaactggtaatatttggctctctataattgataggatatataatatatatatggtatttctaatggatgatcacctcaaattaaattactccatatgggtaattaactaccctaatgttgtgcatttgtgatatacacttaagaaaatctcgtgtgccactaaggatgttgctttcacactcattttgttggtacatcagtagatttagcaaaaagaaaatgtcttagctcgccatcatcctgcacatgtatttataagttaaatatttgaaataatataatataatatatgaatgatcaatgattgtcaggtcttacattaatagctggcaaatgtagttcttcattttttccatgtacacatcaagagatgaacaaaaaaacctgacaaattcctaaggaaattgaatagttagctacccttgcactacacaattaaatttactggtttgaacaaatttttaaaagataacttacctatcaagaaacggattattgacgattatttgcctccacaaggtgatgtctttattccacctagagctagggcatgccttccgcatagctttgttgaagtgatcagcaatagttaatagtttacgatgtatctcatgtttggcttatttttatattctataataagtggattagggtctcatatatagagtgttttaccttcttggtctagtatgaccacgataaagcttagagcatggcatagtggtatagtaatctacaaaagatcaacagtaaagataatataaaaaccacgggcatatcggagcaaatgttagcgatcttaccgatttgcattatgaaagtaccgatggtctttgcaacatctatgttgtcatggtggaccggggatttaccaaaggcagtagcaatatacatgattataaaataatggttcactaacataagctatatagaagtcaatat

SEQ ID NO: 26032 - DNA, 5004 bp, Oryza sativa
attaatctgttgaatgtagtgcaaaagcccgcttatcaactcttgtttacatatcgcagataccatagatatttgtgaactatattttttgttgacttcatgagtttcattgatgtcccttatagagttgaatttccattgacgattacccaatatcacaacatcgtcgtcactgtctttggtatcttcgctttgttccccggtagtcatgaccgccttatttgttttgcaacataataatacaccgggcactttgaacctaaaaggtgtaatatcctcctgcgcattaaaaggtaaatttggtttataaaaaatagataagatatatggtcaactatttttttttaacaaatgcacctgtgtaatagatgagaaagtgaatctcctgtccaattctccataattttgagcatgaacagtccacatgaagaactgtattgtttttaagtatgagtaaaactattaaaaactaaacaagagtacaccaattaaaatatatcattcatcttatattaatattacatgaaaattttaatataagatgaatgatatatgttaattggtgtactcttgtttagtttttaatagttgtactcatactttaaaacaatgtagttcttcatgtggacttttcatgtctcaaaattacggagaattggaaaggagattcactttcgcattctattacacaggtttttaataaaaaaatagttgatcatttatcttatctattttttataaaaacaaatttactttttaatgcgtatgaggatattatatactttttatgttcaaactacctggtgtattattatgttggaaaataaataaggtggtcatggctaccagggaacaaagcgaagataccgaagactgtgacaacgatgttgtcatattgggtagtcatcaacggaaattcatccctataaggaacatcaatgaaacaaaagaaataaccaaaaaatagagtttactactctctgaggtatctatgatgagtaaacaagagttgataagcggccttttgcactacatccaatagattaattgcaccgaagccacagagtaagcccgtgcaatacattttatatacacgtagttcaaacatgcattaacttgttttcttattgattggcaggaaagtatgggtataaagtttaaggccgcactctattagcttgagcctcaaatagcttcaatcagtactaaagaaagatgagccattggaaagtgattgcttcaacatggctatacgtaagttcatgtatgaaaacatctagacgattcaaaaaactaaagaagtaatatcaaatcattgcctggacttgcaattttgggtatgtttttaaaatctattgctcattttattctctttttttttgaccaggcattttattctctattgctcatgttattgcctggacttgcaatatcgaatatattgagttctctattgcttatgttagtgaagattttattaaaatcatgtatattgctagtggctttggtaaatccccagtccaccatgacaacatagatgttgcaaagaccgtctgtactttcataatgcaaatcggtaagattgctaacatttgctccgatatgcccgtgttttttatattatcttgactgttgatcttttgtagattcctataccagtacaccatgctcgaagctttatcgttgtcatactggaccatgaaagtaaaacactctatatatgagaccctaatccacttattccagaatataaaaataacccaaatatgaggtacatcgtaaaactgttaactattgctgatcacatcaacaaagctacgtggaaggcacgcccttgctctaggtggaataaagacatcaccttgtggaggcaaataatggtcaataatccggttcttgataggcaagttatcttctaaaaacttgtttaaaccagtaaatttaattgtgcaatgcaagggtagctaactaatcaatttccttaggaatttatctggttttcttgttcacctcttcatgtgtatatggaaaaaaatgaagaactgcatttactagctattaatgtaagccctgacaagcattgatcattcatatattatattttataattacaaatatttaacttataaataaatgtgcaggatggtgatgagctaagataatttttttttgctaaatctactgatgtaccaacaaaatgaatgtgaaaacaacatccctagcggcgcacgagattttcttaagtgtatcacaaatgcacaacattagggtagttctttacctatatggagtaatttaatttgaggtgatcatccattagaaataccatatatatatatatatattatatatcctatcaaatagagagagccaaataataccagtttattgaaaaggtaattattcactatttttgtaataaagttatcactatcttcgtctactccattgaccccagcccctttaagtatgtcagaaagaaatgggttttcataatacactttcctattgttatttgcttgctacctcgtgcagtgtatgtatgcactggtgacctattgattcaattaaaaatctgtaattactaaagaatatcttggcaattaaattctaacattgcttcatcataggtagttgtacttacatcatcgttcacaaattcatcttcagagaaggcacgttaggtgatttttccggacaaaaaattcttctatgtccaccattgtacagttttcagtcgaatattcaatcgataattgagccattttatccttttggttaattcacaatctgtaaaacaaatatggaattctgatatcaagaagtatcacaaatgcacaacattagggtagttatttacctctatgaagtaatttaatttgaggtgatcatccattagaaataccatatctagaaatgcttgatgttctataattttttgtttgtgctttatttgtatgacattatcaatttttcatagtagtcttctatctatattgcctttttataatttttgcctttaataaatgccatgagattgttttatgcgccaaaaagcttgcagtatgcttctgtaatgataacagatatcttgctttgaaattaatctactaaacaattatgatttgtagtttcttttgtattgccagattttttttccgtgatcaacaaaatttcctgttgcaatgcacagctaccttactagtaagtagggatgaaaacggatcggatacggacagaaactagctctaccatattcgttttcatatttttttcagaatcggaaactccggatacaaaaacggaatcgaatattgtcgaatacagatacggagcgaatatggtaacgaataattatcaaagtacaaaaacccctcaaaataagcttctcaaatcaaggaagagatatagctcattatttatctaaaacaacacttgtacaattcacttccaatgaaacatatcatgaaaaaccacacacatcattacatcaccacatctcaatcacttgcacatagaaatccatcacagataagctacatttgcacagcatacagttgcactgctgctacttgcatagttgcatgtgaggaatccatcacagatctacagcataacagaaaacaaaataatcagagctcaatatgaagtgatgaacctactgtaggttctagcagtgaaatgcaaaaaaaatgcaagagcaatccaatgaatagaagagagcgaacattcgatacaaacctgtcgagatgctgaatcgttgagttgagatggcaggtgtcggcgcgtggaggtggtgcggcggccggcgtcaccgtgtcggtgcgtggtggtggtgcggcggcaggcgtcgccgcgtggaggtggtgcggcggccagcgttgctgcgtggtcgtcgaggtggtgcggcgaccggcgtcgccgcgtcgccgcgtggaggtggtgtggcggccgagacagcgaggcgtcggcgccgccggcagagatggcgaggaggaagacgaggggaggtggagacgactggcgacggacgacggtggcaggggcggggcggcgctgcaggcgcgcaggacctggatgcgccgccgatgccgagggagttggggaatggggagtgccgcacgcccccacccacacagccactctctaggtctagggttaacctggctatggacttgggccgaaaaatatttgggctattaggctatggggagctgcggatatccggcaaaaagtcccggatagtttccgaccgattccgtgttccgacggataccatcgctactgtattcgaattcatatccgagaaaaactatccgaatccgtatccgattctgaaaatatccgaagaaaatccgactgaagctatccgtatccgaaaacaggttcggaactcggaaactatccgtaccactttcatccctactagtaagattaaataagcatacatgcccatataaatcacataattcagggagtttgaaaacctaagccgaaaacaaaggtgccataacctacagcccttatcaaagttgttaactactactccctccacaactaaatattatggacaatttcttttttcaaaacttagcctcaaaatatttagtatagaaacataaaatttttatgggcaaaaatttttattacaagtactttacactatctaataaaaattagtagtcaaatttgcacaaaatctcgaataaattcaactgtgccatatcctatcttactataaaaatataacctattaaatcctaaaacttaacgtgtaaatatgccacatcattatgcaataacaagataccacataattatccactaacaattattacatttttaaacatcatgccaacatgctataattttataatttatttaattttagagttttaaaatgcaatcatattaaatcatcatcccacataattcacataacacatatagctatatagttcatcttttttttttgtaaaacttagtacattattctttttcaat

SEQ ID NO: 26033 - DNA, 16996 bp, Oryza sativa
tagattatcataaactacatcaatttacgtaagtttatgttgtctagctatgttatgcattatttgtacttattgttatcatactaaactcacacggtaaaacgcgggtttcacctagtactaaatacttaggtcgccatttctcccctaaaaatataccactccatccctctaaaaaaatcactcagagaacccctaaactcaattcaacgtgaaaaaacagtcacagaaataatttgaatctctcgatccaattgctaatgcataaacatgtgaccaatattttaaaaataaagaggtagtactttcatgcttattgtgttagacacaacattttctcttatactcattcatcttattatcatttttctgacttatttatcattgaaatacttggagcacggcttatatttcaaacactaaaacgaaggaaatatgtattatatcttcataatatgattatctttgaaatgcatctgatcgatttttttagcgcatgatatcgtttggtttatgatatggcttgccggtgggaattaaaatgtagttgttttttcatgaaacgtcgaaaacctggttttacattagagcaggttttcatatccctggattgcccactctatccaaagaaaaaaacttcttctgattatgctgaaatgaattcatcaaatctagttctagcacaacttggggttcatgcaaatgcttggagggtatacattgaaccaattaaatgcttgatcctgaaaacatggagaatatgtaggcttaaaccaaatggttgttgttaaacacaaagagttccggatggctcccattcatattcatttttttttgtctaacaaagagaattggtgtgccagacggaatgttatggaatagttagtactagtatacatctcacttgtatagtacaggagccccttcattttatttaatacgcatggccaataaatttgtatagtcatatacgaattgtgaaacaggaatttgatgttgaagatcttttttaagataacgggaatcctggtcttttcttattgaaactacaaccaattattacataattctcagcttataaggctatcaaatccttaaaaaagtcaaaataatttcaaacattccaacttacaggacaagacaacataacataaacattccatccataggttgcataaatctgtataaaccatttgctctaattaaattttgtcatgtattttgcatctctcttctagcgcacatttgatgttgaagatatgtacgttcaactaattttcagagaagcttcttgtgcttatatatgtaggtatggtgctatataccgaagttagtactgtagtatattagtagtattcaacatgattatcaagactcggtgatattatttttttaatgttcgctaccagtctcatgtcattttttgacgaggaaccaaaaaatctattatgacgtacgaggccgtattatatttgaactggtagccaccatgcagggattgattgcaactaaacaaaatgcatgttgcaatttctttgatagtgatctttttccgcgtatggtaacctaggttaattaattgatacgaagtaagctgatacacacttctacaacatactgtctgtgagtagtgaatcatatgatacggagtacgacacacacttctacaacatgggtcacaagcaaacatggttccttgcagatgcctacaagtgtgaatatgtcttctgtgattcgccatacttgcatataagtagttccccatggctcccaagcatattttttctatgaaagggaacagcagtgttgcttggagttgtttgcattattttcacttattcctgtaccacaattatgcttatatgggctccccaccaccttcagttgccccggccagtgacacacatataattagaatgcatgcaaagatttaacgcatacaaacatatataatatataggatgtatcacatgctggagatgaatttctgtactaggagtacaaggcattattcaattaattaatttttcatatcaaatctcgattgcctgagctgcctggttgtacaaaactgctgtaatgtagcaatattcaattcaatgtacacaactgttccgttgatgatagactgatagttgatagagctgcctcttgttgcaagtgattcccttgtaataatgcaatctaatccatatttactaaaaggattaacatgaaaagctccaccaattgactaagaaataatatattttatttttggctctgcctcttcataaaaactcgacttgtacaaggaagaccgccttgcagtctgtcattatgaagaaggctcaaccagacctaccaagaaaggctaaaaactttggtccccacacgtggccttgtctcttatggatctgtttttaacccatgttttgaggccccttcctcctacataagggaaagtccaccatagtgtagctcactacgaacgccaccaccactgaccagcagcagttgcatcagaatctccgcacgcttattcccctaccaatctatctacaaacacatgggatcgggcaaggcggatcttgctagatggatctgggtatgttggggaagaaggggatctaatggaaaaaaaaggaaggggttcttagatcggatggacgacaatggaggaggagggagttaccggagaagaaaaggacaacagcgagggtggcggtggcaacgttagggaggagtcgtgaacggatttgttcaagatgcggtccaccggcggtctatggggaggggccaatgggagtaaagagggtctcgaggtgaacggatttgttcaagatgcggtccaccggcggtctatggggaggggccaatgggagtaaagagggtctcgaggttgccttgagtttgtccggggattgaagcccatggctattctaggcctggtctggatagagagcagggccgagccatgttgggttggcctaggctgttttcacatagctgaattcgaaaacaaactctagtataatatttttttttgtttaattagatcattgctatttatctatttgaaatcatgccattacaattttataaatatttgagacatgccgctacttactgtttcggtgcatttagaaaaaaaaaattgaacgagtttcctttcccctccctcctctttctcattgatttgtggttgtttcaatcggctttgtgtttacaaggccttctccacgtctaactaggcttagagatcaaataggagttaacaaatcctgacatcagacaagaaaatacgagaattacctaaattggacttggactcttgatcctgtccagtcctacataaggtcggttcaaccttatgccgtaggtcggtttgtcgttatgctaaagggcagtcctacttgcatgatggtctggtcgtacaattaatgtcggtctggccttgtagagaaggttcaggtttgttctctaatttgaccaaattttgcaatactttgatcctagtatattatttggctatcaacagtaacatagtgccaatgaagtatttcatttggatgctaagaatccttttgaagatattttttttttctgttgctatataaaaacaaggggctatcttaaccaaggataatcaagcaaagaggaggtggaaaggtagtctaggtttttgcttttgtagttatacaacatttcttctttgattcttcattggtaagatatgtttggagtgcaattttcatcacttttggaatccaacgacctaataatgcttcttatctttttggtagttggctagaaaactaactgttttttactagtaattttcaagaaatgtattggacgtggctctagtcacttctacttagagaggatgatggaaacctgttaaagaaagtgtgcaagttgttctagatgtatggttgaaaaacttccacgagagattagaagcataggttttttcattgttttgtggtgtttggttatgtcatgttgcatgcctccatttgtttggagagagggtctcagtatccatgtaagaacttttggtcctgttggatgtagaggtcctgatttatttcactatattgaaaaagcctgtctatcgtcttttcgtaccgagacaatggcacgatttttacaattttggctggatctgttaattccggatgcacgtttagtgtgggctttgacgcggctgcactgtggaacaagctgcaataacgcagcgcatgctcaggaacacgatcgaaacgctgggatttgctgatgaagaagaatggattgctggaaatggtacttgcaagttagacattatccacggatggcgggtcgcatcggcgtccacgtccaaccgcggctcagcaggagccagatcggcaaccacgagttccctcacatgacgtattcccggtgccttccaagcttaaaatgtaaggagatcatcacagagccaagcataggcagtgcgagtgccttattcgagaggagttagctaggctagttagcacaccaacttgtttaaagtactcctggtgtccatttcgaattagtacagtccctctgctcctgcctatatgtgtataaatttacgagctttcatgtcaaaatgaaagctaacacaagcttagtgccgagtggttgtgataacattgtcgtgctgcaagccgcttcatgcccattttaattttcggaaggcctccttgtgctgatcgagctgcacatggctcactgacaaccatcttcttctaggctggagtagattgcaacggagcttaaacaattaatgttgtaaccgtttttttaatataataaaagctttattgatctcagtcaagttctgataatactcccggcctctgcaccatgacaatgcacacaactcacaaaatccaacacactcacaagaagagaagaaaaacagcatccaggatcaaggccctactacccaaagactaggtcgccacccatttgtcagggtaaaaaactccttaaccacttgctccaaatatagacaagccgaagtgacaaagcccttcaaattgtttttctggagaataacctatgatcggagctaatgtgtaatgttgtaacagtacatgacttttaccaatgtacagctacaccaaaagtttcatgctagtaaaaccaaatttaggcttaagctgtgacacaagataatagagtaccattattgcactattcacagtaataaaatatacatatcagttcgcgtgaacgactccacggcggtagataggtgtccattttctttaattggtgggatctagtggggctcactttaacacctcccactcacactaaccatggtgaagagagacttaactagtactgtctacactggccccaccttattgttcattgttcacacacacattggcatgccctatcaattgtgggccacaagtacaccgctgcaatcttgtccaacgcaaacaattatgttcggtccgaccagcatgggcagcacattaatttggataagctataaacgcactttgtaaatataacttgatacaataaacctgatctactttcaagagtttcatcgagacgtatttttataaaccccaacggttagaccggcatctgatgagcggtgtaaacagcggcagggaggtggctcaactgacagcaaggcggtggtcagatcggcaccgagcgtgtagtcaaactgctggggatttttctgtgtgactattacaattttgtctagtttgtttctttttatatttttatcattcacccttctcttctagacttggttgttgtgttcgatcctatagaagtaggccaacttcccgttgtgcatctcacgcatgatgtcctccattcccgttgccgagccttatgcgtgacaccatgtaccgccccttcctccgcatcgctacctactacataatgctgcttcgaaccgccgcatgacaccagaactacccattacagatgatctgtgatttacgagctattacagatgagctgatcattccccaaacccctatctactacatgcacattaaccaaccattacagattagggattaaaaccggtttcctttgatccgttacacatactagctgattctatagtggtgtcagcatgcgtcgatgatcaggaatgatcaggaatgcaggagaagcctaccaaatatgacaacaataattggcatgtacactgtggatcggattactgatgcatctcaacccctttgatatatctctagatcaaaccttttagcatgcatgagtgctagctactctatctagagaaccatgcatatatgaatcaaataaatggcacaaccaacataatttctctcctaatccacgaagaggataaggatgagaatgaggatgcagctagctttcttcgcaagagaatgagaataaggatgagaatgaggaagaagaaataatggagggcccaacaatgcatttgtaccatttgatttcaatagagtaacatgatgatttatgagtgcgtaagtgtgctgcctaccacttacaaccagggttggactgaaattcagtcatttcggtgacccccgatacgatattaattcggccgaaatttttgaattttttcatgaatttggataatatttattcaaattcaactaaattttgtttaaaatttcaaaaatttcggaccaaaatttccgaaatttcgggatttcggtgacccccaatcaaaaaccctaaaccaatacagtgaaccctgcttacaacttttaagtttcctttttctattaactataatatcatacattcacgtcatacaaaagttaatctgaaaattaagagttttgccaagatgatgcgaagtcgctggtgatagattgtacgcagacatggtcaaggggggtcagagtgttaaacgtcaggatccggaattattcaggacagtgaagtggccacaagatttaaatctctccgtttattttcgagcgatgtcgaggtggtcagagattagtaatcaacaacacaaaagcaaataaaatggactatctatatatctttgatagaaattagagcaaaaaactgttagtatttttcccaccgcaggatatatgcacaacgaccaggatggtctctgtgcacgtgctatatttgaattgtacagcctgattatcctactttaccaaaatcaatcaatttttgagacggcatgattaacagcaaatttattacataacaaatagagtaatcataaaagccattaacttgctaattactacgtcaaactagcttactagaaaacataacgtaatttattttccatttgaaaattgaaaataaaattacaaacaaatctactcaaagttgcattgtaactataatgctataatgtaactatactgtaattttttaggtacagcaaaactacattatagttttttcttttggtgttatctctgattctctgtgtacagtagtctagttgctcaagtattctcttgttgggcagcgaaaaatcttcacggcggatgaggtagagaatacaatgctcctgctagagtccgtattactaacatggacatagagtttaacgattgccgtgtgaaatgtgaggagttaaacttctgtatatagagagggcaaacaaatgcacaaatcataactcatatctaagtaatcgatagtttttagcaaaaaaaatatattgacaaatttctaacagatccgaatttattctctgacgcaaagcttttaacattgttgctatttttatgtaagacttttcgattggatgaggcaaggtgagtcggcacctacccactggatggttcagatagaaaagaagaaaatgaaatgaaatttccgatacatgagttgattcaactctgaaatcacattataatctcaaacgagaataattttatttctgatacaggctcttggggcatgggttgatgagttcatgaacacatatgacatcgaccattggaagaagcagtgcgaaaggcaggcacatggcatcgagtggatttatctcggctgagactttctcaggaactccgtagctccggtgctcacggtggatgttgcttggttcatcgcgtagagacatgtgaccgtcaacgagatgcgtgcagacattaaaagtgtctcctgatctcgacccctatcaatatctcaccttgcatcaaagatttccggtgtcttccaagcccaatatatatggataaaggtcatcgagcattagcttgcatgtcactgacaaaccatccgtagtgcgtgttttgtgacatgaagctgtaggggcgccaaaattatgtactgttcatctctctgccgttgtataagcattcctgttgaaaaaaaaaaaagagtgaggaggttgcacactagcataattaatttcagtgtagatcaacgacaggcagctccatggatatatattgccatccttcttaagtttttggatgagaaatataaatgaatgttattagacatcgcaattcctttgaacaaaaatgtaagagattaaactcatttttttatcaatccacttgattgctcaatttaggctagaatcagcccatacagattcaatttgtttttatttctaatttaccaaaaaacattccatgctcatcagaatgtattctcgatttgcaaaatttcaatatatttattgtttcaaaatttcgctgaaacaacttaaacaacggaagatcagaagcaattaccagtctaattaagatattggtggtaacgggtcccaaccaactggttctttaatgttacaatccaactcaatccttttgctcaacaatctctacaaacttaagcctgccctttttacacaacccttaaattttaaattttgtatgctaagaagttaggccaataactcaaccacccaactttaattttgacagaagaaatgctaacatgcatcttgttgacagaaataaaggaaaatattttgtcttttttcgaccagtccacttcagcacacagtcaaacgaggtcaacatacgggatttagaactgacgacaagaaattcttttagacagctcttaacttttactgcccgactttttagagaaagataaaatccgaccacacagagaaacatcttcctatccagaaaataggcaaacaaactcacacccagagaaacatactttacatgcagaaaaataaaccctctagtttctagatcattaggtagaactaggaaggtagcccgcgtgaatacgcgggtatgcgtcgtacattatgtctgagacacttataagagcgaaacatctaccatgatttctccataaattgttttcgtcgatatttaattttataattttctaacctattagctttatattatactccctccgtcccattttaagtgcaatacatgagtttttgtgtccaacttttattgtccgtcttattttcatttttttataattagaatttttattgttaagagatgataaaacattaataatactttatgcgtgacttatgcttttaaatttttttaaaatttttcaaataagacagacgatcaaagttaggcacggaaaatcatgactgcatttaaattgggacagagggagtattatatttaagtaatatttataagaaattatttataatcttcttcatcatttgaaaagaatgtatacttattttttttagaaaacatgtcaacgaaaagtaagtgtaaagtaaaattaagatatttttctttttttaattgcatatatattatcatggtttattcgaggatgaattgggtgagatatgaagctccactaaatatatgggtttatatagcttaatatgattgatgtagtttgaatgtcggtccatctatgaacatttcatgtagagtggataagaggttccacgcaagctaacgttaatacgataacgacgaaatataattgcacaataatacttctgaaatgtgacataccatgaatacacgcttgtgttttcttttataagattaatctaacggttagaaataacagttctaccggtttaaaaggtataggtgtactccaagaatgtagcttaaaaattatggttgtttaaatatccaacattattatgaagtgaacgtagctcaaccggttaggttccttgtgatggaacttgcccgagtctagacatgacaaattcttccagtggtaggcgacgtacctgtcgatagcgaggtgtacgtggtgacttcgtcaatctcaaaatatatcagcctagtctctcagaagtactcataggggtatttgtatgtgtgtgttcaaagatatgggtgcgcgcgcatgtgtttgtactttgtttaaaaaaatttcaaacattatttctcttttattttagtagatacaacaatagggaggggacgacagtgttatatacatgtgagggtgagggggaggtgaagattatatttttctattttttctaaatgatttatgtgaaagccaatgacaaggtgtttcatttttttatatgaatttttaaggttttctccattttttataggacgtgacacactgtgacttaagatttttttttaaaaaaatagatttaatcgttaaaaataatggacaagtcaatttaattgttttttcttataatttaattacaatatctaatctaatggtttattatagatctagtttacatgcatatacttctgtatatattatgtagtattatattttatctttttctatattatacaaaatcctattttagaccatagttttttccacgggtactacgtacgcaatttttttttgggctttatcattttttatcatacatagatgtctatttttttttcttccagctaacagtaggaagctttatttgttattttaattgcccagccaccgtttgcatatctttttttaggaaaagttatcaccattttaataataaatctaatctaatggtataaataaacgggtacaccaatttaagtgaaaatcgatggtgagattagatagtgccacatggcggcctaagagtatttgtaggaacgccacgtggcggtttaggagcgtttataggaagtttaattattcctagttcactatcggcaccctcaaagacgattgcatcggtaattagtaagttgagtactattatcaattctggcctccattgggccagtctcgactcaaccatatgtgatgaggacatcactttatcggatatgttcataacttcacacgttccaatgataattcctagtccaagtccagttcggccttcggagacagcactgactttaaacggacctagcgccttcatgccaacttcgatttgggtgatcttggacttcatggaaagcttatctcgctacctttcaaacgcatccggtctcatgtccaaattcatctcgagatgatggaaatcgccaaaacaaaacagtgctgttgctgaaaccgaacttgggccttgggctttgtaatagattagacccatctcggaagtgtctccctccacctccacgaattagcacttaaccctagctttattttcctctataaatagctttgtacatcctcaaaaacaattgggttttgtttagttgaattttgccaagtgacattcaccttgtctctagtcctcgttcgattagtcggcgactttagattcagagccctcaatagttggtgtcttgatttgccgggtcgattagatctaccacttcaatcgcaactattccttgtgcttaatcacctattcacaatatttagattgcatcttatcttgttcttgtagtgttttctcgtttacattgcagggatcatcaaccccgcgtcacggttagtacgacatcgtttgtggtgtagcaattgcacggcgtcctggacttgttttggttggtagccacgtcgcaaacgtcgcactcgatcaaagctagagttatcccctcacccaaaagatcgggccacgagagagagcgtcatcagttggtatcacagcttcagttgcctggtgaggattttagttttatagatttattatttttcctacccatcacccacaaaattgccgcaccactttttccatctccaaacattagttttgagccttgcaattttcattcaattttgctttattgagttttggtccgctgtcgtgtcggagtgctcactggtggagaaaccatctttcgtcgtacggctgatttccacaatagtcccggatgcaataaaaaccggggctaaagatgatctttagtcccggttcaaaagggtaacgggcatatttgatctttagtcccgattcgaatgctatcagggcatgtcaggcccccccgggaaagatcgtaactttagtcccagttggtattaccaaccggggctaaagatcctggtgatctttagccccggttggtgctaccaaccgggactaaagtcccacccctatatatatgtcttcttcctcctccagctgcccgagcaagcttcaaaatttcttcaaaaaagaggagaggtcatgccaaaatttttattgaatttattttggtgattacatacaaatcggaggtgcctaaaaggtttgcaacttcatcgtccaatgttttttttgtcatactacatttgcacctatgttttgcacactttttttgtctccaaaatttagttgtaagttgatgagagagaaaatgtgtgtggggaagaaagaatatatagaaatttagttcatttgctaaacaaggttttataaaatagttgagaaggaaaactctagtgaaagttaatcttaaataatagaaaacaaactaaaatgaaaattaaaagaagtaaaacacattaaattagtttaaaactttacaaatagtttttaagaattatttggtgtaatattttatgatttttgtatgaataaagatatcatataattattgtatgactgtcattattgtaagaataattatttgtgtatggttttttttgactcatgtagatgaatcggcaatggatgtacgctgaccagcggtccaaagagtttattgacggcgtgcactattttttgagggtggccgaagctaacaggcaaaggggttttatttgttgtccatgcaataagtgtaagaatcagaaggagtattctgcatccaggactattcatttccacttgtttgagtcggggttcatgccaagctataattgttgggcatcccacggagagcaaggtgttgaaatagaagaagatgaagtggaagacgacaatattccggactttgctcagtatgttggatttgaagaaaatcaaacgggcgaggaggaaatagctgctgatggtaacgatgttgcggatgatcttggtcagatgttgcatgacgccaaggaggactgcgaaagtgaaaaggaggcccataaattggacaagatgttggagggccacggaacttcgttgtacctaggttgcgagcaggggcacaaaaagttggataccactctggagttcttgcaatggaaggcaaaatatggggttagtgacaaggcatttggcgatttattgaaactcgtcaagaacattcttccggggggaaacaaattgcccgagacaacgtacgaggctaagaagatagtctacccgttaggactggaagttcataagattcacgcatgtccgaatgattgtatcctatatcgcggtgaggagtatgagaacctagaagcatgccctgtttgcaaagcactacgatacaagattagacgagacgatctaggagaagttgacgggcagctaacaaagaagagaattcctgctaaggtgatgtggtatttccctataataccacggctaaggcgtttgttcaggaacaaggggaatgctagaatgttgcgatggcacgctgaagagcgtcaacaggacgggatgctgagacaccccgccgatggttcgcagtggcgaaacattgacagcaaatttaaagaatttagaaaggacgcacgaaacatacggtttggtttgagtacggatggcatgaatccttttggagagataagcagcggccatagcacttggcccgttacgatgtgtatctacaacctcccccctggctatgcatgaagaggaagtacataatgatgccgattattattcaaggccccaagcaacctggtaacgacatcgatgtgtacctaagaccactggtaaaagatcttaaacaattgtggaagaagaaaggtgtccccgtgtgggatgaggacaaacaggaggagtttaacctacgagcgctgctattggtaatcatcaacgattggcctgcacttagcaacctatccggacagtccaacaagtggtacaaggcttgcactcactgtatggatgaaacagaaagtatgtatcttaagcactgtaggaaggttgtatacatgggtcatcgtcgattccttgcagcaaaccacctggtacggaagaaaggcaagcacttcgaacataaggccgaccaccgtacgaagcctaaacatcgcagcgggaaaacagtgtttgctatggttaaaaatcttaaagtagtgttcggaaaggggcctgaaagccagcctatagagagcgaagatggtcacgcggcgatgtggaaaaagaactctatattttgggagttaccatattgggaattcttggacgtacgccacgcaatcgacgtgatgcacctcactaagaacctttgcgtaaaccttcttggcttcctaggtgtatacgcaaagtcaaaagatacactggaagcacgtaatgatctgaagcatatggaacaacgcggcgaccttcacccggaaccaaaggagaaaggaagccattacttgagtccagccagctacactcttagcaaggcagagaaggaaagtatgtttgaatgcttggagagcataaaggtaccgtctggatactccacgaatatcaagcgaataataagcatgaaggagaagaagttcacaaacctaaagtctcatgactgtcacgtgttgatgacacaactgctaccagttgtaataaggggtatccttccagacaatgtccgggcaacaataacaaagctatgtgcattcatgaacgcaatttcgcagaaggtcatcgatccggatagattagaagcccttcagaatgaagtggtgcaatgtctcgtcaattttaagttgatattccaccttcatttttcaatataatgacgcatctgctttgtcaccttgtcaaagagatccgtattctcgggcctgtgtacctacacaacatgtttcctctcgagaggtacatggacgttctgaagaagtatgttcgtaacggtgctcgtccagaggcaagcatcgccaagggttatggaatagaggaggtcatcgaattttgcgtagaatttatcgaagaccttcgcccaatcggggtacttgaatcactccatgaagggagactacggggaaagggaactctcgaaaggaaagcaataatgagggtagacaacaatttattccgtaaagcccatttcactgttctgcaacactcttcattggtagctccttacatcgaggagcacttggctctagttcgcgccaggaacatcggtaagtccgatgcatggattacacggcatcacattgatactttccccacgtggctacgacaacatctcatgggtaacgagtcgatcaaccaacaacttgccttccaggcgaggggaccgtctgggtcgatcgcgacattccagggatatgagatcaatgggtacacattctacacgagagcccaagacatgaagagcacgaaccaaaacagcgttgttcttgtcgatgccatgggacatgatggaacaactgccacgtattacggtgccatcgaggatatatgggaacttgactatggtcctctcaaggttcctctattccggtaccaatgggttaggttgactggtggaggcgtaatgattgatgacagtggtatgacaactgttgaccttaacaaggttggatactcggacgaaccttttatccttgccaatgatgtaacgcaagtctttttcgtgaaggacatgtctagcaaaggaaagaagggcagagggcctaaagagcctaagcgtcaagtggttctcccaggcaaaagaaaaatcgtcggagttgaggacaagactgacgaggattacgatcagttggatgggcaaccccctttcacggtgatgattgaccctagcatcctcctatcaaatgaagacaccccttactcacgcagcgatcacaaggagggaacaatagtgaggagaaagtacgtgcggtcaaccgtcaccgccgatgtaatgccgtaattattgtgtacacgatgtaaactattttagatgtattggttatccatataaatcaattgatgtatggcataatttactatcattcatatgctacatttaattgaatatcattcatatgctaattataattgactagagaatttttaaaagtattaaatcattcatgtggcatttacagatgttaattagagtttttcacaatttaatttactatctttcatatgctacttatatatgactattcttatttttaaaaggtttaaatcatgcatgtggcatttacatatgttaattagagtttttaacatttaatttaatataattcctacgctaagtatatatgatgattacaatttttattaattttaaatcatgcagtatgtacatacaaatcttaattagagtttttaccaatttaataatatcattcatatgctaagtatatatgattattggaatttttattaattttaagtcatatatttgcttattacgatttatccacttaatttattacagacaaaaataatttttcgaagtaattgtcattaatctttgtactttaaataatgttaatacattaacttctattttagaaacacatatgtaagcgaaaataatatgcagtgctataatctttagtcccggttcttaacccttaccgggtttaaaaagaatttggaaatagcggaaaatatctttagtcc

SEQ ID NO: 26034 - DNA, 8853 bp, Oryza sativa
  unsure (1)..(8853): unsure at all n locations
tgttaacgaacacgtgaacgagaacgaacacgtcaacgtacgttgccgtgagaacgtgaacgagaacgagaacgatcgaacgaacgagagcgagaacaagaacgatcgaacgaattaacgtgaacgagaacgacaacgaacgtgaacgagaacgaacgtgaatgagaacgagcgaacgaacgtgaacgtgaaatgcaatatatatatgttacttctcatttatcctaatacatattttttgtatcttgcagaaaagacatgttgtcggagtcgtccctcaagccggagtagaagagctagccctagaaggaattcgtgcaggcaagtgacgtaataatataaatgattgttatatttgtaatgcaattaagaatattagacttgtaattagacttagcatataagattgtgtagtgttctaattttatttgagttttaatataagattattttattgcaaattagacttagtatgtaattattgactacagaattggttcgactcctagcaattgactattgtagtcttaattagacttagcatatacgcacgaaacacttagcatacatgactattttagtcttagcatgtaatattatttgagttttaatataagattattttatttgtaattagacttagtatataattattgactacggaattggtgcgactcctagcaattgacaattttagtcttaattagacttagcatatacgacagttacacttagcatacatgactctttcagtcttagcatgtaatattatttgagttttaatataagattattttattgcaaattagacttagtatgtaattattgactacggaattggtgcgactcctagcagttgactattgtagtcttaattagacttagcatatacgcacgaaacacttagcatacatgactattttagtcttagcatgtaatattatttgagttttaatataagattattttatttgtaattagacttagtatataattatttactagctagggttgtataatatacgtcacctagacttagcttatatcacgatttgtaattagacttagcacgtaaggttgtgtagggttctaatgtacgacatttacacttagcatacatgacttagattgttaaaacataaatgtctcgtgacttagcagatgtttcttgtatcaacagatggctgaccgcgatgaggaacagatattgtacgatacaatcgcggagggaagcagccagtactggaatgaagaagaggggaacgcggatccaaaccagtacttgaacgaggaagggaacgtggagagggatgcggaggggaaccagcaggggcacgtgaaaagggatgtggaggggaaccaggaggaggaggctagtggtagtcaaccctccgttggacagaagagggcacgcaggcaatgaggtgcagcgaagaagcttgagagtcggcacatcataacggaagtggaagaagatggacgtcctattgccccggccgaagccaccaagaactatttacgtcacagcggttgggttgtgcgggataacgtgcctgttagtacggtgtactggcaaagaacaagggcacgtggagatcatgagagctttgtctcagattcggagaaagagatgctgtggaccacaatgctcgagacattcacccttcccgcgggtacagaggacaaagtgaaaaggtggactctgaagaaaatggcagaacagtttcagagcttcaagggagagctgtacaagaaatatatcctgaagaggcagacaccgaacttcgacacatttccaaagctaagggatcactgggacgagttcgttgcatataagacaggtgaacaagggcaggcgatgatggaaagaaacaaagaaaatgccgccaagaagaagtaccatcaccacttggggtcaggaggctatagcgtcgcgatgccgaagtgggaggagatggaggctagcttgattgagaggggtatcgaaccggcaaccgccaattggccagaacgatcgaagttctggtactatgctcacggtggaacgctcaacctagctgatggctcactggtcttcggcgatcagatacgagaggctgcgcgacgactaacagatacagtggaagcctcgtctcagggcacgttccgaccaaacagagatagggacgagctgacactcgccctgaagactccagagcttccaggacgaacacgagggaaaggggtgattccttggaagattggtttcaaggtggacatccacacgtacaggagtcggatgaggagtaagagagataccgaggcgaagattgcagatctagagttccgggtatcgagctacgaactcagcatgcaagaggaggtggcaaggaaggttgatgaacgcatggccgcacatcggtcccatgatccccagccgaccattcctcctgcaatggtgagcccgtcaggaaaccgtagcagctgcgcctcaacagggcaggtaggatcatagagcatggacgctatgcaaacacaggacgaatcgacctgtcccgttgatgacatcactcagcggacaccatgtgagctgcatattccttacaagaacttatcaataaagataagctcgtagtttatatattttaaatttagccattccgctagttgctgcttatatatgttgattactaataaataatctctcacaacataaaggtggcgtcgggcatggccatcccaacggacccttcaggtacttaccactgcaggccgattccagcaggatactcgaaggtcaaagttgagttggtcgaaggcgcgtacgaggacctccagctggattaccctggaggagacggtgagacgcatctacgagacacaagccatgccattattctatggcgcaggcggtacatcatcatcccttggcgacaagcggcgtctcgtgcaccatctcctccggctccaccatcaactcctcaggatcctgcaccgtctcctcctcattatccgccagcaccgtctccacctcaggctccagcaccgactcctcctcagtatcctgcaccgactcctcctcgggctcctacacctactcctccgcaagctcctcttttggcaccttcaaagtcaagggccctcccagctccaccgcctgcccccacaagggcaacgaagaaggcgaaagttgacgccgccaagaacaaggacccggggtatgattgcacgcaagaggagcttgacgctcatgtggcatcagaagtcaggagacaattgaagcctcgaagtccagaaaaaaagattcctatagacccgagtgtcaggaacttcttcaggggtatgtctgcacctgccaaggaggccataaagctattgaactatgagcgaaccctcaagaaagcatcttctggaaagtccaaaccagtccctcagcttggagagcaaccaaaccaggagatcgagccgttggtgaccggtaaagaaatgacgatagaacaatttattactgacaccggtctaactacggatcaattgctaggagtcgcaccaatcgaaaaggcggaagtgaaatacatgtacgaactcggtaaaccgcttgtcaagcctgagctgctgcagtccttacccacacaaatgtacaagttccatcagctttacatggagatgagcgccaccggtagagagatgatcgaagcgaggatcagggacacggacttcttgcaaggagatgacattctctggatcaatttcaggggaatctacgaactataccagctggacgccctcgacatctctattatgagttgctggattttgtaagtatgtcgttcagttagatttcttactatacgtctcctttaattagttaggtccttgtatataagtagactatagaaaataatatactcccttttatcattgtagaatggagattcaaagggcccgacggcggagggttttcgatactggattcatcgacactcggagagtaaacgtcgcaatgctcgaccaatatccacaagaaacagtggacaatctcgtccatctcctgaaggtgcagcattccaagacgttcatactgttgccgtacaacacagagttagtttaattttactgtcttcctacataccaaatttcattcccgtatgaacttgctaagtgtttcatatgtaatgcatcccacgcacattgcaaattccactgggtgcttttactcttcgacctgtcggcctgcaccgtcaacgtatatgactcaatggataaaaaagagtctacgtttgacaaggtttatgaacttatagataggtaccgtcataagttcctctgttaattaagaaaatcttgttatgttaattgctactacgaatcatagctttaaactccatgtagtgcttggtatcggttccgtcatttggtccgcggcaaatggagagaaagacttaggcggaagttcaaatttcctgtgagtacacatgctctacttttatatttctccgattcaaatacatacaagtgtatattaattagatctctcgttgtttgtcatttatttgtagtgcgcaaagcaaaagcagggaactaacttgtgcggctattacgtgtgcgagtattgccactgccttgtagaccaaatcatcaccacaagagagctcgatgtacgtacaaataaattcaaaatttcattacgtaacgatttcttgtttaattgctaatcaatttcatacattcatatagtttattcgcatgagggataacctgactacacacaaggaatttatcgcggcggttcaagaacaactcatgggattcatcaacgaagaaatacttgatcccaagggtgaattctactacgacggaaacacaattcaccggtccttagcttctgagctagcagcgagtactactactacgtcgaaatcgtagctagctaggacatataatggattgtaattaatacatgactacatatgtttctatatgcatgtgtacacattttctataatgtaaatatattttggncatatatatatatatatatatatatatatatatatatatatatatatatatatatatatatatatatatatatatatacacacacacatatgcatttgcataacatatatattatgcatgtacttatgtacttatgtactgaaccatatatacatatataatatatatatatatatatatatatatatatatatatatatatatatatatatatatatattgaatcatatatatgcatggtttatatatatataaaccatgcagcaacagggccatgaaaaaaaaaaaaggtcagctcgatctttagtcccagttggtaataccaaccgggactaaagatggctcagccacgtggatctttagtcccggttatttcacccgggactaaagatagcgatctttagttccggattggtactcccggtttaaaaaccaggactaaagggggttacaaactgggactacaaagggtttctccaccagtggctggttctagctatagattaatcttggttttgagtatcgcatttgttgtctagtctatgatcaatgtcaatctgtgtgttgccgaaaggaattttttttatctgacttgtttatgttagcagatcgagtctactcccaaaaaaacgcgtggtcacaattcgagtagtaggtcagaaggcaagtcttgttcgcttcctaatttcttgcgccaacagaacaggaaagaccgagattttcttcctgtgattttggtttattccaaaaaaaaaaagaaaaaaaaaagagctgctgcgtgcatatccatgcaaggaaatttcattccagtgctagcttgagtcttcttgtaatttaattagccggttgttccatttgatagccgccacttgttcaaagaaaaaaaaagaaaaaaaaggcaggaggtgcaaaaaaaagagagaaaaagagccgcaccaaaaaaaatcagaaaaggaaaaaaaagaaaaaaaatcagaaaaagaaaaaaaaaagagaaaaaaatcagaaaaagaaagtgtggaatttttttgttggaatcttggagagagttgcttactatagcaagttgtggattgttcgactgtgatcatttgcttgcttaagttaggattgagtctagactacggcagcaattttgactagtactttggactagtattcaatttcgcaaatctgtttgatttttgctattccttgtgatatagttaagcctatcaagatccacatactactaacctttacaggtccggctttgcaattgctccactcatcaagcgtgtcattgtgccacgaaccagccacggtgattgacctgttttgcattctttgagaatattataagaatttggtgtatgcttgagtgttgagtgccttcaaaagctccacatatctatagattgttaggaactgatactttcttgtgagtttcttttgcttgctaacgatgtcaggtacaagttccaatgaaccaacactggagaatgtatcgcataaactgaagggcatggaaagttggtatgaagagttgatgcgtaatagtaaatcatacaaggaaagcatagataaacatttaaaaaccttaagtgaaagcctggtgaaagtagtggatcaaattgagcaaatgaatcgatcacataaacaattaactgaaaacattcagaatatgaatattggacatgaaaatattgtgcgacgcattggtttacttgaggctgcaggtgaagaaggtgcaggtgccactgctcatcgacaccaaagatatgacgatgaagacgaagagaaatatgttgctgatgatgagtaggaagacgagagtgttggaaatagaagacgatgtcgagttagggagaaagatgattatttatctaaggtaaaatttactatgccttcttttgatggtaagtttgaaccttctatttatctagactgggagctaactgttgagcaaaaattctcttgctatgattttcctgataataagaaagttaaagctgccagtagtgaatttacctcctttgcatctctatggtggaatgatatatgtggtagaggacttagacctagaacttgggatgatatgaaacgtacaatgaggtctagatttgttccttcttactatgcttgtgacatgttaaataaactgcaacttttaagacaaggtcccaattctgtagaaacatactatcaagagatgatgattgctttgtcatgctgtgatttgcaagaaactgaggatgctagaatttctaggttctatggaggtcttaatagagagattcgggatattcttgaatataaagaatacaataccgtgaatagattattccattttgcttgcaaagctgaaagagaagtgcagggacgcaacaagcataggagttcttttgcaggtgctacttctacacgacagtcaacaccacgtcaatctactgctgcctttcgtccagcttcttccacaccacctacctccacgccatcccatgttcaagaaacaagcaaaaatgcttcaattcagactctagccaagagtgaaacttcagtagtttccactggacgtacctgtgatactacatgtcataggtgccatggcattggacacattgcatgtgactgtccaaatcggcgagctctatttgtgaacgctgatggtaagtatacttctgctagtgattgtgatgatgaatatgctttagctgccactgaccatgcaggaggacaagataatgatgacatcgaggaagtccatttgcatccagagtcgctagatcagtatcctagcctaattgtcaagctagcacttagtgctaaagagaagtgtaaagagcaaaaccaacgtcacaatttgttccaaagcaaagttcttgtgaaaggccataccgtgaaaatgattattgatagcgagagttgcaacaatttagcaagtgaagagatggtcaagaagcttggcttgactacccatccacatccacatccgtatcatattcagtggtttaatacatgtggtaagatgaaggtaacccgcttggttaaaatacctttttctataggctcctaccatgatcaaattgaatgtgatgttgtgcatatgcaagcttgttctgttattttagggcgaccatggcaatatgatagagaagttgtttttgatggtaggactaatacatataaatttatgttcgatggtaaaagagttgttttgcattttatgactccagccgctgctttgaaagatgatcttgcaagacttgaatgtgaaaagaaagcgaaaagtgaaaatcagattattgctaaacatcctgcttcaactagtaaaatagaaccaagtaccacaaagaatttagttttgtaatttagttggtattagagcttcagttgactagtgaggattttaattttgtaattttttccccatcatccactatacagccacaacacttttccgttcaccaaaccatatatttgtgccttgcgattatcatcctatttgcattattgaattttcgtccctcgtcgtgtcagtgctggtcatagctactgatgacgctctctctcgtggcccgatcttctggtgaggggataactctcgctttgatcgagtgcgacatttgcgacatagctaccaaaaagaacaagtccaggacgccgtgcaatcgctacaccacaaacgatgtcgtaccaaccgtgacgcgcggttgatgatccctgcaatgtaaacgagaaaacactgcaagaacaagataagatgcaatctaaatattgcgaataggtgattaagcacaaggaatagtttcgattgaagtggtagatctaatcgacccggccaaatcacacaccaactaatgggggctctga

SEQ ID NO: 26035 - DNA, 10859 bp, Oryza sativa
  unsure (1)..(10859): unsure at all n locations
tttggcgattcctgttgactcgagacgaatttggacatgagactggatgcgtttgaaaggtagtgagataagctatccacgaagtccaagatcacccaaatcggagttggcatgaagacgctaggtccgtttgaagtcagtgctgtctccggaggccgaactggacttggacttggaattatcattggaacatgtgaagttatgagcgtatccgacgaagtgatgtcctcattaatatgtgtgccacatgctatacttgtggtatctatgcttggtgccctctagggaaacaaagagaagattgatatcatgcaaatagctcttcagttcttcccataaaatatagtttttttatgttttgtttagacacaattttgtttatggtgttaatcaaaactgcttatttttttatggtacaaatacaatgtaatctttagaaatgagtgaggttaatcactaaaaatatatgtagctaaacaaacacgtgaccgtgacaactgtagtagcatataatataaaagttacaattttgtgataatttcccacgctattgttgcagcaaactgaaacatgtcgctaattttgcagcaaattgatagttttgttttgcagcaaactgaaacatgtcgctaattttgcagcaaactgatagttttgacgctaaagttgcggttttgtaaaatttactcttgtttatattcaagaaagatctatattttagcatcttgtttgttttcgtcacttgttgtccataattgcatgatacacctttagtaattctaaaattgtattaatttcccaaaattatttataataactaatttgttgaggtgtacttatagttacgtcactatggtatggtttggtttatgattgttatattataattcctcaactataacaaaatatatggtgaatagttttatactcatgctataggattgttcatttgttaccaaacctatttgacaaagaaaaaacgtatatgctcataattcttgtgatggattaaggagtcatattatagcaagatcattgccggagcataccaatccaatagttatgaaaaatttaaaaactttgagaatctcaatctcacacaaactaaaattaaatcagatattgtcacgcccggaaattcactaataatttccgaactaatttgtgcataaaatcctcgtccaggaatcagccgaggtacacaaactgacaatttaatatacaaatccatcataataacgttacatacttacaaaagaaaagaaaatagcagtggaataacggtctagcgatggcttcagctctactcccacaggcagctcaactggggtataagccaaacgccttctccttctggatcctttttcttcaactgaggttgattaattattgcaagaatgagcatatgacatactcaacaagccacacagcaaatatgcaaatgcacaaggataccaaaggatggcataatatagtcttatttgcgaaagcagcatttagcaaagagctaagagtagtaaaatagtagagtaattaatcagaaattttaatcaacactgaacagcacacccatgctgcacaggcccaaccatcctgaacaaccatacccggctatacagatctaactccaaaccaggagctaaacaaattattaccagttatagcatcaataattattgtgagaggtgtgagactaatcacgaaaaacattgctcaacccgcccataaccgcgggcacgactattcgaatagttttactctggccagaggtgtaccactgtacccacaagacacagccccacagcatgtcaccatgcgcctcaataccaccacggtaccttggaaaggagctgtgacagtacccctcgcagaacacaatccaccacagcgcacctttcctggatcataatcaccctcttataaaacaagacatggactctccagcgacccccgtgggcttatctccgccacttctcagtctggtgctctgcaatgaaccatgctatacaaaaggtaaagccattgcccacgctggcttgtggttggcacggttaatgtttcacaaaagtagctcgcgaaccggtccttaattgtcatgagcatgactctcaaaaccatgtgctcacaacctaccattatcaagttttagttggcaagtaattaattaaccaatcacgattgaccatcgtgaactatcattaagccatcattaaataatagtaagtcataagttatcccaatagtgtgctaatgtttctaagcatggctaagaatcatatataatatctagctgaaccaatatatacaaagctcaactagtcaaattataatatcccaaggtatcaaggaatagagtaatcaatgcaaacaggccataacaaaggaatagatttacaccacccagtgacattcgaaaataaatgcacagttgaaataaatagagaatttaaatataggatcaacatgctcaaaggattgtttgggatctgtgtgacttgccttgcaataatcggtcttcaattaatcttctgaacacttccgacgcactgacgaaccttcgcaataacggaaacgacaagctaacacgcaaaacgaagaaaaagactaataaaaaccaaataaacagtacaaaaacaagcataaacagtacatgtggatatttttaacatgttgatctcaattttagaaaaatttagagacttgaaccaactaaatccgagctaagatgaattagttatgaattttcaaagattaaatcggattaaaacacttatatggattttaattgaattatgacgcaataatgaattatttttgaaaaggaaaaggcaattattacgtcagcggctagggtttgcggtggaccgggtgcacggcggcggctcacggaaacaaatggccgagattcatccatccaaaacggacggccaagatccaacggtccacggccagaccacgagagacgatgacgatgacgtcaccaccggcggtggctcgggcgcgcaaactcgccggcaaacgacggcgcgacgacgcgaacggaggacaccaacacgtagagggcgatgcggcgaactcaccggtgaccaaaacaacggcggaagatcaacggacggcaacggcgtcgaggaagaagcggcggcgaccttcggcttgacgacgacggcgatgctccggcgacctacggcgatggcggataggcggacgaggtcggcgatggcttggtgatcacgacagcagccttcccgagcgacgacgacgacgggagcggcggcggcgcacggctagacgaacggcgatgacggcggcgctagactacacggtgctagggctctaccggcgacgagaggcgaaagcgagggtggcggcgggtaacggcgggcttgggggtccttttataggggcaaggaggcggcggcaaaggcccacggcgaccagcaacgcgaaggaaagtgtagggttcggaggagagagatcgatccgaatcgaactcgaatccacggatttccaaacgattttagccgatgattccaaaagagaaaaaggtagaggagatcccgaagatcatttcccctctatagatttctccggagaaggaaaggcgcgagcgaatttggaaggagacggcggcggcgcagctcggctagggttccggccgggcgacggcgcgatgaggacgacgagtccgacaggtgggacccacctgtcagcggccgagcgcgcgcgcgggcggctgcgggctgactgggccgaagaggagagagagggaaggttttgggccgactttcggcccaaagccaaaagaggacttctagaaccttttccaattaaaataatcacttaaattatatttgaattgttaaaaatacttccaatgctcaaataatttcaagaaaaatcctgaaaatacttggacactcgaagtacttaacaaaattataattagaccatctaatgattaatttaatatgtgggtaattactgaaaagctctttgtatgattaaaaaaaattaggaattgagctccgaaaaaatccgagaatattccagagagtataattaaccatggagaatttaataaaaattaaatccatctatgctttatatttaggaagttttatttcccacctttaacttcacttgtaaattaatgaacatttaatataaattctaataataatttattaaataatttataaatcctgaaagaaaaatcaggatgtgacagatataattaaaaaacataacgttgcttcatttttcatgcatttagattccagtttgtgttatataattgtcaagtgatatttgaccataaaatataatgttaaattatttcgaagattatcatgacattatttattatattctgcctaaattattttaaaaagtattatgatactccctccgtccgataatataagggattttgagtttttgtttgtgttgtttgactacttgtctgattaaaaaattacttattatatgtcagctccaggtgttgtaatgtatttagcactataatataactatgatatgttatcaagatttgaatgcacctgattataagttgactataaaatttaaaaataatctaaaaaatcgctgtttaaacacatttaatttgtttttatatcgacatagtttaacttgcatatttatatttggagtaataaattttattttatcgtatataaaatcctattttgaagtccgtctatatattttttcgatggttctaccaacttatattagtatttttcgggctttatagttttattatcgcgcgttcgtatgtttctttgctttttttcaatcgaacatccagtaaatggtttctctggtatacggtatacacaggagattaaaaggaagtgggctaatcttatgatccaaaataatgggtccatcattttgaatgaaatttgacaacgaaattatatagtaccacgtggcattctaatagtgcttgctgaaacaccacatgaccatatttgtggagtgataaattttatttttatagtatagcaaatcctattttaaaatgaccgtatattatgtaccttttttaacggaacagtactatatagccttatttttactcgtgcatacgtaagtaattttttttcaagtgaacagtatctttttaatagctgctccctccatcccaaaaataagtgcagttttgcactattcatctccaacgtttgaccgtttgtcttatttgaaaaatttttataattactatttttattgttattagatgataaaacatgaatagtcatttatgtgtgactaattttttttataaatttttcaaataagacggacggtcaaacgttggacatggattttcatggttgcacttattttgggacagaggtagtattacataggtaattttttttcaaatgaacagtactgtacgtacgattacacgatgccatcgtacgtgcgtgtgcgtacctatgttgaagggctagtttctttccatagtacgtacgcaagtttttatggtgtaaacggtttcactcatatctataaaatattaagagaaagcaatatatgtattctaatggtcttaaataacggacccattaatttaaatgaaaattgatggtgagattttaaactaccacgtggcaacctagaaacaacatttgtaggagcgccacgtggtggcttagaagcgtttgtagaaaatttaatggacttttagtatataatagaatagatatccacatgatgatgttgtgtcaacttcttcatcgacgatggtaatcagtgggcacgaaatttaaatctcttgggtggctttcgaataatgtcaaggttcttggagattaatcaatcccagtacgctttgtttgatctttcaagtggtgatgtcaaagtgagcaggcaacctacccgttggaatgcggggtatgaaaagaaagaataatatttacgagacgagctgagttgcattggtttgattaagattccagaattcttgaaattttggcaaagagaaatgggattccatcgagctagaggagcaattaacactggtagagaaatcgtttttagtcccggttcgtaacccccctatagtcccggtatttaaatcgagactacgaatccgggactaaagatccctctctttagtcccggttcaaatacccgggattaaagatcgatatttagcaccaaccgggactaaaaataggagtggcagtcacggttagttttttttttcatttattgctacttactatctctaatttattttctcccaaattaggtgggatgcatatccccaaatcaaaccccaaatcaaagtcaaaccccaaatcaaagaaacatcccaaatacacaaatcatgtacatctcagatccatgcaataaatcacagattctaaaaaagaaattatacatctcaatccatacaatgaatcacaaattcttcatctcaatctatacatggatcacaaattcttcaaaaaaaaaaaggaagcaaagccgccggccggctgagccggctgctgcctcccctcctccccggccgccgccgcgccgccctctgccggccggcccgccctccccctcctgctgcacacacgggaagggataacaaagaaaagagataaggaggaagcgaagaagggaaaatattaggattagagatgcagagagagagtagtttgtgtggacgggaaaagagaataaataatagggattatatagtgcgctttgatctttaatctcggttagtaacatcatccgggactaaaggtcatcgtgatctttaatcccagttagattaaagatccgatctttactcccggttggtaactccaaccaggactaaagatcctaaaggggcctgacaacacgactaaagattctctggaggggcctgacaacacctgatagtatgtgaatcaggactaaagatgatctattaaaaatcatgtagtctcgttctgcttataaaccgggactaaaaaccatctttagtcccgatttttattgcaaccgggactattatggttttggtcgaccgggcaaagataatttctccactagtgtaagtagcaatggtacttgaagcatatagctaacaatctcttgctgcatccattctcatctgacgaaggacgatgaaaatgctgagcacggacgagctaggagattgtcctactggccgtttgttggtaagaagaagcagcatgaatggccagcatgcggacgtgtatatgcacttgtggctccagctctcatggcggatgtttggtcgattcatcacatagaggcatgaccaccaacaagcatcaaaagcgtctccaagccatatcgatccatgacattgtccgactgctcatcaatggctcctagtgccttccatgcctatggggatagaggacacagagcctgcgaagagcatgtatcgagccacgatgttgcatgggctgaaagtatgcttcagtcatttctctgttttttatgcgtaggagtatttataaggattcctgtaaaaaaaattataagtacgtacttgcgcacttgcagcaatagatgagagctgagcaggctgctaccggctgcacacttgcaatatacttggatgtgctaaactacacctgggttaccatataactaaaacgcactactcatggatacatccccaccctacccatccagcccgtcccgccccctccccccaccctcttacccaaacatcctgcacgtttcccaccaccccctctcagtccgtaccttttctctctcctgattttcttcctatgtctttctctcagtacatgaattatccttatccttagattgtcttaggccattctattagtaaataaattacaaaagataattctataccaatatgttctcataccttctcctatcttagtaaataaattacaaaagataattctataccaatctgttctcataccttctcctagtaaatgaattatgtggtgatgttacaacaaaatttttcttttaaaataaattaatattaaccaatggttctcgacataaaattattatgccgatagttgtcaacatattaatcttgctacaaaataatatttgcacgttattggccttctcttagtaaataaattacaaacgcatacccataacatttctcttagtaatacattgacggatacctaaacgatttcggtattcaaagtccttcgacgaacaaatggtagtattttttttcctcaacgatatacacagctgttattctggcagtaaaaaagttcctaattgtcatgcctggaatttctatccaaaattccaaacgcttacatgtatgtaaaccctcgtccagtaatcagccgaggcacacaataacaaattgataatagagtacaattattactctaattaataagcgaataaaatgtcattacaggggtagatagttcccctcaaacaataaagttctaagcagtggaaaataaagaaacagcgcaggcgactcctctccacatgcagcttgatcagggctacgcctaatcatccacaccatcagcatcactgtagaactcctcctctgatgaatgattgcaaggtgagtatatgacatactcagcaagtcacgcagcaaatatgcaagtgcacaggataacaaagaatatcatagtatagtctcatttgcataaatagcatttaataaatattttagaatttaataaaacagttaaataataattaaacaatattaatccaacgctatacaacataccctgttgcataggcccaaccattctgatcaaccaatcctggctgcacagttctatctccaaaccaggaattaaccattccaaaccaggagctaaataagttattaacatcaatatggtgagaaatgtgagactaatcacgaaagacattgttagaccagcccataaccgcgggcacggctattcgaatagtttgaactctggccagaggtgtaccactgtacccacaagacacaacctcaacatcatgtcaaccatgcgtcgcgatacttgacaagtacccgaatagagattgtgacaataccctctatataatacaattcaaagcagtgcaccgttcccggatcatatcacccccctatannataatgtatggactccccagctacccccgtgggcttatctccgccacttcacagtctggtgctctactatganccatactatacagaaagtaaagccgtggcccccgctggcttgtggctggcatggtaaatgtttcacaccgaaaaatggtgaaccggtatttaattgtcaagagcacaaccatcaaaaccatatgctcacaacccaccattatcaggttttagttggcaaattaattaattaaccaatcatgattaaccatcatgagctatcattaagccatcattaaataatagtgaagcataagttatcccaacagtgtgctaatgtttctaagcatggctaagcaattatatctagtatccagctgaacccatatataaagctcaactagtcaagttataataacccaaggtatcaaggaatagagtaatcaagaacaaaaagggctataacaaaacaataggttaattccacccaatgatattcgaaaataaatgcaatagttgaatagaaacaatagctttaaacaggattaacatgctcaaagagttgtttgggatctgtgtgacttgccttgctggccttgaaattcctcaaaatcttctcctgcaaattcggactctccgggaacgtcagaatctaaagagaaaagaacaaaattgtcacgtcccaaaacgactctaaaatacatcctctaaattatgcctagaataattaaaatccgtgtgaaagcctccaaccattaaaaggtgcaaagttaaaagtcaaataaggcttgggggatttttgtatatttcctaaaagcctaaaatgcgtaaataaattttagtggaattttcagagcacaaataataattattaagaaataaacaaagttaaaatgattttataaaaagaaaaactctaaaaagtcccctttccctccctctccctcttgggccggctcggcccatctccctccccctccctctcctgtccccgcggcccatccggcctctccccgcgcgcgcgccgctgacgggcgggcccgcccgccaccctcgctgatgggtggggcccacccatcatccccttcctcccgctgcctcgcccgcgccctagcgccgccgccgccgcgaatcccgccacctcccgccgtctccgcgtgcaataaagagggggaaatcactccccgtgatcccctctccctttaaccccatttttccctctctctctcgcgttcaaacgggcggatttgcccccgcatatctcgccggcgccattgatggcggccggaccttccgcgcccggtttctccctttcccgggcaccctctcccgacccagctctatttaaaccctgcccgcacctactgcgtncggtttcgcctctcgccggccttcctcctcgccggaatcgagctcgcgccgtcgctctctctctccgccgtcgctgtcgagctccggtccgccgccgtcgtcgccccggaccacctcccaccttggcgccgcctccttcgggttcgccgcatactcgccgacctcgtccacccctccgtttcgctcgccgaccgccagaacgccgtcgacccgagccgcgccgccgcctttctccgctccggccgcctttttcgtcgtcgccgtcgacctagggtgagcccgggaccgccgcttcttttcccccttcccttcccctctctcggccgtcgctccgccgtgcctatggccaccgccggcgaccataggggcgcgg

SEQ ID NO: 26036 - DNA, 4215 bp, Oryza sativa
taaagagcatataaacttcaaatgaccataacttggccatttgaactcggaattggaccgtttaagtctctaatttttccttaagaagtcaagaacccatttttgtgctttgttccagcttgttatatggagtttattagagtaaaagccttttcttttccgttggtcgtgtagacgctgcagcttcggaagatccgctcttcgtggaagttgaagccgacgtttgggaaagcgagcaaggcaagtcacatcatccttgaacatattgaatcccagtttataaaattattttgatttaaattattgcattatcgctttttttaaattcccgcgttatcattgttttatctagccatgcctatgtacctttgttatgaccttattatccttgttcaccctagaataaacaaaaccccaactagtggacactctactcatggtaccactagtatgattttagttagatgcttcgctggttaattaggtaacattaggtggtttacaactctagaccttgggaatactcttattacctggacactatggaattgttggattattgtggaattggattcacacctccccctctattcaaaatcctcaaaatggttttaggctgggctcggggtgcatggttttgatagtagcacctcggccatataaggaccggtcttcgggcctctgttgcaaagaactaccgtacttccacatgtctagtgggtaaggcttagtttgtggctcagtctggttataaacaaaagtacacggatggagatagacgaagtcgggggtcgatggacatctctagggcaaatgaaggctacacgagctgcggcccggtagtcgagatgtcatggcacagggccggtgtcctgctgctaggggctcagtcctgcctacctgtcccgggggttccggccgtaggtggggttgggtcagtactcttgtctatggcaaggatgggttggaaactatgtcacgtcttccgtccgtataccgtggtggtatggggcacgtggttacacgtgaggaagatgtgtcttgcgggtaaagatgtacacctctgatcagagtataatctattcgaatagccgcgccctcggttatgggcaagccgagcaatgtacccaagttagtgttttaattcttaaaacctgcttaacaactaaaatgtgaaatggttggcctgggttggcttgggacgagctgggacccagggtcaggttgctagttcggtctaaatcatcgtaggccttgggttaaggcaggttcgtgtgggttcacggccttgtttaataatcttgtatagctctaggatcgtatttacaaaatagctttgagcaactaagtgtcttttaatgctgtttgctgcaaaccctaaccctttatattataacccccttgtactcccttgcatttatcctgcacttgtgggtgtgtcttgttgaatacggtggttgtactcagtcttgctcaatttttccgaaacccagaagaggagcccctggaagatgaaggctttggtgtctagctcgcgcctgccatcaagcgcctgtggtcgtcgccctagccttccgctgtttcccatttgtctttgtgtgtgctgggccttcgccgcccatgtaataaattaattaattacgcttcagcttgtaaactctgaattgtatcaacttttggtgtaccttgcctcctgggacaaggaataatgcacgcacgtaaggaacgcccgttgggttatttccggtcgtgacaaaaatcaccaaaacagcacataaacaagcatgaacagtacatgtggatatttttaacatgttgatctcaattttagaaaaatttatagacttgaaccaagtaaatccgagctaagatgaattagttatgaatttttaaagattaaatcggattaaatcatttatatagattttaattgaattatgacgcaataatgaattatttttgaaaaggaaaaagagattattgcgtcagcggactcggctcacggtggaccgggtgcacggcagcggttcacagaaacgaacggccgagatcgatctatccaaaacggacggccaagatttaatggtctacgaccggtctacggcggacggtgtcgatgacgtcagcggtgacgtcatcaccggcgacggctcggacggcgcattctcgccggcgaacaacggcacggcgacgcgaacggaggacacctacgggttgcgggcaacacggcgaactcactagtgaccaaagcagcggcggaaggtcaacagacggcgacggcgtcgaggaaaaagcggcggtgaccttcagcttgacgacgacggtggggctccggcgatctacagcgacgacggaggggcagacgaggatggcgacgagatgacgatcacgacgtcggccttccctagtgacgacgacgaccggagcgatggcggcgcacggctggacgaacgacggcgacggcggcgctaggctacatgacgctagggctctaccggcgacaagagacgaaagcgagggtggcggcgggtagaggagacaccgggggtccttttatagcggctagggggcggcggcgaaggcccacggtgaccggcggcggcgatggaaaggttagggttcggagagagacaaatccgattcgagatcgaatccacggatttccaaacgattttagccgatgattccaaaagagaaaaggtagaggggatctcggggatcatttcccctctatcaatatgaccggagatggaaagatgcgatcgaatttggaagagcggcggcggcgcagctcggctacggttcggccgggcgacggcgcgaggaagacgacgagtccgacaggtgggccccacctgtcagcgggcgagggcgcgcgcacgcgggcggcgctcggctgcgggccgacctgggccgggaaggagagagagagaggtttgggtcgactttcggcccaaagccaaaagaagactttttaaaacttttccaatttaaatttttcatgaaatgcaattccatttattaaaaatacttccttggctcaataaatcccagaaaaatctaggaactatagaatcaagcaaagtatttaataaaattttatctggcccaattttatattggaatttattatttaaaattagatcttctcttctaggcttttaaaattatttctaataattccaattaaacaataatttatatatttgagatttttagggtgtgacactaatacattttttttagataatggaagtattattaatctcagtaaaattctatcaagtgatacaattattctgagagcacctccggcttctgcacccaaagagtgcacacagccaacaagaaagaaacgaaagataaactcatcatccaaatagcagggacaaaaagaacttcaggagccctctaaccgtagcctagaatgccacccatgcgccggggtagaaaactccatggccactagctccaattgttgacaagccggaatgatagttccctgcaaattgaccttctgaaggatagcccatgagcggagccaatgtgtaataaaaaagataacctgcaaaggagaagatatgtttttttctttcaaaaaccacatcatttctgcaaagccaaatagaccaaatagttgttgttgccctaacaagaccaaaaatctcaaattgcgtggttgtcttcttatccaatgcccaaacatatgagttgtactattaggtaaactaatattcgaagcaaactggattaaataccaaactgcgcgggtaaaccgacaatcaaagaccaaatgattaatagtttcatctttatggcagaaagaacaagacttgtttcctctccaattcctttaaataagattatcttttgttaagactactccacgacgtaagtaccataagaagatcttaatctttaggggggctttgatctttcagattcttttgtttatattgggaacattggtctccaccaacgcaagataaagagatttaaccgagaatctgccatcagtggttagattccatttaaactcatcttggtcgtgagataatataatattagcgatgcgtgagagaaggtgattccgcgctactaacttagagccagtaaggtccctacgccaagaaaagcttagaggactggtttggaaaatttctgaaatagttgcatgtttatgcctaacaacgttatagagacaaggatattgtt

SEQ ID NO: 26037 - DNA, 887 bp, Oryza sativa
cggcaccgatacgtcaagcgatgacgacagcaatgacgtcagcaccggcggcggctcgggagcgcaagctcgccggcgaacgacggcgctttggcacaaacggagggcaccaacgggtagagcgcgatgcggtgaactcaccggtgaccaaagaagcggcggaggaacaacggacagcgccgtcgacgaggaagaagcggcggcggagatcgggttgacggcggcgacggagctctggcggtcttcggcggcggcgaaggggcggacgaggatggcggcgacttggcgaccacgacgatggccttcccgagtgacgacgacgaccgtagcgacgacggcgcacgactggagcggcggcgacgacggcggcgcgaaagctcacggggctagggcgctacacatgacggcgggcgaaggcaagggaggcgacgggtagaggagagctcgggggtccttatataggtgcaaggaggcggcggcgaaggcccacggcggccggcgacgagaaggaaagattggggaaaaacgaatccgaatcaaactcgaatccgcctatttccaaaggaaattgaccggagtttctataagagaaaaggaagaggagatcgagaagatcatttcccctctatcaattcggccggagatggaaaggagcgacggaattggaaagcgacggcggcgcggctcggctagggtttcgggcggcggcggccggaggaagaagacaagactgacaggtggggcccacctgtcagcgacagcgagagagagaggagagcggcggcgacctgggccggactgggccgagggaagagagagagaaggagagaggttttgggccggctttctgcccaaagccaaaacagacttttaaaaacctttttcaa

SEQ ID NO: 26038 - DNA, 2163 bp, Oryza sativa
gcgtaagcgcgtttcgcctctctcactctccgtgcacccgtcgtcgctgcccttgttttcgctgatctgccccaaagttttcgctaatctcgcttactctgcttttgtctgtttagacggcggcgatgaggagcccgcaggagaggaacacgcggctggagaacatgtcgtggaggatctggaaccttgccagaaagaagaagcaggtatatgcatgttccggtgaatcgacagatgagccacttctcttattatctactccctcttcccaaaaaaacaaaccctggttgtcctgggtttcccttctcttatatgaattttttttataattagtatttttattgttgttaaatgataaaacatgattaatactttatacgtgacttgtctttttaatttttttcataattttttcaaataagacggacggtcaaacgttggacatggaaactcagggtttgtctttttttgggacggagggagtaaatattttgcccagcatactgcgcctttaataaacatttctacgacagttacattgtatagtgacgctggtttgactggggggagtgtcaactctctgcaccctggccttggcatggagattgtgttaactgccgttggtaaaatactgctagttgtggccttatgggttgttaccatgttagcctttgttgcatgcagggaatacttcatgctacttgtgctgcatttgacttgactcttctggtggtgttgtagattaccatgatagtatcgtgggtatccacattttgtctcaagtgcctgctagctgtgtgttatttttttttttgctgattctagtatttgctagaaaatctgtcttttggtgtatctggaggaatttctctcgtgccagagaacacgtacatatccctgcttgaggaggtacactgtacaagtgtgtatgtacaagagtggaactccattgtgtatcttggcgttcaggttgaacgaagttgctttagctgcattgattgtttatatattatatacatcaaataaaaacagattagttgtgaatgaaactatatgcatgttcttgcctttctctaatttatacagtgcagttttcatccaaatagatggtttcatgtcactgcttaaactagggtactacctgctgatgagtaggattacagttgtcatgtagttaactaatgtttttctttctaggttttctaatgcaattcatgatgcttaaacccatcacgtgcgacaatgttatgttatgagaatgctttagtgaacagcttgaactggtaatttttgcagaataatattatcaacaaagttttgaaaaaatattaaattaattattgtgcctagttttgacacctacaatactttgatggttgaaattcaccagcacacatgcaaatgcaaaattcctttggaaaggatggactatttgttactgacattgttctaaaaattgtgcatctagatcactctatcagatctgttactgataaaattgctatttccaaccgtctccattattccacactgaactgactagacctgtgtctgaaaccatatttcatcaaatttccggacaaatctaaagtgacttgacctaatggtgtacttgagttttgagcaaagaagataatttcaaaaacgttattattgttctttattctccagctgtaaatgttaagtgtttctgttacattaaaacttgataaaattccagcattttgtttcattaccgagttttaatttgcttaatacagattgaaggtgaagaagcctcccgtttagctaaacaacgtcttgagcgtgagaaggctcgtagatatgctgctgccgatatgtctgaagacctatctgagggtgaaaagggagaaaacattaatgaatcatcatctactcatgacgagagcacaagggggagaatgcctaggataggttcaacagatgctattgaggcatgggcaagtcagcacaaggataaaaagctatacattgttctgataaggtatggtgctaattgttctgctcttgagatgatattgatcttggtctatttgttctcttttatattcaagggcgtatcgtgctttggtgcatggaatagatatagaatctgtccatcagtcaattggttagtgtttgtatattttgttatatgtgacc

SEQ ID NO: 26039 - DNA, 687 bp, Oryza sativa
  unsure (1)..(687): unsure at all n locations
aggagaagagagcattcatcatgtcgtttggtgtattctgctacattaagatgccgtttggactaataacgcaggaaatactttccaacgcacggtccaaggggcacataacgattagctcgggaacaatgtcgaggcctacgtcgacgacattgttgtcaagaccaagacaagcgactcattaatcgatgatcttcgggaaacgttcgacaacctccgaagataacgccttatgctcaatccaaagaagtgcacgttcggagtaccatcgggcaagctactcggattcctcatctttggaagagggatcgaagcaaaccccgagaagatcaaggcaatcgagaacatgaagtcgcccacaagactcaaggaagtccagaagctaactggatgcatgacggcattgagcagattcgtcgctaggatgggagaacgaggacaaccctttttgctctgctgaagaaacaagacaaatttgtgtggacacaggaagccgaagatgcattcatcgcactcaaatgctacctgtcaaatccccctgtacttgttgccccccaacctaatgaagaattattccattatattgccgccacaccatattctgtgagcgtcattattgtcgagagagaaaaggtgcaaagactagtttattacgtcagcgaagctcttcacgacgcanagacaaga

SEQ ID NO: 26040 - DNA, 1130 bp, Oryza sativa
tcccctggttgagctggttctgcatttgctgtatcatcatgttcattaactgagtctgttgagccagaacttgagcaagagttgggttcccttcattattattgtttccacttccactggcgcgagtgttcaccatctattgcagattagagaagataggaggagaggggttacactaaagttaagaccttaaccatgttaccactgatctggtgtgtgtagttcattatattgttcaagttgattaagcaagcaacctagtatagttacatactcatcattgaactactccaatgatgggaaagcaaccatacctacacacaagcaaacaacaaacgttctaccctactaactattcttcaaagatactttggcggcataggttctaaggtaggatccaaacttcattccatcttgaccacttggcacttcagatcgaccatcaccttcttattcatcgatccacttgacttaacctccacaagtagaccacattggcgtcttcaagtttcaacaactactttcagaactactcaagttgaaagagagaggagagtagacaatgaaacaatttgcaaagaattctagataaggaagaaaggaggaattttcacaaattatgttttcggaaaattagtccttaaggtttgaccatttggcttatcctacagtcgagatggctctgataccaacttgtcacgcccggaaattcactagtaatttccgaacttatttgtgcataaaatcctcgtccaggaatcagccgaggtacacaaactgacaatttaatatacagattcatcaaattaactaaaacgataaatacttacttaagaggcacttagtcctcaccatgaagaaaactgcagcggaaaataaaatctagcgaagctccggctccactcccacaggcagctcaactggggtataagccaaacgtcttctccttctggatcctttttcttcaactgaggttgattgattattgcaaggtgagcatatgacatactcagcaagccacacagcaaatatgcaagtgcacaaggataccaaaggatggcataatataggctcatttgcgaaagcagcatttagcacagagttaagagtagtaaaacaggggtaccgag

SEQ ID NO: 26041 - DNA, 1377 bp, Oryza sativa
atatctagctgaaccaatatataaagctcaactagtcaaattataataacccaaggtatcaaggattaaagtaatcaatgcaaacaggccataacaaaggaatagattcacaccacccagtgacattcgaaaataaatgcacagttgaaataaatagaaaatataaatataggatcaacatgctcaaaggattgtgtttaggatctgtgtgacttgccttgcaataatcggtcttcaattaatcttcttgaatacttccggcgcactcgcgaaccttcacaacgacggaaacgacaagctaacacgcaaaacaaagaaaaagactaataaaaaccaaataaacaatatataaaaagtaaacaaacatgtagatcataattttagatgaattatgagacttgaacggcctcattctgacttcaaatgaatttattatgaattttacaagattaaatctatttaaagcccatttaaaaagaattaaataaatttaattcaatttatggacaattttaatatatagatctttattttatacaacttttgcaacttgaaccacattaaactgagttaagatgaattagttatgaatttttaaagattaaatcggattaaaacacttatatagattttaattaaattatgacgcaataatgaattatttttgaaaaggaaaagaggattattgcgtcagcgggctcgggttcacggtggaccgggcgcacgggcgacggttcacgggaacggacggccgagatcgatcctatccaaaacggacggccgagatcgaacggtccacgaccggctcacggggagcggcaacgatgacgtcagcgatgacgacagcgatgacgtcagcaccggcggcggctcgggagcgcaagctcgccggcgaacgacggcgctttggcacaaacggagggcaccaacgggtagagcgcgatgcggtgaactcaccggtgaccaaagaagcggcggaggaacaacggacagcgccggcgacgaggaagaagcggcggcggagatcgggttgacggcggcgacggagctctggcggtcttcggcggcggcgaaggggcggacgaggacggcggcgacttggcgaccacgacgatggccttcccgagtgacgacgacgaccgtagcgacgacggcgcacgactggagcggcggcgacgacggcggcgcgaaagctcacggggctagggcgctacacatgacggcgggcgaaggcaagggaggcgacgggtagaggagagctcgggggtccttatataggtgcaaggaggcggcggcgaaggcccacggcggccggcgacgagaaggaaagattggggaaaaacgaatccgaatcacactcccatccgcctatttcca

SEQ ID NO: 26042 - DNA, 1283 bp, Oryza sativa
attactgaactgttctttgtatcatttaagaattgagctccgaaaaatccgagaaaatttcagagagttgacttaatcatggagaatttaataaaaattaaatccatccatgctttagatttaagaaattttatttcccacatttaacttcacttgtaaattaaagaacatttaatataaattctattaataatttattaaataatttataaatcctgaaacgaaaatcaggatgtgacaaactaccccccttacaaagaatctcgtcccgagattcggaacggctagaaagaaaaagggaataggtaaactgcagtctatcttattccataactccgataattattctaaggctttaatgaaaactgctgccgctttgaaactggtggctgagctgcaacacttgaagacgcaactcttgaagacgcaactggcactgcattggctcctgtgacgacaatgttgttgacttgaccttgcggctgctgatgcttcggcttcggacactctcttgcaaagtggcctggcttgtaacagttgaaacatacctgctgctcccttccactactgttattctcctgagactgatcctgctgaactggcaccggctgattagcttgctcgatgttaactttattgctttcattagtctctgatttgatctcaccaccgatgttcaactgttgcgactgtccttgaccagcggaagaaggttcaccaatttggagtggcttgatacactgcctctggctactaccttgtgcctcctggaatacagtcattctccttttacggttatccatcctgttcttcttgtcttcaagtcgaattgctttgtcaaccaactgctgaaaatcagcatagtcatgagagatcaacgtaactgacagttcatcctttaagccttccaagaacttctcctgcctttcctcgtcagtacgcacatcttctggagcataacgtgccagacgattgaactcatgaagatactctgccacggtatgatccttttgcttcaatgccctgaactcacgcttcttcaaagcaacaactcctacaggtatgtgtgtcttcttgaatccttcggtaaactcttcccatgtgattggttgtccttctgctctgttcatccggaaatgatcccaccattctgatgcaggtccttgcaactgatgtgaagcgaacacgactttctcctgatccgtgcactggagcaattccaacttcttctcaatagtgtgcacccaatcacctgcttccactggggggtaccgagctcgaat

SEQ ID NO: 26043 - DNA, 2277 bp, Oryza sativa
tccttgtcccaggaggcaaggtacaccaaaagttgatacatttcagagtttatcaagcggaagagtaaatagttactttattacatgggcggcgaaggcccagcacacacaaagacaaacgggaaacagcggaagactagggcgacgaccacaggcgcttgacggcaggcacgagctagacaccaaagccttcatcttccaggaactcctcttctgggtttgagaaaaaattgagcaagactgagtacaaccaccgtactcaacaagacacacccacaagtgcaacataaatggagggagtacaaaggggttaaagtataggggttaggttttgcagtatacagcattaaagacatttagttgctcaaagctattttgtaaatacaatactcgagctatgcaacattattaatcaaggccgtgaacccacacgaacctgccttaacccaaggcctacgatgattcagaccgaactggcaacccgaccctggggtcccagctcgtcccaagccaacctaggccaaccattccacattttagttgttaagcaggctttaagaattaaaacactaacttgggtacattgctaggcttgcccataaccgagggcgcggctattcgaatagattatactctgatcagaggtatacatctttacccacaagacacatcttcctcacgtgtaaccacgtgccacataccaccacggtatatggacggaagacgtgacatagtttccaacccatcctagccatagacaagagtaccgactcaaccccacctacggccggaacctccaggacaggtaggcaggactgagcccctagcagcaggacaccagccctgtgccatgacatctcgactaccgggccgcagctcgtgtagccttcatttgccgtagagatgtccatcgacccccgacttcatccatctccatccgtgtacttttgtttataaccagactaagccacaaactaagccttacccactagacatgtggaagtacggtagtgctttgcaacagaggcccgaagaccggtccttatacggccgaggtgctactatcaaaaccatgcaccccgagcccagcctaaaaccattttgaggattttgaatagagggggaggtgtgaatccaattccacaataatccatccattccatagtgtccaggtgatgagaataacccaaagtctagagttgtaaaaccacctaatgttacctaattaaacagcgaagcatctacctaaaatcatactagtggtaccatgtgtagagtgtccactagttggggttttgtttattctagggtgaacaaggaaataataacaataacaatattaaggtcataacaaaggtaaataggcatggctagataaacagtgataacgcgggaatttaaataaagcgataatgcaataatttaaatcaaaataattttataaactgggattcaatatgttcaaggatgatgtgacttgccttgctcgctttcccaaacgtcggcttcaacttccacgtagagcggatcttccgaagctgcagcgtctacacgaccaacggaaaagaaaaaggcttttactctaataaactccatataacaagcaggaacaaagcacaaaaatgggttcttgactcttaaggaaaaattagagacatgaacggtccaattccgagttcaaatggccaagttatggccatttgaagtttatatgctccttaaatgaatatttacgaatttcttcatttaaattttaatttaaaaatggtttattgcgtcagccgaggggagaggatgcgcggaccgggtccacgggagtggggcccacgcagcagcctcacggtccacggtggaccgggcgcatccgggctcacaccggccggttccatgggccccacgcgttagccacacccgagggcgtgggcggctgacggccgggccccacgcggcggccactcgtcgcgcccgaaggcggccacgtcggcgcggccggcgggaggcagcgcgcccgtgcccctatggttgccggtggcggccataggcacggcggagcggcggccgagagaggaggggaaagggggaaacgaggcggcggtccacggctcaccctatgtcgacggcgacgacgaaaaaggcggacggagcggagaaaggcggcggcgcggcttgggtcggtgggtacggtggcgctccggcggtcggcgagctcgactagggggtggacggggactgcgacagtgcggcgaagctggggcgggaaacggtcccggcgagcgg

SEQ ID NO: 26044 - DNA, 7186 bp, Oryza sativa
cccgaccctgggtcccagctcgtcccaagccaacctaggccaaccattccacattttagttgttaagcaggttttcagaattaaaacactaacttgggtacattgctaggcttgcccataaccgagggcgcggctattcgaataggttatactctgatcagaggtgtacatctttacccacaagacacatcttcctcacgtgtaaccacgtgccacataccaccatggtatacggacggaagacgtgacatagtttccaacccatcctagccatagacaagagtaccgacccaatcccacctacggccggaacctccgggacaggcaggcaggactgagcccctagcagcaggacactagccctgtgccatgacatctcgactaccgggccgtagctcgtgtagccttcatttgtcctagagatgtccatcgacccccgacttcttccatctccatccgtgtacttttgtttataaccagactgagccacaaactaagccttacccactagacatgtggaagtacggtagtgctttgcaacagaggcccgaagaccggtccttatatggccgaggtgctactatcaaaaccatgcaccccgagcccagcctaaaaccattttggggattttgaatagaaggagcggtgtgaagccaattccacaataaccaaaccattccatagtgtctaggtgatatgaatattcccaaagtctagagttgaaaaaccacctaatgttacctaattaaatagcgaagcatctacctaaaatcatactagtggtaccatgagaagagtgtccactagttggggttttgtttaatctagggtgaacaaggtaataataacaataacaataataaggtcataacaaaggtaagtaggcatggctagataaaactgtgataacgcgggaatttaaataaagcgataatgcaataatttaaagcaacataattttataaactgggattcaatatgctcaaagatgatgtgacttgccttgctcgctttcccaaacgtcggcttcaacttccacgaagagcggatcttccgaagctgcagcgtctacacgaccaacggaaaagaaaaggcttttactctaataaactccatataacaagcaggaacaaagcacaaaaatgggttcttgacttcttaaggaaaatttagagacttgaacggtccaattccgagttcaaattcttaacaagcaggaacactggcctctccacgtaggtcaagtcttcgcgaacttcaatttgctctgagtcggcctgctcggatggcactcgaagacatttcttgagttgcgacacatggaacacatcatgcacgttgcccaaggcggcgggcagctccaactggtaagcgacttctccgcgccgagcaatgatacggaaaggacccacaaaccgaggtgcgagcttcccttttgtctgaaacctgtgtacacctcgcaatggcgtgacccgaagatacacaaagtcatccactgcgaattccaggtcacggcgacggttatctgcataacttttctgccgggactgtgccacctttagattatcccgaatggttctgaccttcgcttcagcttctctcaggatatcagtcccgaatacttggctttccccaacttggtcccacaatagcggtgtccggcatttgcggccatacaacgcttcatagggtgccatttgtatgctggcttggtagctgttattgtaggagaactcggcataggggagactcttatcccaggtcttcgcgaaatctagaacacatgcgcgaagcatatcttcgaggatctggttcagacgctcggtctgcccatctgtctgcgggtgatacgtggtgctgaaatttaatcgggtatccaactcttcttggagcttcttccagaagggagaggtgaattggcttccccgatcagatacaattttttaggaacaccatggagactcacgatcctagcgaagtagagttcagctagtttgttccctccataggtggtcttcacgggaatgaaccgagctaccttggttagtcggtccacgactacccatatagaatcatacccgccttgggtttttggaagtccggtgatgaaatccatcccaatttcatcccatttctattctggtacttgtagaggttggagaagtccggccggtcgttggtgctcagctttgacacgctggcacacatcacaaagggccacgaactctgcaatttcccacttcatactaacccaccagtatttctctttcaagtctaagtacatctttgtactgccagggtggatggaataaggactttcgtaagcttcctaaagtatcagctgtttaggttccttgtcgtccggaacgcatacacgatttccgttccatagggttccatgtacgtcttctgtgaaaccagcggctttaccctgtttcatattcttgaggatcccatacatatctggatcattcttctgagcatcacggatttggtcgagcaaggtaggcgtggcttccagagtagccaagaatccatgactaacgatgcttaggttcagggcttccaacagttgattaagctccggtggaatgccgcggacgccaagagcgttgcaatggctttttcgacttagagcgtcggcgaccacgttggccttaccaggatgatagtggattcccacatcataatccttgatgagctctaaccatcttctctgccgaagattcagatccgactgtgtgaagatgtatttcaaactcttatgatcagtatatatttcgcagcgatttccaatgagatagtgccgccagatctttagagcatgaaccacaatggctaactccaaatcatgggtagggtagttgccttcatggggccgtagctggcgtgaggcataggctaccacatgaccttcctgcattaatacgcaccccaatccttggcgcaaagcgtcacagtacaccaggaagtccttgcgagtatccggtaagattagcactggcgaggataccccagcttttctttgagagtttggaatgctttctcgcattgagggctccacacaaatttttcttccttcttcagcaactgcgtcatgggtctggcaattttggagaaattctcgatgaatcttcggtagtatcctgccaaacccaaaaagctgcgaacctgagtgactgtcttgggttgcttccaatcagtgacggcggtcaccgtttcaggatccacagcaactcctttagcagatatcacgtgccctaagaacttgacttcggacaaccagaactcacacttgctgagcttggcatacaattggtgctcccggagctttctcaacactaaacggagatgctgctgatggtcttcctctgattgtgagtacaccagtatgtcgtcaataaagaccacaacaaacttatccaggtattccatgaacactttgttcattaagttcatgaagaaggcaggagcattggttagaccgaacgacatcaccgtgaattcatacagtccgtatcgcgtggtgaatgcggtcttcgggatatcttcttcatggatgcgcaactggtgatatccggaacgaagatcaatcttggagaatacaatggcacctttaagttgatcgaacagatcatcgatccggggaagagggtacttgtttttgatagtaacttcattgagggctctgtagtcaacgcacatcctctttgtcttgtctttcttctccacaaaaatcacgggagcaccccagggggaagtgctcggccatatataccccttttctttcaactcttccaactatctcttgacttcggccagttcatttactgccatacggtagggtcgcttgtacagaggagtggttcctagagcaagatctatccggaactcaatctctcgcttgggcggcataccgggtagttcttcctgaaacacatctccgagctcactgacgatgggtatttctggcaatcctagctgatgaagtactgaactgccggcggaagttgggggtgcaaagaaaacaaccggttgatcagggccccgatacagagtgacagtgcgccttgcacaatccactactccttggaattgagctaaccaattcatcccgaggatcacatccaagttcttggtgtccagaagaatcaaatccgaggggaaaggaattccctggatttctataggaacggtagggctataatactttgctgtcataacccctccaggggtggtgatgagcagagggttcctaatcctttctacccccagctgatttctccccacgaatggcacatatataaacgagtgggaagctccagagtcgaacaaaatggtagcagggatggaatgaatgaggaacgtaccaacgatgatgtctggagttgtcagcacatcctcggcagtcacgtggttcacacggctccgagtgacatccttaccaccgttgttgaggcggggaggcgcttggccttgctggcacctcggctttgggcatttatccgcaaagtgcccgggctcaaagctgttgaagcacagacgctgttgactttgagcatccctgcggccttgtccaggctgcacggctggtgcaggagggcggggtgcacgggccccttgctgattctgctgctgctgcggctgtgggacgctcaccatgaattgaggtcggggcgcggagcggggttgctgctgctgctgctgctgcgaggaggatccccctggatagagattggtgtagcggatcctttggttagccccctgttggttgcggaaattcgccaagcgatgcttgtgcgactccaattccttgtgcttggcttccaggcggatgctcttgtcccccaggcgctggaaatctggatagtccccggagaccagacgcacagacagctcagggtccatccctgccaggaatttctcctgcttctcctcatcttcacgaacatcctctggggcgtaccgggccaaattattgaactcgtgcaaatactccatcatggagcggttgccttgtttcaactcccaaaattttctcttcttaagggccatgactctggcgggcacatgggtcctccagaaagcggcggtgaagcgggcccaagtgataggctgtccttctggctgcgtagcctggaagtggtcccaccatagagatgcgggcccctgcagttgatgggtggcgaatatgactttctcctcatcattgcacaggacggtgtccaactttttccccacggcatgcaaccagtccaagacatcaacggggttattggagctagagaaggtaggcggccggatgcggaggaactcggtaagcttagaatgttgcgggggtggtggtggagcattgtgttgcggcggattctggatgtggtggaggaaagcagccatcatgttggcctgctgggcgaggatttgggtgaggatggggttggtgtttggtggcggtggtggtggcgggggaggaggtggaggtgggctgccatggttgttgtggttgctgccttcggggtgactgccctcaccggtagcagcgcttctcctggttgtcaccatctgaaaatccctcacagaaccagcaaacagagagagctgactattaaaactaaccacccacgactaccataattcttgaatttatttctattattaaattggttcattaaggttcaagttgcttatgcaaataaaataaagacaggctccgacacagttataccacacaccggtataaccatgccccacacgactccagcagaagaacaaacgaaaagaacccccacgcgggcctactagctgctcgtctacttctgcgacgggccaaaccggaaggtgagcaacagcacatcctccgtgctaccaacgccagaggctccctcctcctgaggaaccgagggcgagattcggcgcgaggggtctccacaaagcaagtccatgccaaggaccgacgaacaagctcaggcctggaggtactcttgcgggcggtgatcttcaggctgcggcagacgcggcggcgcttggggcgacagacctcaccctgggcgatcttgagctaacacagctacgcctccaccgcgtccaagtccttcttcagccgcaaattcccctgacgcagctctaggatcttcatgttgttatcgaccaacccacggcgcaccatatgatggaagtcgatacaggccgcgtcgtacgcctccaccatccgccaggtgcatgatggtagcgtcatcctccgagctagcatccctgaaggtggcgtagtcgcgggctcctcctcgacgagggtggtagcgatagggcgagtgctgcaactcgtccagatagcgctggtgaagagtgctgatggtgaggagcgcggcgttctggcaagcggcgggaaagaatctccacctacggtgactgccaacgaagtcctctcggcagagccggtgaggatcaccgcagtgacctcccaagcggcgcggggctctgcatcgtcaccgtcctgctccggaagcttcttgccctggtagtccactccatgtggatatcccaagacaatgcacatgccccgcagctccaaaacaaagccagtcaagtccagaccacgacggttgaggttgtcggccatctacaaacaaaagcaaaagagaaaagcaacattttaaagatcagcttttgacaataaattaagcagcaggacagagagagactagaggattttcacaaataagaaaggatttttatttcaaaaatattgataaggcttgggatctaaagctcgtcctagggtcaagaaggctctgataccaacttgtcacgaccggaaatcacccaacgggcgttccttgcgtgcgtgtattgttccttgtcccaagaggcaaggtacaccaaaagttgatacaatacagagtttaacaagcggaagcgtaaatagataatttattacatgggcggcgaaggcccagcacacatgaagacaaacgaaaagacagcggaagactagggcgacgaccacgggcgcttgacggcaggcacgagctagacaccaaagccttcatcttccaggaactcctcttctgggtttgggaaaaattgagcaagactgagtacaaccaccgtactcaacaagacacacccataagtgcaaaataaatgcaagggagtacaaaggagttataatatagggggttagggtttg

SEQ ID NO: 26045 - DNA, 4663 bp, Oryza sativa
ccgcgcccgtttcctctctctccggccgctctcttctccctcccgttgctatataattgctccccgagctccgctcttccgtttccgccgctcgccgctcgctctcgccgtcggaatcgtgctcgcgccgtgctcctctctctccgccgtcgccgccgagctccgttccgccgccgccgccgctccggacttcctccttactcggcgacacctccgtccgcttcgccgagtggttgccgaccccgtccgccgctccgcttcgcccgccgaccgccggagcaccttcgtcatcgtcatcccgaaccgcgccgccgcttccctccactccggccgccgttctcgtcgtcgtcgttgtcccggggtgagccgaagaccgccgttcgccttcccccttccctcctctctctcgggcgccgctccgccgcgccggtggtcgccggcggtgaccatcggggcgcgtgcgcgccgctcccgtcggccgtgccggcgaggccgccctcgggcgcgccctcgcggctgccaagtgggcccggccgtcagccgcccgcgcccgtgggtgcggctgacgcgcgggacccacggcgccgaccgccgccagccgcgtgcgcccggtccaccgtggaccgagcggctgacgcgtgggcccccccttcccgtggacccggtccgcgcgcccgcccctcggctgacgcaataaataggattttttaattgaaaaataaatgaagaaattcgcaaatatccatttaaagagcatataaacttcaaatggccatatcttggccatttgaactcggaattggaccgttcaagtctctaatttttccttaagatgtaaagaacccatttttgtgctttgtttctgctgttatgtggagttatttagtgttaaagccttttcttttccgttggtcgtgtagacgctgcagcttcggaagatccgctcttcgtggaagtcgaagccgtcgattgggaaaacgagcaaggcaagacacatcatcttgatcatattgaatcccattttataaaattatgttgatttaaattattgcattatcgctttatttaaattcccgcgttatcactgttttacttagccatgcctatttacctttgttatgaccatatgattattgtcattgttattattattaccttgttcaccctagatcaaacaaaaccccaactagtggacactctactcatgacaccactagttcaattttaggtagatgcttcgcaatttaattaggtaacattaggaggttttacaactttagactttgggaattctcatatcatttggacactttggaattgttggtttatggtggaattggacacacacctctcttcctctttcaaaacccctaaaacctgttttcggtggggtttgggtgcatgccagttgtgggaagtagcaccccggccactataaggattaagctcgggcctctgttgcaaagcactaccgtacttccacatgtctaatgggtaaggcttagtttgtggctcagtctagtcttaaacaaaagtacacggattggagatggatgaagtcgggggtcgatggacattctccagggcaaatgaaggctacacgagctgcggcccggtagtcaagatgtcatacggcggagggttggtgcccaatgctaggggctcagttctgcctgcctgtcccgggtatcccggccgtaggcaggattgggtcggtactcttgtttatggctaggatgggttggaaactatgtcacgtcttccgtctgtataccgtggtggtatgtggcgcgtggtaacacgtgaggaagatgtgtcttgtgggtaaagatgtacacctctgatcagagtaaatctattcgaatagccgagccctcggatatgggcaagcctagcaatgtacccaagtcagtgttttaattcttaaaatttgctcaacaactaaaatatggaatggttggcctgggttggcttgggacgagctggaacccaggtcgggttgccagttcggtccgaatcatcgtaggccttgggttaaggcaggttcgtgagggttcacggccttgattaataatattgtgtagttctaagatcgtgtttacaaaatagccctgagcaactaaatgtcttttaaatgctgtttactgcaaaacttaatccctatattattattcccttgtactcccttgcatttattctgcatttgtgggtgtgtcttgttgagtacggtggttgtactcagtcttgctcaattttttcccaagcccagaagaggagttcctggaggatgaaggctttggtgtctagctcgtgcctgccgtcaagcgcctgtggtcgtcgccctagtcttccgctgtttctcgtttgtctttgtgtgtgctgggccttcgctgcccatgtaataaattaactatttacgcttccgcttgttaaactctgaattgtatcaacttttggtgtaccttgcctcctgggacaaggaataatacacgcacgtaaggaacgcccgttgggttatttccggtcgtgacatcgaacctatcaaggctgagattaaacgtttatatgatattggttttattcgtccttgccgatatgctgagtgggtttctagtatagtttctgttatcaagaaaaacagcaaggttagggtgtgcattgatttcagggatttaaacaagctaccccaaaggatgagtatccaatgccagtagccaatcagctggttgatgctgcttcagggtacaagatattgagttttatggatggaaatgcaggatactatcagattttcatggccgaagaggatatcaataagacggcttttaggtgtcctggtgcaatcggcttgtttgagtgggttgtaatgatttttggcttgaaaagtgctggagctacatatcaaagagccatgaattatatatatcatgatctgatcggctagctggttgaagtttatattgatgatgtggttgttaagtctaaagagatagaggaccacatagccgatttgaggaaggtttttgagagaactaggaaatatggcctaaagatgaacccgacaaagtgtgctttcggtgtatcagctggccagtttttgggatttcttgttcatgagagggggattgagatagctcaaaggagtgttaatgcaatcaagaaatttcagcctctagagaataagacagagttgcaggacatgatcggcaggataaattttgttagaaggtttatttctaatttgtctggaaggttaaagccttttacaccattattaagattgaaagccgatcaaaagtttacttgggggacagagcaacagaaagctttggatagtattaaggaatatcttagctctcctccggttttaattcctccacagaagggaataccttttagattatatctattggccggtgagaaatcaatcgactcagtcttgattcaggagcttgaggggaagaaagagttgtattctatctaagtcatcggctcttggatgcggaaaccaaatattcccctgtggagaaactatgcttgtatttatatttttcttgtacaaggttaaggcattacctattgtccaacgaatgcactgtcatctgcaaagccgatgttgttaagtacatgttatctggtccaattttgaaaggaagggttgaaaagtggatattttccttaacagaatttgatcttcggtatgagtcaccgaaggcagtcaaggggcaagctatagccgattttattgttgttcatcgtgatgattcaatcggctcggttgaggttgtgccatggactttgttctttgacggatcagtatgcactcatggttgtggtatcggcttggttataatttctcctcggggggcaagttttgagtttgcttatactattaaaccttatgcaactaacactcaagctgagtatgaggcagttctcaaagggttgcagttactcaaggaagttgaagccgatgctatcgaaattatggaagattctttgctagtgatcagtcaattggcaggggagtatgagtgcaaaaattatacgttaatgatttataatgagaagtgccgagagctgatgaaggagtttcggatggtaaccttgaagcatgtatctcgagagcaaaatattgaagctaatgatttggcccaaggggcatcgggatataagccgatgatcaaagatgtcaaggttgagattgttgcattaacagccgatgattggagatatgacgtacatcaatatttacagaatccatctcaatcggcttcttggaaactgcgatataaagcgttgaagtatactttattggatgatgagctctattatcggacgattgatgtggtgttgcttaagtgtttgagtgccgatcaggctaaggttgcaatcggtaaggttcatgaaggaatatgtggtactcatcaatcggctcataagataaagtagttgcttcgacgtgcggggtatttttggccgacaatgctggagggttgttttaaatattacaagggatgtcaagattgtcagaaatttggagcaattcagagggcaccggcatcggctatgaatcctatcattaaaccatggccatatagaggttggggaattgatatgatcggcatgattaatccaccatcgagcaaggggcataagttta

SEQ ID NO: 26046 - DNA, 1997 bp, Oryza sativa
gagtttcggatggtaaccttgaagcatgtatctcgagagcaaaatattgaagctaatgatttggcccaaggggcatcgggatataagccgatgatcaaagatgtcaaggttgagattgttgcattaacagccgatgattggagatatgacgtacatcaatatttacagaatccatctcaatcggcttcttggaaactgcgatataaagcgttgaagtatactttattggatgatgagctctattatcggacgattgatgtggtgttgcttaagtgtttgagtgccgatcaggctaaggttgcaatcggtaaggttcatgaaggaatatgtggtactcatcaatcggctcataagataaagtagttgcttcgacgtgcggggtatttttggccgacaatgctggagggttgttttaaatattacaagggatgtcaagattgtcagaaatttggagcaattcagagggcaccggcatcggctatgaatcctatcattaaaccatggccatatagaggttggggaattgatatgatcggcatgattaatccaccatcgagcaaggggcataagtttatattggtggcaaccgattattttaccaagtgggaagaagcgattcctttgaagaaggttgattctagggatgctatacaatctgttcaagagcatataatctatcgatttggtattcctcaaaccattacaactgatcaagattcaatcttcgtgtccgatgagtttgttcagtttgccgatagcatgggtatcaaattgttgaattcttcacaatattatgcacaagctaatgggcaagccgaggcatctaacaaaagtttgatcaaattgattaagagaaagatttttgattatcctcggcagtggcatactcgattggccgaagcattgtggtcttatcggatggctagtcatggttcgatccaagttcctccttataagcttgtttatggacatggggttgttttaccatgggaagttagaattggctcaaggagaacggagttgcaaaatgatttgacagccgatgaatattataatctcatggctgatgaaagggaagacttggttcaatctagattaagagcccttgcaaaggttaccaaggataaggaacgagttgctcggcattacaacaagaaagtggtgtccaagactttttcggaaggtgaacttgtgtggaagttgattttgccgattgggacacgggataacaaattcggcaagtggtcgccgaattgggaaggacagttccaaatctataaggttgtgtctaagggagcttacatgttgcaaggactcgatggagaagtttatggacgagcgctaaatggcaagtacttgaagaaatattacccaagtgtttgggttaatgcatgatcggctgatgttgccgatacatgatagccgatgtatttgcatcgccttgagattgccgatattgttatatcgtccttagttgttttcatattgtaatcggttgtggtttgccgatgcataatggccgatattgttatatcgcccttagttgtttttataattttatcaatacttttgacatcgtaaaattaggggggcacatatatgaaaaattgcaaatttttgagcgaaatatggagttatattgaatcggcataaaagttattaagatgagttagataaagagtcagagtttcttagccgattacaaaattcctagtctattacacaaaatgtcattgagaaagatagcgctggatagccgacaaagctcgttgcctgatttgatctacttcttcgatggcttggatgtcttgggcatcggttccagggatgatcttgagagatttagtcatgtcagccacattcttgatagccgatctcaatctggacttctgttcttcaatggcatttggaagatcggctagcttttgtttttcaagatctagttcggcattgcactcctcaagttgagtgtagacccccgattttggaaatcggaa

SEQ ID NO: 26047 - DNA, 1656 bp, Oryza sativa
ttgtcggcataactcttatgatgagattgagccactcgcaatctttcctgaatgattttcaccttttcttctgcttcccttaggatatctgtcccgaaaacctgacgttctcccgtttgatcccacaaaagcggagtgcggcacttccgaccatacagtgcttcgtaaggagccatctgaagactagcttgataactgttgttgtacgaaaattctgcatagggtagattcttatcccaacttccaccgaaatctagagcacaagctctcaacatgtcttccaaaatctgattcaccctttcggtttgtccgtctgtctgcggatgataagcagtactaaaattcagcttagaacccatctcttcctgaagcttcttccaaaagtttgaagtaaactgactgcctcaatcagacactatcttcttagggacgccatgcaaacacacaatccttgccatatacaattccgccaatcgacttccagaataagttgtctttaccggaatgaaatgagccactttggtaagtctgtcgactattacccaaatagagtcatggcctgatgacgttctgggtaaaccagtgataaaatccataccaatttcttcccacttccattcaggaatcttcaaaggctgcagcaaaccggcaggtttctgatgttctgccttgactcgctgacaaacatcacatactgctacgtattctgcgatttaacgcttcatacttgcccaccaaaatctttccttgagatcctggtacatcttagtactaccagggtgaatggagtataaagtatcatgagcttctttcaggattgcatcttttaaatctttgttgtcggggacgcagattctttcacccaaccatacagttccttgctcatcctccaagaaaccgatagcttttcctcttctcatattcttcttgatttcttgaatatcaggatcattaatttgggcttctctaacttgatcaattagagtgggcttcgcttctaaggctgcaacgaaacctctattgacaattcccaaatttaatctttcaaattccttacataattccaatggcaactgtcgtccttccgtagctttgcaataacctttcctgctaagagcgtctgctacaacattagcctttcccgggtgataatgaattcccatgtcataatctttaattaattccaaccatctcctttgtctcatgttcagatccggctgagtaaaaatatactttaaactcttgtgatcggtatatacctctgtacgagtaccgaaaagataatgacgccaaatcttcaacgcatgaactactgcggctaactcaagatcatgagtagggtagttcttctcatgcggacgtaactgacgagatgcataggcaaccaccttcccatcttgcatcaaaacacaacctaacccaagtttggatgcatcgcaatacacttggaaacccttctttggatcaggtaaaatcaaaataggagctaatattaagcgacttttcaactcttgaaaactctgctcacattcttcagaccacttgtacttcacatctttctgaagcagtcgtgtcatgggcttagcaatcttggaaaaattctctataaacctccggtaatatcctgcgaggcctaggaaactgcgaatctctgaa

SEQ ID NO: 26048 - DNA, 2468 bp, Oryza sativa
ataatctttaattaattccaaccatctcctttgtctcatgttcagatccggctgagtaaaaatatactttaaactcttgtgatcggtatatacctctgtacgagtaccgaaaagataatgacgccaaatcttcaacgcatgaactactgcggctaactcaagatcatgagtagggtagttcttctcatgcggacgtaactgacgagatgcataggcaaccaccttcccatcttgcatcaaaacacaacctaacccaagtttggatgcatcgcaatacacttggaaacccttctttggatcaggtaaaatcaaaataggagctaatattaagcgacttttcaactcttgaaaactctgctcacattcttcagaccacttgtacttcacatctttctgaagcagtcgtgtcatgggcttagcaatcttggaaaaattctctataaacctccggtaatatcctgcgaggcctaggaaactgcgaatctctgaaactgtcttcggttgtttctagtttattacggattccacattactaggatcaacggcaactcctcctgctgagatgacgtgaccaaggaacttcacttcagacaaccaaaattcacacttgctgaacttagcatacagttgatgctctcgtagcttctccaatgcaaggcgaagatgttcttcatgctcttctttggttcgagaatagataagaatatcatctataaagaccactacgaacttgtctaggtattccataaacaccttattcatcaagttcatgaagaaagcaggggcattggtaagtccaaaagacataaccgtacattcgaacaatccatacctagtggtaaaagctgtcttaggtatatcttcctctttgattctcaactggtgataccctgatcgaagatctatcttggaaaaaatggtagcacctttaagctgatcaaacaaatcatcaattctgggcagcggatacttattcttgatagtcacatcgtttaatgcacgatagtccacacacattctctgggtatggtctttcttttccacaaaaataaccggagctccccatggtgatgaactcggtctgatgtatcctttctgaagcaaatcgtccacttgcctcttgacttctgccaactcattggctgccattcgataaggtctcttatggattggagttgttcctggtaccagatctattctgaactctatatcccttttgggcggcattccaggtaaatcatctgggaacacatcgggatactcccggactataggaatctcttccaaagttatttgattcagtcttgaccttaaagactcagaagacaatgcatgaacagttaccactcgaccatcattactggtgagagttacttttctgttggcacagtctatcacacctctatgtctggctaaccagtccatccctaggatgacatcaaggtctttggattctaacaagataagattggccagaaatggtactcctttaatttctattctgaccgaggggctacgttgcaaagagagtgcttgattccttggggtactaaccatcaaaggatgtctaagatcttctacttccatcccatgatttcccgcaaaactcatagataagaatgaatgtgtagcacctgaatcgaaaagtactgttgcaggaactgagttaacagggaacgtacccaaaatcacatctggagcatcttgagcttctgcagcagcgacatgattgacacgggcctttgatgctggtacagcagagttactctgggcaggtacaaccttcacgcgacggggcttcggacacttgtcagcataatgtcctgggtctccacagttgaaacacaccacgggcttgctgccttgctccctcttggcaggctgttgctgtgttggagctgcaacaggacgtggagcttgattgcggatgttgttgccagcattgttgttgaagaactgacgctgcggacgaacaacagacgaagaacctccctgtggcatagactggggtcctaaagtaaaacgcggcttctgattactcccttgttgtgccttgaagtgagcaatccgacgtttcctctgctccatgcaattgtacttgtcctcctgacgtatagccttatccactaatttctggaaatcaggataatctccaaccatgagtgggtaagaaagctcgtcattaagtcctcccaaaaacttctcctggtgctcttcatcattgcgcacatcttccggagcataacgagcaagacgattgaactcgtgcagatactccgtaacagagcgagatccctgagtaagcgacctgaactccttcttcttgagagacactactcctgatggtatatgcgtcttccggaaagcagcggtgaattcaagccaagtgataggttcagcagtagtcctattcaggcggaagtgatcccaccattcaaaggcagagccatccaactgatgtgatgcaa

SEQ ID NO: 26049 - DNA, 5505 bp, Oryza sativa
ggatagagaattactttaacttttattgatcttaactgagtttcattattacaaactgaagactctcacaccactaaactcaccaacttcctaacactcaaaagcaaacaaacgcatgcaattacatcccaccactgatgtaaatcacatgcgagccacacacaagcaaacttaaagcaaacaaactaacacaacgatctaagacaacgacttaacaagtcactctagttcttccaagcatcggaggtcgattgaaggctcgttcggctcgtcttcatcatcttgggttgctacccactcaatcttggaattgttgcgcttggattcttcttcttcatcacttatgatgatgaccggaggatccgcttgggatggggcaacttctttctccaccacacgaacctttggcgccaattgatagcgagggacgaatagagctctcttccttgcggtgaggcgaatcctggccttctgcggcggtgcttctccctttaatgcagctagttccttctccaaacgatccaccttgtcttctagcttgcaaatcttaccacgattccggtcttcacgatcttgagccgctaacacagtctccgcacgactttcatccatagcccacagcatctcaaccaaatgccttgtggtagcatcattctcaattccttcagtttcaaggtagctgccacggtcacttccctggggttggcgaggatggtagcgatactcagtgtcggccaactgatcactgtagctatcacggagttctcctatggcgatccttgccacttcctgacatgcatggacgtagtttcttcctccagcttcgaacatcactgaggggacctcttcactattgctgtttaaggtgactttgactcggcacttttcttcatgacgatcatgaggaatctgggcataaaaaggggcagtcccaaatccaatggcaaaggacatcgtacgcaactcctggacaaaaccctcaacaccaaacaggtactcaggcctgtagcgcggcatctaaagacaagtgaaaggagagagttaagacatctatccaattaacagcacaagtttttggattaacttgaataaaatttgaaaatcaaagtaaaaggtaagtaaataaagtaaaccaaacttgcaagataatttgaaatagttgaaaacaaggttacaaattttgtactttttaacaacaggtttcaaaagaaataaaagaaagttataaaatcatcatgctaaatttattttattgtagcaagattaaataaaacaatattgtaaaacttttgctgataaatgagccattagtacagtaatggatgtacagtactaataacactggaataaattttgaataagaaccattaaaagagattatgaaatgcatgtgccattagtttggtttaattaaaagagaaagggaggagaacagttctacttttccaatatttttagagggcttctatgggtaaccatttggcataacctagggtcaagggggctctgataccaacttgtcacgcccggaatttctatccaaaattccaaacgcttacatgtgtgtgaaccctcgtccaggaatcagccgaggcacacaataacaaattgataatagagtacaattattactctaattaataagcgaataaaatgtcattacagaggtagatagttcctctcaaacaataaagatctaagcagcggaaaataagataaacggcgcagacggctccactccacaggcagcttgaccaaggctactcctaatcctccactccatcagcctcattgtagaactcttcctctgatgaatgattgcaaggtgagtatatgacatactcagcaagccacgtagcaaatatgcaagtgcacaggataacaaaggatggcataatagggtttcatttgcaaaagcagcatttagcaaacatttcagaatttaacaaaacagttaagtaatttaacaatattaatccaacgctatacaacataccctgttgtataggcccaaccattctgaacaaccatcccagctgcacagttctatctccaaaccaggaatgtaccattccataccaggagctaatcaaattatttccaattatagcatcatttactatggtgagaagtgtgaaactaatcacgaaagacattgttcgacccgcccataaccgcgggcacggctattcgaatagttttactctgatcagaggtgtaccactgtacccacaagacacaaccccacatcatgtcaccatgtgcctcaataccaccacggtacctcggaaaggagttgtgacaatacccctcacataacacaatccactgcagcgcacctttctggatcataatcacccccttataaacaaggcatggactccccagcgacccccgtgggcttatctccgccacttctcagtctggtgccccgcaatgaaccatgctatacaaaagataaagccgttgcccatgttggcttgtggttggcacgataaatgtttcacaaccgaaactcgtgaaccggtccttaattgtcatgagcacgaccatcaaaaccatgtgctcacaacccaccattatcaggttttagttggcacattaattaattaaccaatcacgattgtccatcgtgaactatcaataagccatcatgaaataatagtgaatcattagttatcccataagtgtgctaaggtttctaagcagggctaagcaattatatctaatatctagttgaaccaatataaataaagctcaactagtcaaattattataacccaaggtatcaaggaataaagtaatcaagaacaaaagggctataacaatcaataggttaattccacccaatgacattcgaaaataaatgcaatagttgaaaagaaacaatagctttaaataggatcaacatgctcaaagggttgtttgggatctgtgtgacttgccttgctggccttggaactcttcaaactcttctccggcgaaaacggactctccggaaacgacggaatctaagcagaaaagagcaaaatcaccaaaacagcacataaacaagcatgaacagtacatgtggatatttttaatgtgtagatctcaattttagaaaaatttagagacttgaaccaactaaatcggagctaagatgaaatagttatgaatttttaaagatttaatcggattaaaacacttaaatcggttaaaattgaattatgacgcaataatgaattatttttgaaaaggaaaagagggtttattgcgtcagcggctagggttttggtggaccgggcgcacgggcggcggttcacgcgaacggacggccgagatcgatccaatccaaaacggacggctgagatcgaacggtccacgaccggctcacggcggacgaccccgatgacgtcggcaatgacgtcaccgacagcggcggcggctcggcggagcggacggctcgggcggcgcacgctcgccggcgaacggcggcgcgaggacgcaaacggagggcaccagcacgtagaggacgacgcggcgaacacaccggtgaccaaaacggcggcggaaaaacaacgaacgacgacggcgacgaggaggaaacggcggaaaccttcgggttgtcgacggcgacgaagctccgacgatctccggcgacggcgaaggggcggacgaggacggcgacgacttggcgaccacgacgacggtcttcccgagcgacggcgacgtctggaacggcggcggagcacggctggagcggcggcggcgacggcgaagctagggcacacgacgctagagcgattccgacgacgagaggcgaaggcgaaggtggcgacgggtagaggggacaccgggggtccttttaaaggggctcggaggcggcggcgaaggcccacggcgacggcaacggcgaaggaaagctcgggaagaacaaatccgagacgaactcgaatccaactctttccaaagcgatttagccaaagattccaaaggagaaaaggtagaggagatcccggagattgtttcccctctattgattcggccggagaaggaaaggaacggccggatttggaagggaaacagcggcggcgcgaaactagggtttcgggcggcggcggccgaaggtagacgacgactgacaggtgggccccacctgtcagcgacagcgagggcgcgcgcggctgcggcggactgggccggctgggccgaggagagagagaagagaggttttgggccgactttcggcccaaagccaaaagaagactttttaaaacctttttcaattaaaattatttcttaaatgcaattccatttattaaaaatactttcttagctcaaataaatcccagaaaaatctaggaattatagaattaagcaaagtatttaaggaaattttatctgggcccattttatattggaatttattaattaaaaaattagatcttcttttcaagatttttcaaaataaattctagaaattccaattaaacaacaatttatatattttgaattttcagggtgtgacaaacctaccccccttaaacagaatctcgtcctcgagattcagaagaactggcgaacagatgcggatgagctgacttcaattcatcttctcgttcccaagttgattcttcttccgagtgattactccactagactttgcaaaaacggataactcgatttctggttcttctctcacttgtttccaagatacggattggtttctcaacataggtcaaatcctcttggacttctatctgttcaagattagcttcttcggtaggtacccttaaacactctttcaattgcgacacatggaacacattatggactcctgccaaagattgaggtaactccaactgataagcaacctctcctcttctactgacaatcttatagggtcccacaaaacgcggtgccaattttcctttggtatgaaaacgatgaactcctcgaaaaggcgtgacacgaagatacacataatctccttcttcaaaactcaaatctctacagcgattgtcggcataactcttatgatgagattgagccactcgcaatctttcctgaatgattttcaccttttcttctgcttcccttaggatatctgtcccgaaaacctgacgttctcccgtttgatcccacaaaagcggagtgcggcacttccgaccatacagtgcttcgtaaggagccatctgaagactagcttgataactgttgttgtacgaaaattctgcatagggtagattcttatcccaacttccaccgaaatctagagcacaagctctcaacatgtcttccaaaatctgattcaccctttcggtttgtccgtctgtctgcggatgataagcagtactaaaattcagcttagaacccatctcttcctgaagcttcttccaaaagtttgaagtaaactgactgcctcaatcagacactatcttcttagggacgccatgcaaacacacaatccttgccatatacaattccgccaatcgacttccagaataagttgtctttaccgga

SEQ ID NO: 26050 - DNA, 1092 bp, Oryza sativa
tccaaactatagacaagagtaccgacccaaccccacctacggccggaacctccgggacaggtaggcaggactgagcccctagcagcaggacaccagccctgtgccatgacatgtcgactaccgggccgcagctcgtgtagccttcatttgcctagagatgtccatcaacccccgacttcatccatctccatccgtgcacttttgtttataaccagactgagccacaaactaagccttacccactagacatgtggaagtacggtagtgctttgaaacagaggcccgaagaccggtccttatatggccgaggtgctactatcaaaaccatgcaccccgaatgtcacgaccggaattaacccaacgggcgttccttacgtgcgtgtattattccttgtcccaggaggcaaggtacaccaagagttgatacatttcagagtttatcaagcggaagcgtaaatagttaatttattacatgggcaacgaaggcccagcacacacaaagacaaacgggaaacagcggaagactagggcgacgaccacaggcgcttgacagcaggcacgagctagacaccaaagccttcatcttccagagactcctcttctgggtttgggaaaaattgagcaagaccgagtacaaccaccgtactcaacaagacacacccacaagtgcagaataaatgcaagggagtacaaaggagttataatataaagggttagggttgcagtaaacagcatttaaagacacttggttgcgcaaagctattttgtaaacacgattctagaactatacaatattatttatcaaggccgtgaacccacacgaacctgccttaacccaaggcctacgatgattcagaccgaactggcaacccgaccctgggtcccagctcgtcccaagccaacccaggccaaccattccacattttagttgttaagcaggttttaagaattaaaacactaacttgggtacattgctcggcttgcccataaccgagggcgcggctattcgaatagattatactctgatcagaggtgtacatctttacccacaagacacatcttcctcacgtgtaaccacgtgccacataccac

SEQ ID NO: 26051 - DNA, 1395 bp, Oryza sativa
ataattatatttacgcttccgcttgttaaactctgaattgtatcaacttttggtgtaccttgcctcctgggacaaggaataatacacgcacgtcaggaacgcctgttgggtgatttccggtcgtgacaagttggtatcagagccacccttgaccctaggacgagccgtagatcccaagccttagctatattttcaaaaaaataaaaatcctttattatttgtgaaaacccgctattctctcttgtcttgctgcttcatttatcgtcaaaatctggtctttaaaatgttgtttctctttttgtttttgtttgtagatggccggtagcgttacccgtcgtggtttggacatgactggcttcgtcttggagctgcgaggcatgtgcgtggtcttggggtatccacatggagtggattaccaggccaggccgctcccggagcaggagggtgaggatgcagagcctcacgctggttgggaggtcactgcagtgatcctctccggctctcccgagcggacttcgctggcagtcaccgcgggtggagattccttccccgccgcttgccagaacgccgctctcctcgccatcggcacccttcaccagcgctacccggacgagttgcagcactcgccctaccgctaccacgctcgtcgcggaggagcccgcgactacgccaccttccgagacgccagttcggaggatgacgctaccgtcgtgcatctggcacgcatggtggaggcgtacgacgcggctcgtatcgacttccatcagatggtgcgccgtggcatggtggagaacaacatgaagatcctggagctgcgccaagagaatctgcagctcaagaaggacctcgacgcagtggaggcgcagctgcatcagctcaagatcgcccagggagaggacagccgtcccaagcgtcgccgcgtctgccgcagccagaagatcaccgcccgcaagagcacctccaggcccgagcttgttcgtcagtccctggcgtggacctgcttcgtcgagacccctcgtgccgagcctgcgcccgtggttccccaggagggggaagcctccggcgttggtagctcggagggtgcgctgttgctcaccttccgtcctggcccgtcgcagcggtagacgagcagttagtaggcttgcgcgtgtgtttttcctcgtttgtctttttgagttgtgtggggcatggttacgctggtgtgtggtgtaactatgtcggagcctgtcttattttatttgcctaagcaacttgaacattaatgaaccaatttaatatcagtaataaatttaagaataatagtagtcgtgggtggttagttttaatcgtcagctctccttctctgtttgctggttctgtgaggggttttcagatggtgacgaccaggacaaatgt

SEQ ID NO: 26052 - DNA, 735 bp, Oryza sativa
cataaccgagggcacggctattcgaataggttatactctgatcagaggtgtacatctttactcacaagacacatcatcctcacgtgtaaccacgtgccacataccaccacggtatacggacggaagacgtgacatagtttccaacccatccaagctatagacaagagtaccgacccaaccccacctacggccggaacctccgggacaggtaggcaggactgagcccctagcagcaggacaccagccctgtgccatgacatgtcgactaccgggccgtagctcgtgtagccttcatttgtcctagagatgtccatcgacccccgacttcttccatctccatccgtgtacttttgtttataaccagactgagccacaaactaagccttacccactagacatgtggaagtacggtagtgctttgcaacagaggcccgaagaccggtccttatatggccaaggtgctactatcaaaaccatgcaccccgagcccagcctaaaaccattttggggattttgaatagaaggagcggtgtgaagccaattccacaataaccaaaccattccatagtgtccaggtgatatgaatattcccaaagtctagagttgaaaaaccacctaatgttacctaattaaatagcgaagcatctacctaaaatcatactagtggtaccatgagaagagtgtccactagttggggttttgtttaatctagggtgaacaaggtaataataataa

SEQ ID NO: 26053 - DNA, 1112 bp, Oryza sativa
acccaagatgatgaagacgagccgaacgagccttcaatcgacctccgatgcttggaagaactagagtgacttgttaagtcgttgtcttagatcgttgtgttagtttgtttgctttaagtttgcttgtgtgtggctcgcatgtgatttacatcagtggtgggatgtaattgcatgcgtttgtttgcttttgagtgttaggaagttggtgagtttagtggtgtgagagtcttcagtttgtaataatgaaactcagttaagatcaataaaagttaaagtaattctctatcctaagtagttttcccccggtttctcttcttgtgccatgttcctgccagatggtgaatactcgcagcaacgggaatggtcccaacaaccccaataacaataacaatggagagaacccaactctggcccaagttcttgctcaacagacacagcttatgaacatgatgatgcagcaacttcagaatcagcagaaccaaggaaataaccatgcacctcctcagaataagttagcagaatttcttcgtgtgaggccgcctgttttctctagtaccactaatcctgttgaagctggtgattggctgcatgccatagagaagaagttggatttacttcagtgcactgatcaggagaaggtatcttttgcatcacatcagttgcatggctctgcctttgaatggtgggatcacttccgcctgaataggactactgctgaacctatcacttggcttgaattcaccgctgctttccggaagacgcatataccatcaggagtagtgtctctcaagaagaaggagttcaggtcgcttactcagggatctcgctctgttacggagtatctgcacgagttcaatcgtcttgctcgttatgctccggaagatgtgcgcaatgatgaagagcaccaggagaagtttttgggaggacttaatgacgagctttcttacccactcatggttggagattatcctgatttccagaaattagtggataaggctatacgtcaggaggacaagtacaattgcatggagcagaggaaacgtcggattgctcacttcaaggcacaacaagggagtaatcagaagccgcgttttactttaggaccccagtct

SEQ ID NO: 26054 - DNA, 7600 bp, Oryza sativa
tcccctggtccctagctccctccccaccgtcgccctctctctcccacgtcgccggccgcctccagccgccggtgccgcctcgaccgtgcgccggccggccgcgccgtcgcctcctccagcgtcgccgccacctcctccaccccggcttgccctccgtttcgcgaggtgacccccggagctgccttcccgccgtcgccctcctcttttctccgcgccggccacctccagccgcacctcccgcctcacccgtgcaccctccggctgcgccgtcttctccctcggcctcgcagccacctcctctccctcggtcagccctccgtttcgcggggaaagcaccggagacgcgtcctcgccggcgtccagtggcgtcgccaccacttctccgtctccggccggctgctgttcgtcgccggtgcgccgaccgacgtcgccgtctcctccgttgacgtcgcagtgccgtcctctctcccggccaggccacggcgtcgcccgaatttcgccggaacgccgtcgtctccgcgccggcctctccttcctcctcgtcggctcgtcgccccgctgcaccaccaccttcaccaacgtcgcagcggcgtgttccacgccgtcccctcctccgctcagccgctgctgcctgccatcatcgtttcatcgtcgtctccgatcgttctcgtcgtcgacgtcccatcggtcgcccggctcgtcgtctcgcggcgccgcctccgtcgtcggcatcgcagcggcgtggtcctcgtcgtcctcgtccccgtgcagccgctgccggctgtcctcgtcgcctcctcgccggtcccggttgtcacgcccagaaatttagcccaaatttccagactattttgtgtattaaatccctgtccaggaccagccagggtacacaaaacgacaagtaatatacagttccgaacgtaaataaagcgtaaaatacttacagaagaggcacttagtcctcacaccgaaacaaaagcagcagcagcggaaaaaggcgatcctagcggggcttcagctccactccacaggcaaaactcaactggggtctgagccttggtcctctaactccatcttcagctcagaagcactacacttctgaaaagggggaataatagcaaggctgagtacaaccaccgtactcagcaagccacaccaacgatgcagacgtgcaaggggaacacaaggacggtttgtggctatttgcataaaggcggttgtaaaacattttattgagcaaaacagtaaaacagttgagtaattaaagtaatattgaatctccactgatcaacgctacgccacgttgaacaggcccaaccaacccacctgaactacagtgcattgggtcgatttattaggggtgagactaatcacggtgaatctggtcgatcgcccataaccgcgggcacggctattcgaatagttttactctggccagaggtgcacaactgtacccacaagacacaacccaccgacatgtcaccgcgtcatcatgtgcccatgatgcacacgtcaccatgtcgagtgattgtgacgagacccttcgcataacccttccctaaccatccacaccacgctaaggtttcacccccacccctcaaaaggcagtgggcggtcccctcttgcgccgcggtgaatccggcagctggacaaccggacaccccggccgacccaactccatcacgcccaccctcgccaccggtgcctaggaaagggtcgagctatacttcagatcaagcagttacccattcccgcttgtggtaagcactgtaagtcttccagggtttcccgtgaaccggtccttaattgccatgggtgcgactcgcaaaaccatgcacccacagcccaccattcagtcgcattttagttggataattacgaccatgaaacatggccagatgtctcgagcacgcggctcaacaagaaactagaatgtctaatactgcaattatcccatcgactgagctagtggtaattaagcatggctaagcataaagttctagctaggtcatcaaagtaacacaagctaggcgatttattacccacggctgacaaaggacagatatcaagtaaacatggcacaagcgagcagataggtaaaccctgatcccgtgtaattagcaaaacatgcatatttatttgcaaacggtaaaacatttataaattgggatcaacatgctcaaggagaatgtgtgacttgccttgcttcttcactttgatcttccgaactcttttcctcgcgaccgcggacttccgaaacgacgggaactacacgctggcacgcaaaacgaggaaaaactctaataaaaaccaaggaaacagtacataaaaactaaacaaacatgtagagctcaattttagatgaattttgcaagttgaatggctcaattcggagttcgaatgaattagatatgaattttagaagttttgagccatttaaatggatttatataattaaactcgatttattgcgcaattattatttatttttacaaaggaaatggacctcgctgacgtcatcaaaggggaggggcggcgccggcaagcgggccccaccggtcagcggcacaagggcgccggtccaccgtggaccgggaccaccgaggcgatccaccgccggtccacgggaaccgacggcccggatcggcccaaagccgatcggacggccacgaggcggcgcggctggggcacgggcacgacatgaaaccggctcggccgagccgtggtgctgggcagcgtgcggcctccggaggcagcagccggcggcgccgaacggcggcgagcagccggaagacggcggcgctcacgggcagtggcgatgcacgcgaaagggaaggggagcgggaggaggggctcaccgagcgtgcgggccgacgaggcagagcgggaggtcgccggcggcgggaagaggcggcggcgctcctcggggaggcaacggcgacggcggttcggcggcgttccgtgaggaggaaccggcggccgatggtcggagggacctagggaaggaaatgaagaggttaggagagggtagggagttgcggtgcggcgggaaacgccgaccgaaatgacgacggagctcaccgggaggcacggggagatgagtccggcgacgaccggcgaacacggagggattgctgagccacggatgatggctgcggtaccgcggagggcgacggcacaacactgggcggactgaagaggcggtgcggcgcggccggaggcggaaatggcgacggtggctctggatgcacggtggaagggtggttgcggtggtggaatggggaaacggagcggaggccggggtagagcttggcacggcgttgccgacggcgcaagcggcgaggtgcggcgacgactaacgcggcggcagcggccggctgaaggcggtgtgtggcggtagtggctcggcctcgcgatgggaaggtggttccggcggtggaggagggagatggagtggatgccggggtgcggcgaggcgctgtgatgctataggtggcggcggcgcagcgcggcagcgacgggagcggcggtggcgggcggctggagatcgccggcgagcggcggcgaaggggatcggcgtggagagctcggtagagggcgtgggggactcgggaaaacggggaaaaaggaagaggagtccacggggattgattttatagctcaagggggcgaggagagggccggggagcggcggatttcgaggggaagtggggcggcgaagtggagctcgtggggaggtcaaaccggcgccgtttcttgcggggtgagtgggggaaaaggtggaggacgtggagggggtcgtgtccatgtggttggatgcgagctcgggtgcgggaggtcgccggattttgcggcgacgtggggcggctcaggcggccatggcggttgcagccggccagccagaggaaggaggaggagctgacgggtgggaccgccggtcccacctgtcggcgaagggagagaaggagggacgcaaaacagacttttgcaagcgggccaaggaagaagggagccggcccgagagagggaggaggcgcgcgggccgcgggagaggaaggagggggaggaatttgggccgagcccgaaagggaggaaggggaagtttattttgttttctttttatttaaattgatgcaatgatctttgtgctattaaaactatttctcgagctccgaaaattcacggaaaattccggagagtacattagggcacaaagaatattacaaaatattcccggccattgatttttaagggaaaatttcaagttctcccattatttcacttgattaaattgatttatcttttatttaatttctagaaaatgtattattaatgatttttaatcccgaacgaaaatcggggcgttacaccggtcgtcgtcgtcgtcgtcgtcctctcgtcgttcccggtcgtcgtggcgttcgtccctccgtcgagccgttctcgtccgtcgtccgcgttcgtcaagcgagccgctgcagccccgtcctcgcctccgtcctcggctccgcgtcgtcaagcctcgtgccggccgcgtctcgcctttgtccaaggatcgccgccgaagccgtcccctcgccgttcgtctccgttgtgcccgtctgtctccgccgcgcccgttcgtcgttggcgttcccacgcctcgtcgcgtggtggtaaggatccgtcctctcgcttccccgccctcgtcctttcggtgtcgccccgtacccgttgtgcggttgtcgacaccggtacccgtgtgccggtgtcggtagtcgttcgcttgtgcgtgtggtgtccgtgttagtgtgcccgctcggtagccgcgtggtttctacgtgtgcatcccgtgtggtgtctagtggagtccgtttgttggccactcgcctcggttgacacacggggtccgcttccgtcgacccgtggaccgtctctgtgtacccggtctaccgcggtcctttaggttgacatgtggggtccgcatgtcaacggcgcagccttcctgtcttttccaggctagcgcttacacatgttttatagttgcaaagcttaattataataatccgcaaatctccatataacagcattaaacttcggatgatcatatcttggtcatacgaactctgaatcgacccgttcaagtctcctaatgtttgttataacctaaagaaccctgtgctttctttttatgtattgttattgcttctttataggtttgtagctttgcttgtgtgcttcgcgtagcttctgtcgttccggaggttcccgaagcgtggttcgcggtcgtcgccgaaggttcggaagtccgttctctctgagcaaggcaagtcacatcatccttgagcatattgaatcccagtttataaaattattttgatttaaattattgcattaccgctttatttaaattcccgcgttatcactgttttatttagccatgcctatttacctttgttatgaccttattattgttattgttattattattaccttgttcaccctagattaaacaaaacctcaactagtggacactctactcatggttccactagtatgaacttaggtagatgcttcgctggttaattaggcaacattaggtggtttttataactttagactttgggaattctcatatcatatggacactatggaattgttggtttatggtggaattggacatacacctctcttcccctttcaaaacccctaaaacctgttttcggtggggtttgggtgcatgccagttgtgggaagtagcaccccggccactataaggattaagctcgggcctctgttgcaaagcactaccgtacttccacatgtctagtgggtaaggcttagtttgtggctcagtctagttataaacaaaagtacacggattggagatggatgaagtcgggggtcgatggacattctccagggcaaatgaaggctacacgagctgcggcccggtagtcgagatgtcatggcagagggttggtgccctgctgctaggggctcagtctcgcctgcctgtcccgggggttccggccgtaggcgggattgggtcggtactcttgtctatggctaggatgggttggaaactatgtcacgtcttccgtctgtataccgtggtggtatgtggcacgtggtaacacgtgaggaagatgtgtcttgtgggtaaagatgtacacctctgatcagagtataatctattcgaatagccgcgccctcggttatgggcaagccgagcaatgtacccaagtcagtgttataattcttaaaatttgctcaacaactaaaatgtggaatggttggcctgggttggcttgggacgagctgggacccagggtcgggttgccagttcggtctgaatcatcgtaggccttgggttaaggcaggttcgtgagggttcacggccttgattaataacactgtgtagctctaggatcgtctttataaaatggctttgggcaactaagtgacttttaaatgctgtttactgcaaaacttaacctctatgttattatccccttgtactcccttgcattaattgtgcatctccggtgtggcttgctgagtactgtggttgtactcattcttgctcaatctttccccccttcagtaagagcagcttcggagaagatgtcttaggaggagtcctggcttataccccagttgagcgcctgtgaagatggagccgtaggcccgcaagtccgctgctgtttatttttgtttgtcaggcctgaagtgcctttgtaataatgtaaatattatcgatataataaagatgtgtcttttatatcatgtttgtgtggtgtaccccggcttttcctgggacggggattaatacactggcgttcgggaaaaggcaattttcccggtcgcgacaagctggtatcagagccatctcgactgtaggataagccaagtggataaaacctaaggacatattttataaatgaaactatttccgaaagtccctttttcctccttttccctgtgctgtttgcaaaatgtttattctcttttcttcctccttcggattttccactagtactagatggttagttttgcaaagaagaagatgtcgtcaattgtctgccgaagctccagaaggctgcaggatccgctagtgaagcgaaggaagcagtgaagccagctgtgaaggagtgaagatcttggagaacccgtcgcagaacctaagccaccctctagtgtttcgtttgtcgtgtgtttccttgcttgtgtgtgtagcgcgtggtttgcatcggtgggttgtgatgtaaccatgctaggttgtttgcttaatcaacctgcagaataagtgaaacaaacaacacatcaataagaagagttagttcctttaaggtcctgtctctagttctggtctattctttcctggcttgtttcctctctcacctcaatccttgtaacagatgtttaacagagaaaaaggaaagaatgtcagcaggcatgcctccagtaactcaagttttcaactccatccaccactagcctcaagagagttaacaagggtacacccttggtccattccaagcatgctgcttggttcacagctaccattggttggaagtcaagaccaaaatcagtatgtgtttgatcgagcatttgccac

SEQ ID NO: 26055 - DNA, 560 bp, Oryza sativa
gcgtgtgtctttctaagccctcgtcctctttcgtgtgcgccaagcttctcccgatcagcccaatggccgaacgggcagtggcgcacatcctctctccgagcgctagcggtgacgacggggagcagaacccgcgccgccgagctcgtactccaccgtccccctctcgccgaagtcttggccgggagtaggcgctcgagaaggtcgaaagatccgcgacttcgccgcccgcgggtgatgaagaagcacggcgagacgggaaacgtcgcctcctcgtctacggcgatggcagcacgccccagggcgcgctttaggctgcgggcgcgctcttgcgtcacccgcccgtcgtccccgatccagagactccagcccaacgttggctagacgacatgaccaatttggtcatgacggcgcagcagcgcctaggtgccggcgggcggtcctccgccaccaaggcctctagcgctgctaccgccggctccgtgtcgtcaaggcggagggcgcggcgagcgacggccgttacccgccgttcgtgggtaccgagctcgaattcgccctatagt

SEQ ID NO: 26056 - DNA, 1190 bp, Oryza sativa
gcgccggtttccccgtcgtccggccgccctctcccactcccaaccctatataaacattccccgtgcctccctccacagtttcggccactagccgctctctctccccgcgggaatcgagctcgcgccatcgctctctctctcagcagtcgccgccgagctccggtccgccgccgtcgtcgccccggaccttctcccgcttcggagtcaccttcttcgggttcgccgcaacctcgccgacctcgtccacctctccgtttcggtcgccgaccgccggaacgccgccgtcccagtcagacccgagccgcgccgccgcctctatccgctccggtcgccgttcccgtcgtcgccgtcgacccggggtgagccgtggatcgccgattcgtttcccccttccctcccctctctcgggcaccgctccgccgcgccggtggtcgccggcggcgaccatcggggcacgagtgcgccgcctcccgtcggctgtgccggcgtggccgccttcgggcgcgccccgcggctgccgcgtggggcccggccgtcagccgcccgcgccctcgggtgcggctgacgcgtgggacccacggcgccggtcggtgcgagcccgggtgcacccggtccaccgtggaccgtgaggctgccgcgtgggccccacccccgtggacccggtccgcgcgcccctcccctcggctgacgcaataaaccctttttaaattaaaatttaaatgaagaaattcttaaatatttatttaaagagcatataaacttcaaatggccataacttggccaattgaactcggaattggaccgttcaagtctctaatttttccttaagaagtcaagaacccatttttgtgctttgttcctacttgttatatggagtttattagagtaaaagcctttttcttttccgttggtcgtgtagacgctgcagcttcggaagatccgctcttcgtggaggttgaagccgacgtttgggaaagtgagcaaggcaactcacatcatccttgaacatattgaatcctagtttataaaattattttgatttaaattaatgcattatcgctttatttaaattcccgcgttatcactgttttatttagccatgcctatttacctttgttatgaccttattattattgttatttttattattaccttgttcaccctagaatagggtaccgagctcgaattcg

SEQ ID NO: 26057 - DNA, 2008 bp, Oryza sativa
taaaatttaaatgaagaaattcgtaaatattcatttaaggagcatataaacttcaaatggccataacttggccatttgaactcggaattggaccgttcatgtctctaatttttccttaagaagtcaagaacccatttttgtgctttgttcctgcttgttatatggagtttattagagtaaaagcctttttcctttccgttggtcgtgtagacgctgcagcttcggaagatccgctctacgtggaggttgaagccgacgtttgggaaagcgagcaaggcaagtcacatcatccttgaacatattgaatcccagtttataaaattattttgatctaaattattgcattatcgctttatttaaattcccgcgttatcactgttttatttagccatgcctatttacctttgttatgaccttattattattgttatttttattattaccttgttcaccctagaataaacaaaaccccaactagtgggtactctattcgtggttccactagtatgaatttaggtagatgcttcgctgtttaattaggcaacattaggtggttttataactctagacttttgggaatattcatatcacttggacattatggaatgattggattattgtggaattggatgcacaccttcccctctattcaaaaccctcaaaatggttttaggctgggttcggggtgcatggttttgatagtagcacctcggccatataaggaccagtcttcgggcctctgttgcaaagcactaccgtacttccacatgtctagtgggtaaggcttagtttgtggcttagtctggttataaacaaaagtacacggatggagatggatgaagtcgggggtcgatggacatctctacggcaaatgaaggctacacgagctgcggcccggtagtcgagatgtcatggcacagggctggtgtcctgctgctaggggctcagtcctgcctacctgtcccggaggttccggccgtaggtgggattgggtcggtactcttgtctatggctaggatgggttggaaactatgtcacgtcttccgtccgtataccgtggtggtatgtggcacgtggttacacgtgaggaagatgtgtcttgtgggtaaagatgtacacctctgatcagagtataatctattcgaatagccgcgccctcggttatgggcaagccgagcaatgtacccaagttagtgttttaattcttaaaacctgcttaacaactaaaatgtggaatggttggcctgggttggcttgggacgagctgggacccagggtcgggttgccagttcggtctgaatcatcgtaggccttgggttaaggcaggttcgtgtgggttcacggtcttgattaataatattgtatagctctaagatcgtatttacaaaatagctttgagcaactaaatgtcttttaatgctgtttactacaaaccctaaccccctatattataactcctttgtactcccttgcatttattttgcacttatgggtgtgtcttgttgagtacggtggttgtactcagtcttgctcaatttttcccaaacccagaagaggagttcctggaagatgaaggctttggtgtctagctcgtgcctgccgtcaagcgcccgtggtcgtcgccctagtcttccgctgtcttttcgtttgtcttcatgtgtgctgggccttcgccgcccatgtaataaattatctatttacgcttccgcttgttaaactctgtattgtatcaacttttggtgtaccttgcctcttgggacaaggaacaatacacgcacgcaaggaacgcccgttgggtgatttccggtcgtgacaagttggtatcagagccttcttgaccctaggacgagctttagatcccaagccttagcaatattttcgaaataaaaatcctttcttatttgtgaaaatcctctagtctctctctgtcctgctgcttaatttattgtcaaaagctgatctttaaaatgttgcttttctcttttgcttttggttgtagatggccgac

SEQ ID NO: 26058 - DNA, 550 bp, Oryza sativa
acgccactggacgcgggcgaggacgcgtctccggtgctttctccgcgaaacgcagggctgaccgagggatagaaggtggctgcgaggccgagggagaattcggcgcagccggagggtgcacgggtaaggcggtaggtgcggctgaaggtggccggcgcggagaaaagaggagggcgacggcgggaaggcagctccgggggtcacctcgcgaaacggagggcaagccggggtggaggaggtgacggcgacgctggaggaggcgacggcgcggccggccggcgcacggtcgaggcggcaccggcggctggaggcggccggcgacgtgggagagagagggcgacggtggggagggagctagggaccacggggaggctcgggatggggctaaaacgagagaacgggggatgaggatcccattttataggatgggggagggagccggccacgggaggagcgggaacggcgacgggaatggtggccggcggcaaaggaaggcggccggacttggcgcggccgttcccggcgattgggggcaccattcaagggggaa

SEQ ID NO: 26059 - DNA, 904 bp, Oryza sativa
aataaatttaagaataatagtagtcgtgggtggttagttttaatcgtcagctctccttctctgtttgctggttctgtgaggggttttcagatggtgacgaccaggagaaatgttaacaccggtgaaggtaaccaacccgaaggcagcaaccccaaccaccaaggcaatccacctccgccaccaccaccagacaccaacgccattctcacccagatcctcgcccaacaggccaacatgatgaatgctttcctccaccaccttcaaaacccgccacaacagaatgctcccccaccacctccccaacactctaaactcgccgagttcctccgcatccgcccacctaccttctctagctccaacaaccccgtggatgcgttggattggttgcatgccgtggggaagaagttagacactgtgcagtgcagtgatgaggagaaagtcatcttcgccgcccatcagctgcaggggcccgcatctctctggtgggaccacttccaggctacgcagccagagggacagccgatcacttgggcccgcttcaccgccgctttccggagaacccatgtgcccgctggagtcgtggctcttaagaaaagggaatttcgggagttgaagcaaggcaaccgctccgtgatggagtatttgcatgagttcaacaatctagcccgttatgccccggaggatgtgcgggaagatgaggagaagcaagagaagttcttggcaggaatggaccctgagctgtccgttcgtctagtctctggggactatcctgattctcaacgtctggtggacaagagcatccgcttggaagccaagcacaaggagctggagtcgcacaagcgccgcttggcgaatttccgcaatcaacagggtgctaaccagagggtccgctacaccaatccct

SEQ ID NO: 26060 - DNA, 678 bp, Oryza sativa
caaattcggccgcgtctttcccgatccggtcaaattggtagaggggaaatgatccccttgatctcctctatcttttctcttatagaaacttcgtctaattttgtttggaaatcgtcggattcgagtttgattcgtattcgtctctctcctctaaccctaacctttccttctcgtcgccgaccgccgtggacctccatcgccgccgcctagcccctataaaaggacccccgggacctcttctatccgccgccaccctcgcctcagctcgccgccgcctgtagcgccgcctccgcgttagcccttgcatcgccgtcgccgccgcgagttcagccgtgcgccgccgccgctccggtcgtcgtcgtcgctctggaaggccaccgtcgggatcgccaagtcgtcgccgtcctcgtccacccctgtcacgcccggaaattcactagtaatttccgaatttatttgtgcataaaatcctcgtccaggaatcagccgaggtacacaaactgacaatttaatatacagattcatcaaattaactaaaaggataaatacttacttaagaggcacttagtcctcaccatgaagaaaactgcagcggaaaataaaatctagcgaagctccggctccactcccacaggcagctcaactggggtataagccaaacgtcttctccttctggat

SEQ ID NO: 26061 - DNA, 4601 bp, Oryza sativa
attaaaggggggctctagtttctatggaactaggggaggcctgaggagcgaggacttaccgagggatggaggaacaacgaagatcagtgttacggtggtggagcgtacaagaaggtgaagcacgcccacaaggtgttcgacgaaatgttttcgagggagtagaagaggcagagaggggaggacgagttcgtgggggctgggaggtgtggggagggaaggggaggcatgggtttataagggggcggaggggagaggtggctggtgcagtgatggtggatgggacgcgcccggcatgcggggctcgagccgatcggcgacgggacaggagcgcaggcgcagcgtggggctcggcgcgatgatggcgacggtgcagcagctgacggcagcggcgcggtagcgcacggggcgcgagggcgcataggcggcaaagggagggtggcgatgatgacgacgcgacgcgacgcgacggcacgcagcagcgacagggcacggggctcgagggcgcggcagcacgacggcgacggctcacggcgcgcggcgatggcgacgtcggcatggggctcgaggcggctagggccgcgcggcagaggaggggcagggctatggaaccacatcgagcacctagaccataatgaatagtgacttttcctatttatccaattttggggcctatttcctattaaaactcgtcccataaattctagatttcacacaaatggagtttactcaatatcttttaatttagatgatagtttaccaaattttaatattacccatattttatttttatatatatttttctacggcattatttaaatgaggtctagttctaaaattaacctggataattttggaggctttgagggttctaaaattaattaaaatatcctaatgtggccattattattacaatagcacattgaatgaacttattcgtataacaatgcattttatgtgggtctattcattctataaatataaattgagactcgatacaacattaatctaattgtttaattaaactctcacatattcttatttatatataaagcttaatttatttatatgaccattattttatatgagtgattttcatgtcatgaggaactggtgaaatgttctaagtatcaatctatatattctggtgaattacttatttataaacacgatcattatagtggtgatcatcatttcatgtgagattgaattcaaatgaattagatttgattttactatttcttttagctaatcatggcatcaagctatcagcatggttcgaatatttaatatttgatctgtgatttatgatagaaattaacatttgacttatacttgatttggcttgctttcttgagcagtaatatttgtagggttaataataaataacatattcttgtaaattatatctattgcttaaatgtagatcttttctttactttctttgtgatcatttacggtttggcaagcaatagtaatcataacaaccagcatgacgcaaaagttttaaaaagttcgaaattttagtgatttttattattgggaattttcaggatgttacattgagctattagatcaattttgcgagcttcaagccgatctatattcgattgaatcggcccaacagagatgtgatctaacttggctttctcttcatgcacgagctgccgattggattgaatcgtggcttcgatattcatccgctctcgccgatcggctatacgttgcttagccttcttcagcttaaattggtgttgctcaaggaatactgctggagtaatggtgtttgccgaatcgtctagggccagggcttggatttctgcaaatcgtgcccgaattgaacctcagtcggctaccagattgtctaatgaagattctagccgaagggatatgtcttcaagtgttttcttgacagtgtcatccaggggggctagagccttgcttgtggtttcttcctctgtctcatcaaaataatctttgatatcaaaagagaacaaatcggctaagacctgcaataatgatttaaagagagttagaggccaaatagacatagccgatctgagtatttgtgtcaaaggaaaacttactgggatagcaggagcagctggttgtacttcttcttcaacatggtgactccctacagccgatggagtttgatcgcttgatggttgttgaacaggagaaggaggaggaggaggctgcaaaaaggtaagtgtaagataagatcggctatgatcggctaatgagaaattaagaacatcttactggtggagctggtttgagagtttttgttgccaatttctttcttcacaacaattttttttctgcaaagacaagattaatgagtaatcggctgaggataaaatggttataaaagggaaccagggaaagatatttaccctcaagaaatgagttgtggcagaaggaattggaggagtctgcttgagcgaagcagatggtgtttgctctgtatcactcacttcgtctgcagcttgatcaacgtcttctccgatctctacttcatccagagctttttcaatggatggatctagggcaggcaagtcatcggctggcttggtcttctttgacttggttttcttctttggagccggggccgatgtatctacagccgatgctctggttttcctctttttgccagcatcggccggttctctgatgagcccttggagaagagttgaagtcttgggggcatgatagccgatgatagggggagatggcccacctccattgggaattagacatggggcatattcgatatctctgccactattgctttgatgtaggggggaagatttcgttgtttgcaaaacagaagagaagattagtcaagttatgaatcggctgacaattgttcaaatgaaattaatgaggacaaggtttacctgaggtgtaatatcaggaaagagatctgtcatgtacattgaggccggttggtggaatagatgcagcttccattcaccccaccatatgtcaaagtttttgctcctgaacctcgccagctctacattttcaatgttacccaaaggaggtccttggagattgagcagccgatccatcatcaaggttgatgaaatttcccctcggcattggattttattggcaaagaacaagccgattggtagttgacccattccaagttgtctggcagagctcattgggtgataaaattcataagaaacctggatattcctccgttgatgtacgctgacaggaagaatgcatgggctaattgcagctgagaagacttccctagatttttgaaatttttcatggttgatgtcttcgaatctgaagtctgatgggaggtcaagatgcactgaatcttcataaggaaaccaaactcgagcatctttttgaaagccctcataaaaactgcagaaccaaacttttagcaattcagccgataattttgctccagcatcggctggtgtggatgcatattcttcatatgacatgcatctacgatgagtgtgctcttctccatcatcttctataatcagctccagccttgggaattcagcttctgtcacagatggccgattgacgactttcatgaccatcaggttgagccaagattgtagcagccaccatggtccacctgctccaactactgagtcgatggctatcatggccgatgcattgtttagcaattggtataagtagccgaggaggatcttgcctacaggaaattctctttttgacactagagcctcggctacaaactgtcagttggttgtaaggccacaactggatccacagaaaaggaacttttctagccacatgagcaaaaaggccacatgctctcgaggagtaacagatccttgacccatgtatgccgccacataaccagaccaaccacctatgctcttggttctgaagtcgtactgattcttggtgttcagattcatgggattagccaacgaggacacatctagactaatgatcatggtaatatctatcaagattggtgtcatcagcccttggttgaacagaaaagcattgatggtattggaccagaagtaggtggcggcagccattaagggttcatctttggctgaattcgctatggtgagggcaagtgcctagccaattccaatctcatcccaatgtgtttgcttgctagccgatacacgtgtcacgaccggaaataacccaacgggcgttccttacgtgcgtgtattattccttgtcccaggaggcaaggtacaccaaaagttgatacatttcagagtttatcaagcggaagagtaaatagttactttattacatgggcggcgaaggcccagcacacacaaagacaaacgggaaacagcggaagactagggcgacgaccacaggcgcttgacggcaggcacgagctagacaccaaagccttcatcttccaggaactcctcttctgggtttgagaaaaaattgagcaagactgagtacatccactgtactcaacaagacacacccacaagtgcaacataaatggagggagtacaaaggggttaaagtataggggttaggtttcgcagtacacagcattaaagacatttagttgctcaaagctattttgtaaatacaatactcgagctatg

SEQ ID NO: 26062 - DNA, 2283 bp, Oryza sativa
tattgcgtcagccgaggggagagggcgcgccgaccgggtccacgggaggggggcccaccccgcaaccttaccgtccaacggggacccggcccaccttggattccaccggccggcgccgtgggccccacacgtcaaccccaccaaaaggcccctgcggctgacgggccggcccccacgtgcaaccacttcgcacgcccggggcggcccatgccggcccgggaggtggaagcggcgcgcgcgcccctatggtcgctggcggcggctgagagaggggaagggaagggggaaaagaggcggcggtccacggctcaccctaggtcgacggcgacgacgaaaaaggcggccggagcggaggaagccgacgccggggcgacgacgggggtgaacggggatggcgacggtgctgcgaagccgaagaaggcgacgccggggcgacgacggcggtggaccggagctcggcggcgacggcagggagagagagcgacgtcgcgagctcgaatccggcgaggaggaagggcggcgagaggtggaaacggacggagaaggtgcggggagggtttaaataaggttggaagggggagagggcagccggggaggaaggaaaccggcgcggcgttctcgggctccatcaatggcaccggcgggattaggggaggggttccaaacgaatccaagggagagagggagggaaaattggggggaaagggagagggaatcacggggagtatttccccccccactttattgcacgcggggactgcgggatgtggcggatttggcagcggcggcggcgcttggcgcgggcggagcggcaggagcggcgggaggtcggggatgacgggtgggccccacccgtcagcgagggtggcaggcgggcccgcccgtcagcggcgcgcgcgcagcgagggaggccgaatgggccgcgggggagaggagagagagagaggggggagagagattggccgggccggcccaagggaggggagggggacttttatggtttttctttttataaaactttttcaactttgtttatttcttaacaattattatttgtgctctgaaaattccactaaaatttatttacacattttaggcttttaggaaatacacaaaaatcctctaagccttgtttgacttttactttgcacattgtaatttttggaggctttcacacggattttaattattctaggcataatttaaaggatgtattttagagtcgttttgggatgtgacaaacctaccccccttaaacggaatctcgacctcgagattcggaagaactggcgaagagatcgggatgggctgccttcagctcgtcttcacgctcctaagtagcttcttcctcggcgtggttgctccattggaccttgcaaaaacggattactcggttcctggtcctgcgctccatggtgtccaggattttcagtggtctgtctacgtaggtcaagtcttcgcgaacttcaatctgctctgagtcagcctgctcggacggcactcgaaggcatttcttaagttgcgacacatggaacacatcatgcacgttgcccaaggaggcgggcagctccaactggtaagcaacttctccgcatcgagcaatgatgcggaaaggacccacaaaccgaggtgcgagcttccctttcgtctgaaacctgtgtacgctccgcaatggcgtgacccgaaggtacacaaaatcgtccactgcgaattccaggttacgacgtcggttatctgcataactcttctgccgggactgtgccacctttagattatcccgaatggttctgaccttcgtttcagcttctctcaggatatcagtcccgaatacttggctttccccaacttggtcccacaatagcggtgtccggcatttgcggccatacaacgcttcatagggtgccatttgtatgctggcttggtagctgttattgtaggagaactcggcataggggagactcttatcccaggtcttcgcgaaatctagaacacatgcgcgaagcatatcttcgaggatctggttcagacgctcggtctgcccatctgtctgcgggtgatacgtggtgctgaaatttaatcgggtatccaactcttcttggagcttcttccagaagggagaggtgaattggcttccccgatcagatacaattttttaggaacaccatggagactcacgatcctagcgaagtagagttcagctagtttgttccctccataggtggtcttcacgggaatgaaccgagctaccttggttagtcggtccacgactacccatatagaatc

SEQ ID NO: 26063 - DNA, 4929 bp, Oryza sativa
  unsure (1)..(4929): unsure at all n locations
cacgcaggaagcctgcatctccccaaagacccacttatacctactctaccatcatccatgaggagtagccctgagcccctgacccggtctccatctcctggctgggtctatataatataaccatcacccagggcgtctctctcaatcataccatcacaaacaccaactgcaactggagtagatagcgctacctctctccgggctgaaagctactggccattatcattgttcttccagccatggatcagctgctggccctggcggtggcagtcccgctgtttgctcttgccagtgcacttgctgctgcctctgctacgccggtcaacaagtcctgcctcaatggtagcaccggcgccgccgtcagcatagggtacggtggtgccagcgctagcgctggcgccggcgccggcgtgtctcttggcaccgacgcgtactggttggcctgcccacttgccgaggagatcgtccgcgacgtcgtggagagggctgtcgccgccgacccccgcatggcggcgtccctcctccgtctccacttccacgactgctttgtcaatgtgattatctttctgtttgccgcgctacatgtgtgaagtggtcgtcactcgtcagggccattgatgtgagcatgtcgatgtgtgttttttgctagggctgtgatggctccgtgctcttggacgacaagccgttattcatcggcgagaagacggccgggccgaacgcaaactcgctccggggattcgaggttatcgacgccatcaaagccgagctcgagaacgcgtgcccggagaccgtctcctgcgctgacgtcctcgccatcgccgcgcgcgactctgtcgtggcagtaagccatatctagctaatagccaagcagatatataccacgcatgtgtgtaaaccatccaaactgtaattgttgctcacgttgtggttgtgtctttttcgaatgatcagtcaggcgggccgagctggcaggtggaagtcggccggaaggacagccgcacggcgagcctgcagggcgccaacaccaacctcccggcgcccacgtccggcgtcgccaccctcgtgcagaagttccggaacgttggcctctcggccaaagacatggtcgctctctccggtaaccaaggctcctccatcttcgaattcgaatacgttacagatagctcgcatatgttcatggattgcgtccatgcatgacgcaggcgcgcacaccattggtaaggcgcggtgcacgacgttcagcgcacgcctcgctggcgtcggcgcctcggccggcggcggtgccactccaggtgacctttcgttcctcgagtcactgcaccagctgtgcgcagtgtccgccggctcggcgctggcgcacctggaccttgtcacgccggccactttcgacaaccagtactacgtcaacctgctctccggcgagggcttgctgccgtccgaccaggcgctggcctcggccggagcagctgctgccggggcggaggacgtggccggcctcatcgcagcctacgctttcgatgcgttgctcttcttcgacgacttcgcatcatctatgctacggatggggaggctggcgccgggagcgggcaccgcctccggcgaggtccgccgcaactgccgggtggtgaactagctagctaggttgctgcatgaaacaagaaggaagctgattatgctcccaaaattaattaggagtatctgtgcatcagataattgcgccagctatatatgtatgtgtctgctagtttctcaatctagtcatgtatcgttaattagctaaaaagatgatagctggattatccattatcttaaaaaaaattaactaatggtgtctgatatttgatttgtttagttaatcagcttatctgatatatatatgactatcctgcatgtaatcgaataactatactaataaaatcgggcaagtcattttcagtcatatatattacaggatgtgatacaaataatcacattaaaaaaataaaaatgtttattgcacaagctatattctaaacaaaatttatagcgcacgtactgaaacctttagagcatcccagcagctcctctatccgattctccatccctaaattggcgcataggagcgaaaaaaccagctccagcagatgcgccatccagtcattcaaaactagcgcatgcgccaaaaccggagagagaaaggggaaatatagcatgtctctctcctcacgccatatcacaacgaccgcgctcccgcccccatccggagttcggcgacctctcctccaaagcgacctcccctccatcgttgtcgtcgccggcccgtttttgattttttttacagaggacggtggagagggagggtttagccgtggagtgagggtggagagggagaggcataccagatctagaaggagagaggggagagcggcgaggcagccgacggggagagaggggcggcggccagagtcgacgtccaggcatgcaacgnccccnatccccaaccggcgccgtcgccgctagggccgaccagcgtcgttgtcactgctcgggccgcctggcgtcgctcaccgcccggcacctccgttgccgctcgcgcctctcaagtccgccgccgcagctcaacctcaaaccccgtcaccattcttgcaatgacgctgtaggggccagtggtggagtggggattgaatgagaggggaggggaggggaggggaggggattagagaggagggaggcgagagcggaggattggaggagggagtgaaggtgcgtgtggtgtagcgaggcggtcgagggtgggggatgcgatggagctgtgcggcaagaggaaggggatcgatgaggagttgaggacctatgcagatcgattccaaccggttttgttttttattctttatacccttttcaccctttattaaggactaagtacattcagtggttgggttaatcactttattaggttctaaacaaatcagcggaagtcaattacccgttattgcgattaataacgcagattaaaatttagtagtacaaaatatatcccataaaacgcaaatatagggttagttgaaagatattattaaaatataggaggatgggatatgtatgatgtaatatagatgatctgttggagtgggaagcaatatgaatgaggaatattttttggatgaccatccatataggtatttagaggataaaatatggataagctgctgggatgctcttacaatgaaaaaggtgctaagttacatacctgcgtttcatcaatattaagcgatcaatgtcagcaaatatcatgctatctatttcaagatagataaacatgcaccgtattatgcacaatggcatacgttgtaaagaagcaagtaatcacgcggaagaaaacgagtcaatatggatagtttgtcagagaacattaattgctattaacaaatttatattgaaccaaaatatgaataaacatatcccataacttttataaattacacatatttatttacatggtgaatcattataatctaatacgaccacaataaaattcataaatgaatttgccatggttacccactttgtcgacgcactatgccagagcagctcacctctaacgacatacctgtgatgggccaaagtgatggtcattgataaccgtcacctttgatgggtcctacaggatgccgttatcagtgagccctccggctatagaccgtcataggtatcaagtcagctgttatgggccgaaaatgaaacccgtcagatgaacacctctgtcagattccacttccggcccgtcacaggtgacttgatacctgtgatgggccgtgcctctccggcccgtcagaggtgtggttcagtcacctcaaacaggttttaaccctaacctatttggggtgagttgcggtgtatatatacccctagcggccacctactttccatcccaacccaatgcattgttcacatttcgggtgggagggtgtggagtgcgatttttggctggaaatggaggtaaaaaactttaataattatttttttctaacgtatattatgcattgtgttttacactctttatgttattaattgcagatggaccgaagttggatgtacgatattcgccgttcgtccctagagtatagggagggggtcactgcattcattagttttgtggataatgacatgaaaaatagtatgagcaaatatatgttgtgtccatgtgtagattgtaataatgagaagatgttcgagaatagtttatgggttcaatctcatatgatccgtataagattcatggacgactatagatgttggagcaagcatgatgtttgatggtagtttgtacatgcttataaaatataatcacttgtatattgtgtattagggcctgtttagattccacccgaaattttacaccctgtcacatcgaacgtttgaacacctgcatgaagtattagatataggctaacaagaactaattacacagattgtgactactttggagacgaatcttttaagcataatttctccatgatttgataatatggtgctatagtaaacatgtgtcaataatggattaattaggcttaataaatttgtctcacggtttactgacggatactataattagatttttttattagtacccgaacaccccataaaacacctatataatacccgatatgacacgccaaaactttacaaccctatatctaaaaaccccttaatggttgattgcaagaaacaggtcaattagctaggtagcgattccaacgtcatcacacaagctaattaattaaatgattcatgcatgcatgtacgtacagaggtggcctgacatttggtcgggtagatgtgccgtttttttttgacaaattgaaccttttcaaaaacttatttcgaaactaacccctaccaaaaacttcaaccaaaaatagggccggtcgctcagcgccatgcgcattg

SEQ ID NO: 26064 - DNA, 704 bp, Oryza sativa
atcttcgccagagaagatggttggagctcatcaaggattatgatgtgggaatccactatcaccctggtaaggccaacgtggtcgctgacgcgctgagtcgaaaaagccgttgcaacactcttggcgtccggggcattccaccggagcttaatcaacaattggaagccctgaacctaagcatcgttagccatggattcttggctacgctggaagccaagcctatcttgctcgatcaaatccgcgaggctcagaagaatgatccagatatgcatgggatcctcaagaatatgaaacagggtaaagccgctggtttcacagaagatgaacacggaactctatggaacggaaatcgtgtatgcgttccgaatgacaaggaacttaaacagttgatacttcaggaagctcacgaaagtccttattccatccaccctggcagcacgaagatgtacttagacttgaaagagaaatactggtgggttagtatgaagcgggaaattgcagagttcatggccctttgtgatgtgtgccaacgtgtcaaggcagagcaccaacgaccggccggacttctccaacctctccaagtaccggaatggaaatgggatgaaattgggatggatttcatcaccggacttccaaaaacccaaggcggatatgattctatatgggtagtcgtggaccgactaaccaaggtagctcggtttatt

SEQ ID NO: 26065 - DNA, 755 bp, Oryza sativa
cttaacccaaggcctacgatgattcggaccgaactggcaacccgacctgggttccagctcgtcccaagccaacccaagccaaccattccatattttagttgttgagcaaattttaagaattaaaacactgacttgggtacattgctaggcttgcccatatccgagggctcggctattcgaatagatttactctgatcagaggtgtacatctttacccacaagacacatcttcctcacgtgttaccacgcgccacataccaccacggtatacagacggaagacgtgacatattttccaacccatcctagccataaacaagagtaccgacccaatcctgcctacggccgggatacccgggacaggcaggcagaactgagcccctagcattgggcaccaaccctccgccgtatgacatcttgactaccgggccgcagctcgtgtagccttcatttgccctggagaatgtccatcgacgcccgacttcatccatctccaatccgtgtacttttgtttaagactagactgagccacaaactaagccttacccattagacatgtggaagtacggtagtgctttgcaacagaggcccgagcttaatccttatagtggccggggtgctacttcccacaactggcatgcacccaaaccccaccgaaaacaggttttaggggttttgaaaggggagaggtgtgtgtccaattgcaggcatgcaagctacagttccaaagtgtccaaatgatattagaattcccaa

SEQ ID NO: 26066 - DNA, 3883 bp, Oryza sativa
tataaaacctatttaactttgtttatttcttttcaattattatttgtgctctgaaaattccactaaaatttatttaagcattttaggcttttaggaaatatacaaaaatcctccaagcctcatttgacttttatctttgcacattttaattgttggaggctttcacattgaattttacttattcttttgcacaattttgaggatagattttagagtcgatttgggacgcgacaaacctaccccccttaaacggaatctcgaccccgagattcggaagaactggcgaagagatcgggatgggctgccttcagctcgtcttcacgctcccaagtagcttcttcttcggcgtggttgctccactggaccttgcaaaaacggattactcggttcctggtcctgcgctccatggcgtccaggattttcactggcttctccacataggtcaagtcttcgcgaacttcaatttgctctgagtcggcctgctcggatggcactcgaagacatttcttgagttgagacacatgaaacacatcatgcacgttgcccaaggaggcgggcaactccagctggtaggcgacttctccgcggcgagcagtgatacggaagggacccacataccgaggtgcgagcttcccttttgtctgaaacctgtgcacacctcgcaatggcgtgacccgaagatacacaaagtcatccactgcgaattccagatcacggcgacggttatctgcataacttttctgccgagactgtgccacctttagattatcccgaatgattctgactttagcttcagcttctctcaggatatcagtcccgaacacttggctttccccaacttggtcccacaggagcggtgtccggcatttgcgcccgtacaacgcttcatatggtgccatttgtatgctggcttggtagctgttattgtaggagaactcggcataggggagactcttatcccaagtcttcccgaaatctaggacacatgcgcggagcatatcttctaggatctgatttagacgctcggtctgtccatctgtctgcgggtgatatgcggtgctgaaatttagtcgggtaccaagctcttcttggagcttcttccaaaagtgagaggtgaattggcttcccctatcagatacgattttcttgggaacgccatggagactcacgatcctagcgaagtagagctccgctagtttattccctccataggtggtcttcacaggaatgaatcgagctaccttggttaatcgatccactattacccatatagaatcatacccaccttgggtttttggaaggccggtgatgaaatccatcccaatttcatcccatttccattctggcacttggagaggttggagaagtccggccggtcgttggtgttctgccttgacacgctggcacacatcacatagagccacaaactctgcaatttcccgcttcatgctaacccaccagtatttctccttcaaatctaagtacatcttggtactgcccgggtgaatggaataaggactttcgtgagcttcctgaagtatcagctgtttaagttctctgctatccggaacgcatacccgctttccgttccataaggttccgtgttcatcctctgtgaaaccagcggctttaccctgtttcatattcttgaggagtccatgcatgtccggatcattcttctgagcctcgcggatttgatcgagcaaggtgggctgggcttctagcgcggccaaaaatccacgaccaactatgtttaggttcagggcttccatctgttgattaagctcgggtggaatgcctcggacgttgagagtattgcaatggctcttccgacttagagcatcggcaaccacgttagccttaccagggtgatagtgaattcccacatcataatccttgatgagttctaaccatctcctttgccgaagattcagatccgactgggtgaagatgtatttcaaactcttatgatcagtatatatttcacagcggttcccaatgagatagtgccgccagatttttaaagcatgaaccaccgctgctaactccaagtcatgtgtagggtagttgccttcatgaggtcgtagctggcgtgaggcataggctaccacatgaccgtcctgcatgagcacgcaccccaatccttggcgcgaagcatcacagtacaccatgaaatccttgcgagtatccggcaagattaacactggcgaggaaaccagcttttctttgagagtttggaacgccttctcgcattgcgggctccacacaaacttctcttctttcttcaacaactgtgtcatgggtcgagcgattttggagaagttctcgatgaacctccggtagtatcctgccaaacccaagaaactgcgaatctgagtgactgtcttgggttgcttccaatcggtgacggcggtcactgtttcggggtccacagcaactcctttagcagatatcacgtgccctaaaaatttgacttcggacaaccagaactcacacttgctaagtttggcatacaattgatgttcccgcaactttcccaacaccagacggagatggggctgatggtcttcctctgattgtgagtaaccaaaatgtcatcgatgaaaaccacaacgaacttatccaagtattccatgaacactttgttcatcaagttcatgaagaaggcaggagcattggttaagccgaacgacatcaccgtgaattcatacagcccgtatcgcgtagtgaatgcggtcttcggaatatcttcttcacgaatacgtaattggtgatatccggaacgaagatcaatcttggagaatacagtggcacctttgagttggtcgaacagatcatcgatccggggaagagggtacttgtttttgatggtgacttcattgagagctctgtagtcaacgcacatcctcttcgtcttgtctttcttctctacaaagatcacaggagcaccccatggggaagtactcggacgtatgtaccccttttctttcaattcttccaactgtgtctttacttcggctagttcatttgctgccatacggtagggtcgcttgtgcagaggagtggttcctggagcaagatctatccggaactcaatctctcgcttgggcggcataccaggtagttcttccggaaacacgtctccgaactctctgactatggggatttctgacagacctatctgatgcagttctgaacttctgacagaggttggaggtgcaaagaaaacaaccggctgttccggccctcggtacagagtgacagtgcgcctcgcgcaatccactaccccttggaattgggccaaccaattcatcccaaggatcacatccaagttcttggtgtctagcagaatcagatccgagggaaaaggaatcccctgaatttctatagggacggcaggactataatactttgctgtcataacccctccaggggtggtgatgagcagagggttcctaagcctttctacccccaactgatttctccccacgaatggcacagatataaacgagtgggaagctccagagtcgaacaaaatggtagcagggatggaatgaatgaggaacgtaccaacgatgacgtctggagttgtcagcacgtcctcggccgtcacgtggttcacacgaccccgaatgacatccttaccaccgttgttggagcggggaggcgcttggccttgctggcgcctcggcttcgggcatttatccgcaaagtgcccgggctcgaagcagttgaagcacagacgctgcggacctgaagcgtccctgcggccttgaccagactgcgcagctggcgtaggaggacggggcacacgggtcccttgctggctctgctgttgctgcggctgtgggacgcgcaccacgaattgaggtcggggcgcgga

SEQ ID NO: 26067 - DNA, 5147 bp, Oryza sativa
tacacctctgatcagagtataatctattcgaatagccgcgccctcggttatgggcaagccgagcaatgtacccaagtcagtgttataattcttaaaatttgctcaacaactaaaatgtggaatggttggcctgggttggcttgggacgagctgggacccagggtcgggttgccagttcggtctgaatcatcgtaggccttgggttaaggcaggttcgtgagggttcacggccttgattaataacactgtgtagctctaggatcgtctttataaaatggctttgggcaactaagtgacttttaaatgctgtttactgcaaaacttaacctctatgttattatccccttgtactcccttgcattaattgtgcatctccggtgtggcttgctgagtactgtggttgtactcattcttgctcaatctttccccccctcagtaagagcagcttcggagaagatgtcttaggaggagtcctggcttataccccagttgagcgcctgtgaagatggagccgtaggcccgcaagtccgctgctgtttatttttgtttgtcaggcctgaagtgcctttgtaataatgtaaatattatcgatataataaagatgtgtcttttatatcatgcttgtgtggtgtaccccggcttttcctgggacggggattaatacactggcgttcgggaaaaggcaattttcccggtcgcgacactgagcctcgcggatttgatcgagcaaggtgggcttggcttccaacgcaaccaagaatccacgacccactatgcttagattcagggcttccatctgttggttaagttcgggtggaatgccacggacgttaagagtgttgcaatggctctttcgacttagagcgtcggcgaccacgttggccttaccaggatggtagtgaattcccacatcataatccttgatgagttctaaccatctcctctgccgaagattcagatccgactgggtgaagatgtatttcaaactcttatgatcagtatatatttcactgcgattcccaatgagatagtgccgccagatttttagagcatgaaccaccgcggctaactccaaatcatgggtagggtagttgccttcatgaggccgtagctggcgtgaggcataggccaccacatgaccatcctgcataagcacgcaccccaatccttggcgcgaagcatcacaatacaccatgaaatccttgcgagtatctggcaaggttaacaccggcgaggaaaccagcttttctttgagagtttgaaacgccttctcgcattgcgggctccacacaaatttctcttctttcttcaacaactgtgtcatgggtcgagcgattttggagaagttctcgatgaacctccggtagtatcctgcaaaacctaagaaactgcggacttgagtgactgtcttgggttgcttccaatcggtgacggcggtcactgtttcggggtccacagcaactcctttagcagatatcacgtgccctaagaatttgacttcggacaaccagaactcacacttgctaagtttggcatacaattgatgttcccgcaactttcccaacaccagacggagatggtgctgatggtcttcctctgattgtgagtacaccagaatgtcatcaatgaacaccacaacaaacttatccaagtattccatgaacactttgttcattaagttcatgaagaaggcaggtgcattggttaaaccgaacgacatcaccgtgaattcatacagtccgtatcgcgtggtgaatgcggtcttaggaatatcttcttcacgaatacgtaattggtgatatccggaacgaagatcaatcttggagaatacagtggcacctttaagctgatcgaacagatcatcgatccggggaagagggtacttgtttttgatggtgacttcattgagagctctgtagtcaacgcacatcctcttcgtcttgtctttcttctccacaaaaatcacaggagcaccctagggggaagtactcggacgtatataccccttttctttcaactcttccaactgtttcttgacttcggccaattcatttgctgccatacggtagggtcgtttgtacagaggagtggttcctggagcaagatctatccggaactcaatctctcgcttgggcggcataccgggtagttcttccggaaacacatctccgaactccctgacgatggggatttctgacagtcctatctgatgaagttctgaactactgacagaggttgggggtgcaaagaaaacaaccgattgttccggccctcggtacagagtgacagtgcgtctcgcgcaatccactactccttggaattgagccatccaattcatcccaaggatcacatccaagttcttggtgtctagcagaatcagatccgagggaaaaggaatcccctgaatttctatagggacggcaggactataatactttgctgtcataacccctccaggggtggtgatgagcagagggttcctaagcctttctacccccaactgatttctccccacgaatggcacagatataaacgagtgggaagctccagagtcgaacaaaatggtagcagggatggaatgaatgaggaacgtaccaacgatgacgtctggagttgtcagcacgtcctcggccgtcacgtggttcacacgaccccgaatgacatccttaccaccgttgttggagcggggaggcgcttggccttgctggcgcctcggcttcgggcatttatccgcaaagtgcccgggctcgaagcagttgaagcacagacgctgcggacctgaagcgtccctgcggccttgaccagactgcgcagctggcgtaggaggacggggcacacgggtcccttgctggctctgctgttgctgcggctgtgggacgcgcaccacgaattgaggtcggggcgcggagcgaggttgttgctgctgttgctgctgcgaggacgatccccctggatagggattggtgtagcggaccctttggttagcaccctgttgattgcggacattcgccaagcggcgcttgtgcgactccagttccttgtgcttggcttccaagcggatgctcttgtccaccagacgttggaaatccggatagtcaccggagactagacggacggacagctcagggtccattcctgccaagaacttctcctgcttttcctcatcttcccgcacatcctccagggcgtaacgggccaggttgttgaactcatgcaaatactccatcacggagcggttgccttgcttcaactctcggaattcccttttcttaagggccacgactccggcgggcacatgggttctccggaaagcggcggtgaagcgagcccaagtaataggctgcccctctggctgcgtagcctggaaatggtcccaccatagagatgcgggcccctgcagctggtgggcggcgaagatgactttctcctcatcgctgcactgcacagtgtctagctttttccccacggcatgcaaccaatccaacgcatccacggggttattggagctagagaaggttggtggacggatgcggaggaactcggcgagtttacagtgttgtgggggtggtggaggagcattctgttgtggcggattttggaggtggtggaggaaagcagtcatcatgttggcctgctgggcgaggatttgggtgagaatagcgttggtgtctggtggtggtggtgaagccgaagaaggaggtggaggtggactgccatggttgttgtggttgctgccttcgggttggttgccatcaccggtattagcacttctcctggtcgtcaccatctgaaaaccccacacaggaccagcaaacagagagagctgacaattaaagctaaccacccacgactaccataattcttgaatttattactgctattaaattagttcattaaagttcaagttgcttaagcaaataaaataaagacaggctccgacacagttataccacacaccggcataaccatgccccacacgactccaacaagaagacaaacgagaaagaatacacgcgcaagcctactaactgctcgtctaccgctgcgacgggccaggacggaaggtgagcaacagcgcatcctccgtgctaccaacgccggaggcttccccctcctgaggaaccacgggcgcgggctcggcacgaggggtctcgacgaagcaagtccacgccagggactgacgaacaagctcgggcctggaggtgctcttgcgggcggtgatcttctggctgcggcagacgcggcgacgcttggggcgacagacctctccctgggcgatcttgagctgatgcagctgcgcctccactgcgtctagttccttcttcagctgcagattctcttgacgcagctccaggatcttcatgttgttctcgaccatcccacggcgcaccatctgatggaagtcgatacgagccgcgtcgtacgcctccaccatgcgcgccaggtgcatgatggtagcgtcatcctccgagctagcatcccggaaggtggcgaagtcgcgggctcctccgcggcgagggtggtagcggtagggcgagtgctgcaactcgtccgggtagcgctggtgaagagtgccgatggcgaggagagcggcgttctggcaagcggcggggaaagaatctccacccgcggtgactgccaacgaagtccgctcgggagagccagtgaggatcactgcagtaacctcccaagcagcgtggggctctgcatcgtcaccctcctgctccggaagcggcctgccctggtagtccactccatgtggataccccaggacaacgcacatgccccgcagctccaagacgaaaccagtcaggtccagaccacgacggctgatgctgccggccatctacaaacaaaaacaaaaagaaaaacaacattttaaaggtcagattttggcgataaatgaagcaacaggacagagagagactagaggattttcacaaataagacaggatttttttttatttttgaaaatattgctaaggcttgggatctacggctcgtcctagggtcaaagggggctctgataccaacttgtcacgaccggaaataacccaacgggcgttccttacgtgcgtgtattattccttgtcccaggaggcaaggtacaccaaaagttgatacatttcagagtttaacaagcgggg

SEQ ID NO: 26068 - DNA, 3703 bp, Oryza sativa
gatccgcccgccattgatgcgccggcgaggttagggggaaagtttccgaatgaatccgagggagagagggagggaaaaatgggggggaaagagggagggaatcacggggaatatttcccccctcttgattgcacgcgggacggacgggagcggcgggattcgcggcggcggcggcgctagggcacgggcgaggcggcgggagcggcgggaggaaggggatgacgggtgggccccacccgtcagcgagggtggcgggcgggcccgcccgtcagcggcgcgcgcgcggggaggagaccgaatgggccgcggggaagaggggagagagggaaagggatgggccgagccggcccaagagggagagggggagggaaagggaactttttagggtttttctttttataaaaccattttaactttgtttatttcttcttaaatattatttgtgctctgaaaattccactaaaatttatttacgcattttaggcttttaggaaatatacaaaaatcctccaagccttatttgacttttaactttgcacattttaattgttggaggctttcacatggattttaattattctaggcataatttcaaggatgtattttagagtcgttttgggacgcgacattcgagcatatcggctttgcatcttctcggaggttgttgatgtggtctaacccctcgtttgataggtagctgatgttcaacaatcgatcggctgagtcctggcatctcataatactcccaagcaaagcaatatctgaattcctttaacagctctatcaacttggttctaaattctgaagataagtcttactgataaatctcggccttggtcgatcacctggaccaatgtcaatctcttccaaatcatcggccgacatgaaaccctgtccttgcttgtcatcgagatcatctactatgtccttggtgtagacgtttgaaccctccacgacgccctcaaaataatagcttgggctctccatcttcaattggctgtttatcacaatcggacacttttagaaaatctccatcccaaacttttctagataagcaatcgagaccatccatctcccaaagagctaaattggcactggcaacgttgactgacctgtcggctggcacgatttcaatcttgtcgccttgccactgaatcaagcattgatgcatggttgaaggaatacaacaattggcatgaatccaatccctaccaagcaacaagctgtaagaacccttcccaccgatgacaaagaatgttgtagggacagttttgctaccgactgtcagttccacattcaaaactcctttggtttctgatgtattgccaccaaaatctttgagcgctgttgtcgaaacaacaactgcatacgttgaaagacgtggttactcaacggtggttggaaagaaagtaaagtgtattgaattgagaatttttcttaggatccccctgttacatgaccctaggagactatttatagccttattacaggttcttgctactagggtttaggttatacaggggaatttacttggctgcccttatgaaagggacatttatgtgggtatacagtgtaattgaggtacatgggctcctaatgggccgtcaggcgattgttggctcaaaggccactgggccttcgtgaggccgaacttgctatggcgaagtcgtctcccttcgacatacactcttcgccttacatccttcgcccaagaggtctttggctctgcgaggcacccgcgctattctccgcccttcgcggtctttgctccatagtcttcaccatgggggcttcgccccaaccgatcttgacgtcttaggcttgaatccttactggtcgcatggtttcggcaggtttggtcgaagggcctcatgccataccgccaacaagcccctcacgggcaagggtgagataggagcttcggccgagaccgtgcagaccatgtggtatggtatgtggctccccctttcgaccgatgctcctgccgaaacctatcttattcgtgcaaagaaagtgtgttgtgttttttcggttggtattgttttgtagctttcgcctcttgcggatggtggagttattttttttatttttcccgggccgaaaggaacagtaatgggctttcccttcatgggcttattactgtgcggctcggtcgatggaaatttaccgtttcgcctaccctcgcgacacgtgacgctttattactggtgggtaggcgaaccattgctggggtgggctatatattctctccctcttttcccttttcactgccacacttgtcattttcactgcgcgcgctctcttccaccgttctatcctttcacggcgccccttgacccctcatatctttcgcccgttctctttgttcgccactgcacacacccttcgccatggctcctcgcaagccaaaccacgggccggattgacgtcgacaccacagcctttttggggatttctctcatagatgacggcgagctggcgaagttggtcagctctggggtgttggttgaggggcaggctttcgcccctgggaaggccgtggtaccgaagcccgtcgacaaccagacggtggtgttcgccggcttttttgaggcggggcttcggtttccgtgcaacatgttgttgccggagatccttcaccttttccaggtagagttcccacagttgagaccgtcggcgctagtccggattgccatcttcgactaggcgtgccggacctccgggtttgaacccagcgccgaactcttcggcgccatattttttgccaccatgaattcgaagatggtggtgaccccggccggaacgaagaagacggtgttcgggagcgtgaacttcaacgttcgccccaagcgctccgatctctggcctgtgaatgccgccatgtcgaagtgcgatcgccactagatggcgaggtggttctatcacaccatccccttcgaggctgggtccgagtcggcgaaggccctccgatgtcggcgcatggtgattgcgccgaaccggaaacccaagatcgccgtggacggcgcaatggaggcacggttcgccttgctacgcaaggtctgctcccgcctcagctgccgcgacttggtggaggagttctgtatgcttcacatttttcccctctccctgtcgtggcaagtcacggttgaccaagacgaagaggtcgacggtttgccgaagctggttcttcctgaggggacgaatggtgagaccacgctttcgctatgcacttctgtgttttgctattttcccggttcaacgcttaatatggctacaccttttattttcatagtgttgactctcgatcaggccgacgctgaagcctggaagatgatcggcgatgtgtcggtcatcgagtacagccagctgctcacacgacaggctgccggtcgggcgaaccttgtttatgacggcgaactgcctccccgggcgaacccccacaaggccgacgacgatgcagggccttcgcgaaagggacgcgtggacaagtgaaactggcccctagaaagcgatgggtccctgcttgctccgattctgacgccgacgacgaggatgacgtcgaagagcgtgacgacgaggaggaaggggaggaagaagagggggcggaggctgcggccggaaaggctgcgaacgagcggttgaaaaccgcgccgagacccctggctacactcctactccaagtccagggcataaccagaccggg

SEQ ID NO: 26069 - DNA, 2875 bp, Oryza sativa
gccaagaagaaaggactcgtcgatgttgctcgtgtttttagcgacgacgagtcttttgacgaaaccccgacttcgcccgccagtcgcagcttagatctttcgaccgcccccgttgtttcgatcgacgctggcggcgcaggtggcagtgccgccgctggggcctcagcctccgctgatcgtgtcgtgaaggctgcagctagggttttcggaagccctttgcgtctgccagttgtttcgccgctagagaagccgaaggggaaggggggggcccatcgaaacatctgcctcggagtattctctcgcggcgccccacttcgcccccggcgattttgagacccgggcggaacttattccctttgttgagggggtaagcaaccttgtctctcctgccggcaccccgagcctattcaccgagctgaatgagttcgacgaagggtgttctgctattaaaagcttggcagttcgggtatgctattcgctctctcttcttgtttgtctttattttcatattacagatcccacaactaacatttgctctcttcatccgttttaccttacatccaaattcttgcggctcattgttcgacagagcgaaccgtgcgggcccatcttgacggatttaggaaccatcttcgggccaaggatgatgagattggccgcaagaatttggagatggaggccctcgccaacaccctcaaggaggcaaaggtggaaaacaagcgactccaagccgaactggagaagggaagagaggctagagctgaggtcgatcgcctcaaggccgagcttaaaaaggaaaaagcccattccgccgcgctaaccgactattacaatcttactgagccgaagatagaggctcttcgcctggaggttagcaaggctgaggcaagcgctgcagaggagtcgcaacggttttcgtgggagatggcgaaagccaccgagtccgcaaaaaggcatgccaaactctccgccttgccctttccgacatgggtgcgagggtgcgaggagtccctgccaaagatgcctctatctttgacttttcggagtggacgcaataggccggtggtgcggtttcggactacgccactgcgtacggtgattcctgtgcacatgtatcggcggcgttcactatgggccttctacagtagtttggctgtgagcatgtcgccgagttccctaactatgcgaagggggactgggaggttagtgcacaggacgtttcgcctacgctccatgcgtggcagaagcagttctggcagaaggatggccgatccactgctaaggcgcgccttttggagcaactggcgaaggccgaggcggcagaccaaggcgaaggcaaggatgcggcagaaggagggggtggaggcgatgcccaggatcacccagagttgtgaggccctccgccctttccttagatttttgtagtttttcttcttgcgtttgccgtgaaaggcgaacaatgtatatttggctgatggccccttacccttcttattgtagccgaaaatgaccttttggatatttggaatgtatgacttagtcttagtcactttttatggtcgatgcctttggtgcatgtgcttgcgccattttcgcattacgtaatatttgctctttttcgcccattcttactatgcaattcaccttttgccctatctgcactgtttagcagggtgttcgccgaaaattgtgcattcggcccctctctgggaattggcaaagcaaaaacgagaaattcgtggtgttgaagggtctgccaaaagtgcgatgctcgtttcggcctgtttatcgcgagatggtaataaatggccacagctataaggtttttaaggttgctggctggctgcgggtgcaccccgggcgaaccttagaagattacgatcgtgttcatacaaaatgtttggaggatatggttcgcttttggcgaagtcatcagaagaccgatcgacaggaggcgatctcccagcgtcgttacagtctagtctgtgtttcgcccccttctccacttagggtcgtgtatgatattagtagcgatgatgatcctagttcgcccaaccattccttagagagtgaggacggttgtgggggcgaagatataatttatctgtaggctgggctgcagagccatcgcttttctttacttgtaccatgttgtatggtttgtattcttggatgtgtattttcctcgaagtcaataaagatgtgctttattcccttttcactattttttgcattgtcacttctcgtgctttcgttaggtcggaacatgtcggcccctttgcgtgtattagcgaaataggtctatgacttttcagctttcggcttccgttttcgatctgttttattctacattgaaggaagcacttgtgctttcgttttgatcgaatgtaacggtgttcagttagttgtttctcgaaacaagatgttgcggtttcaacgttcggcgagcggtgcttcggccgattcgtttcgccccctggcattttcgctgatcaggcgtttgccttagggtttttccacagattatcaatcacacaaataagaaggcgagagacacaaagattttatactggttcgggcctccagggtggataatagccctacatccattttttttgtcttttttttcattttcctcttttttttgcatttttgtgtcgaagggcttacatagtgccgaaaggcttacataacaatatgtacatttttacatgttggcgatctgggtgccacccgttctacacatagaaacgctggagagaggcagcgttccaggaatggtcgaactcttcgccttccagtgtcgccaggcgaaaggagcccgtcctggacttgtgcttgatgaggtacggtccttcccacttcgattcaagct

SEQ ID NO: 26070 - DNA, 685 bp, Oryza sativa
gaatggaaatgggatgaaattgggatggatttcatcaccggacttccaaaaacccaaggcggatatgattctatatgggtagtcgtggaccgactaaccaaaggagctcggtttattcttgtaagaccacctatggagggaacaaattagctgaactctacttcactaggatcgtgagtctccatggcgttcctaagaaaattgtatctgataggggaagccaattcacctctcacttctggaagaagctccaagaagagttgggtacccgattaaatttcagcaccgcgtatcacccgcaaacagatgtgcagaccgagcatctgaatcagatcctagaagatatgctccgtgcctgtgttctagattttgggaagacctgggataagagtctcccctatgccgagttctcctacaataacagctaccaagccagcatacaaatggcaccttatgaagcgttgtatggccgcaaatgccggacaccactattgtgggaccaagttggggaaagccaagtgttcgggactgatatcctgagagaagctgaagctaaagtcagaaccattcgggataatctaaaggtggcacagtcccggcagaagagttatgcagatacccgacgccgtaacctggaattcgcagtgggcgattttgtgtaccttcgggtcacgccattgcgagg

SEQ ID NO: 26071 - DNA, 664 bp, Oryza sativa
ccccgtggccctttgtgatgtgtgccagcgtgtcaaggcagagcaccaacgaccggccggactcctccaacctctccaagtaccagaatggaaatgggatgaaattgggatggatttcatcaccggacttccaaaaacccaaggcggatatgattctatatgggtagtcgtggatcgattaaccaaggtagctcgatttattcctgtgaagaccacctatggagggaacaaactagccgagctctacttcactaggatcgtgagtctccatggcgttcccaagaaaatcgtatctgataggggaagccaattcacctctcacttttggaagaagctccaagaagagctgggtacccgattaaatttcagcaccgcgtatcacccgcagaccgatggacagaccgagcgtctaaatcagatcctagaagatatgcttcgcgcatgtgtcctagatttcgggaaagacctgggataagagtctcccctatgccgagttctcctaccataacagctatcaagccagcatacaaatggcaccttatgaagcgttgtatgggcgcacatgccggacaccgctcttgtgggaccaagttggggaaagccaagtgttccggactgatatcctgagagaagctgaagctaaagtcagaaccattccggataa

SEQ ID NO: 26072 - DNA, 5706 bp, Oryza sativa
tgtgacttgtcttgctcgctttcccaaacgccggcttcaacttccacgaagagcggatcttccgaagctgcagcgtctacacgaccaatggaaaagaaaaggcttttactctaataaactccatataaccagcagaaacaaagcacaaaaatgggttcttgacttcttaaggaaaaattagagacttgaacggtccaattccgagttcaaatggccaagttatggccatttgaagtttatatgctctttaaatggatttgcgaatttcttcatttaaattttaatttaaaaattggatttattgcgtcagccgaggggaggggcgcggggaccgggtccacgggggtggggcccacgcggcagccccacggtccacggtggaccgggcgcacccgggctcgcaccggccgacgccgtgggtcccacgcgtcagccgcacctaagggcgtgggcggctgacagccgggccccacacggcagccgcggggcgcgcccgaaggcggccacgccggcacagccgacgggaggcggcgcgtgtaacgtcccgcctcccccaggccgggccaacttacatctgatagctttcataggtcatagactgccctcacagaccaacacatgtcttttctgcacactttgtcctcactcgtgtgcacccggaaagccccgcgcccgaaggcggccacgccggcacagccgacgggaggcggcgcgtgttacgttccgtcttccccaggccgggccaacttacatcagatagcttttataggtcatagactgccctcacagaccaacacatgtcttttctgaacactttgtcctcactcgtgtgcaccccggaaagaatttcccggtcggtcacccatcccaaattgctgcaggccaagcacgcttaaccctggagttctttggagattggcttccggaaaagaagttgcaacttattggtatgagtattctattaatcctattaagccctaggccgggatgttacaacgcgcccgcgcccctatggtcgccgcggcggccataggtacggcggagcggcgcccgagagaggggagggaaggggaaacgaatcggcggtccacggctcaccccgggtcgacggcgacgacgggaacggcgaccggagcggaggaaggcggcggcgcggcttgggtggacggggtcgacggtgctccggcggtcggcgtgcgaaacggaggggtggacgaggtcggtgaggatgcggcgaagctgaaggaggcggccccgagggggaaggtggtccggggcgacgacggcggcggaccggagctcggcggcgacggcggagagagagagcgacggcgcgagctcgattccggcgagagagagaggccggcgagtgccgcgaaaccggtggagggaggcacggggagggtttatatagggttaagagagggagggggtggccggaggagggggaaacgggcgcgggagtcccggccgccattaatggcgccggcgaggttagggggaaagtttccaaacgaatccgagggagagagagagagggaaaaatggggggaaagggggagggaatcacggggaataattcccccctcttgattgcacgcggggcggacgggggcggcgggattcacggcggcggcggcggcgctagggcgcgggcggcgggagcggcgggaggaaggggatgacgggtgggccccacccgtcagcgagggtggcgggcgggccctcccgtcagcggcgcgtgcgcggggaggaggccgaatgggccgcgggggagaggagagagagggagagagatgggccgagccggcccaagagggggaggggttgaaaaaaagactttttagggcttttctttttataaaacctttttaactttgtttatttcttaataattattatttgtgctctgaaaattccactaaaatttatttacgcattttaggcttttatgaaatatacaaaaatcctccaagccttatttgacttttaactttgcacattttaattgttggaggctttcacacggattttaattattctaggcataatttagaggatgtattttagggtcgttttgggacgtgacaacagtcctatctgatgaagttctgaactgccgacagaggttgggggtgcaaagaaaacagccggttgttctggccctcggtacagagtgacagtgcgtcttgcgcaatccactactccttggaattgagccaaccaattcatcccaaggatcacatccaagttcttggtgtccagaagaatcaaatccgagggaaaagggattccctggatttctataggaacggcagggctataatactttgctgtcataacccctccaggggtggtgatgagcagagggttcctaagcctttctacccccaactgatttctccccacgaatggcacagatataaacgagtgggaagctccagagtcgaacaaaatggtagcaggaatagaatgaatgaggaacgtacccacgatgacatccggagtcgtcagcacatcctcggcagtcacgtggttcacacgaccccgaatgacatccttaccaccgtggtttaggcggggaggcgcttagccttgctggcgccaggtgcatgatggtagcgtcatcctccgagctagcatccctaaaggttgcgtagtagcgggctcctccgtgacgagggtggtagcggtagggcgagtgctgcaactcgtccgggtagcgctggtgaagagtgccgatggcgaggagtgcggcgttctggcaagcgccggagaaagaatctccatccgcggtgactgccaacgaggtcctctcgggtgagcctgtgaggatcactgcagtgacctcccaagcagcgtggggctctgcatcgtcaccctcctgctccgggagttgcttgccctggtactccactccatgcggataccccaagacaacgcacatgccccgcagctccaaaatgaagccagtcaggtccagacgacgacggttgatgctgccggccatctacaaacaaaaacaaaagagaaaagcaacattttaaaggtcagatattgacgataaatgaagcagcaggacagagagagactagaggattttcacaaataagaaaggatttttatttcaaaaatattgctaaggcttgggatctaaggctcgtcctagggtcaagggggctctgataccaacttgtcacgaccggaaataacccaacgggcgttccttacgtgcgtgtattattccttgtcctaggaggcaaggtacaccaaaagttgatacatttcagagtttatcaagtggaagcataaatagttactttattacattggcggcgaaggcccagcacacacaaagacaaacgggaaacagcggaagactagggcgatgaccacaggcgcttgacagcaggcacgagctagacaccaaagccttcatcttccaggaactcctcttctgggtttgggaaaaaattgagcaagactgagtacaaccaccgtactcaacaagacacacccacaagtgaaacataaatggagggagtacaaaggggttaaagtatacgggttaggttttgcagtaaacagcattaaagacatttagttgctcaaagctattttgtaaatacaatcctcgagctatgcaacattattaatcaaggccgtgaacccacacgaacctgtcttaacccaaggcctacgatgattcagaccgaactggcaacctgaccctggggtcccagctcgtcccaagccaacctaggccaaccattccacattttagttgttaagcaggctttaagaattaaaacactaacttgggtacattgctagggcttgcccataaccgagggcgcggctattcgaatagattatactctgatcagaggtgtacatctttacccacaagacacatcttcctcacgtgtaaccacgtgccacataccaccacggtatacggacggaagacgtgacatagtttccaacccatcctagccatagacaagagtaccgacccaaccccacctacggccggaacctccgagacaggtaagcaggactgagcccctagcagcaggacaccggccctgtgccatgacatctcgactaccgggccgcagctcgtgtagccttcatttgccctagagatgtccatcgacccccgacttcgtccatctccatccgtgtacttttgtttataaccagactgagccaaaaactaagccttacccactagacatgtggaagtacggtagtgctttgcaacagaggcccgaagaccggtccttatatggccgaggtgctactatcaaaaccatgcaccccgagcccagcctaatgttataaaaccacctaatgttgcctaattaagcgacgaagcatctacctaaattcatactagtggtaccatgagtagaatgcccactagttggggttttgtttattctagggtgaacaaggtaataatatcaataacaataataaggtcataacaaaggtaaataggcatggctaaataaaacagtgataacgcgggaatttaaataaaacgataatgcattaatttaaatcaaaataattttataaactgggattcaatatattcaaggatgatgtgacttgccttgctcgctttcccaaacgtcggcttcaacttccacgaagagcggatcttccgaagctgcagcgtctacacgaccaacggaaaagaaaaaggcttttactctaataaactccatataacaagcaggaacaaagcacaaaaatgggttcttgacttcttaaggaaaaattagagacttgaacggtccaattccgagttcaaatggccaagttatggccatttgaagtttatatgctctttaaatgaatatttgcgaatttcttcatttaaattttaatttaaaaagggtttattgcgtcagccgaggggagagggcgcgcggaccgggtccacgggagtggggcccacgcggcagcctcacggtccacggtggaccgggcgcacccgggctcgcaccggctggcgccgtgggccccacacgtcagccgcacccgagggcgcgggcggctgacggccgggccccacgcggcagccactcggcgcccccgggggcggccatgctggcacggtctgcgggaggcggcgcgcgcgcccctatggtctccggcggtggccataggcatggcggagcggcggccgagagaggggaagggaagggggaaaagaggcagcggtccacggctcaccctaggtcgacggcgatgacgaaaaaggcggccggagcggaggaaggcggcggcgcggctcgggttgacggggacggcggcgctccgtcggtcggcgagcttgacgagggggtgaacggggacggcgacggtgcggcgaagccgaaggaggcgacgccggggcgggaaacggtccggggcgatgacggcggctgatcagagctcggcgacgacgatggagagacagagcgacgtcgcgagctcgaatccggcgaggaggaagggcggcgagaggcggaaacggacagaggaggtgcggggagggtttaaacaaggttggaagggggagagggcggccggggaggaaggaaaccggcgcggcgttcttgggctccatcattggtgccagcgggattaggggaggggttccaaacgaatccaagggagagagggagggaaaattggggggaaagggag

SEQ ID NO: 26073 - DNA, 2360 bp, Oryza sativa
aaggggactttttagggttttttttttataaaacctttttaactttgtttatttcttaacaattattatttgtgctctgaaaattccactaaaatttatttacacattttaggcttttaggaaatttataaagccttatttgacttttactttgcacattttaatttttggaggctttcacaaggattttaattattctaggcataatttaaaggatatattttagggtcgttttgggacgtgacaaacctacccccccttaaacggaatctcgaccccgagattcggaagaactggcgaagagatcgggatgggctgccttcagctcgtcttcacgttcccaagtagcttcttcctcggcgtgattgctccattgaaccttgcaaaaacggatgacccggttcctagtcctgcgctccatgctgtccagaatcttcattggcttctctacataggtcaagtcttcgcgaacttcaatttgctctgaatcggcctgctcggacggcactcgaagacatttcttgagttgcgacacatggaacacatcatgcacgttgcccaataaggagggcagctccaactggtaagctacttctccgcgtcgagcaatgatgcggaaaggatccacaaacctaggtgcgagcttcccttttgtcctcgcaatggcgtgacccgaaggtacacaaaatcgcccactgcgaattccaggttacggcgtcgggtatctgcataacttttctgccgggactgtgccacctttagattatcccgaatggttctgactttagcttcagcttctctcaggatatcagtcccgaacacttggctttccccaacttggtcccacaatagcggtgtccggcatttgcgcccatacaacgcttcataaggtgccatttgtatgctggcttggtagctgttattgtaggagaactcggcataggggagactcttatcccaggtcttcccgaaatctaggacacatgcgcgaagcatatcttctaggatctgatttagacgctcggtctgtccatcggtctgcgggtgatacgcggtgctgaaatttaatcgggtacccagctcttcttggagcttcttccaaaagtgagaggtgaattggcttcccctatcagatacgattttcttgggaacgccatggagactcacgatcctagcgaagtagagctcggctagtttgttccctccataggtggtcttcacaggaataaatcgagctaccttggttaatcgatccacaactacccatatagaatcatatccaccttgggtttttggaagtccggtgatgaaatccatcccaatttcatcccatttccattctggtacttggagaggttggaggagtccggccggtcgttggtgctctgccttgacacgctggcacacatcacaaagggccacgaactctgcaatttcccgcttcatactaacccaccagtatttctccttcaagtctaagtacatcttcgtactgccagggtggatggaataaggactttcgtgagcttcctgaagtatcagctgtttaagttctctgttatctggaacgcatacccgatttccgttccatagggttccgtgttcatcctctgtgaaaccagcggctttaccctgtttcatattcttgaggagtccatgcatgtccgggtcgttcttctgagtgtcacgtcctgataaatccattccgaattaaaattcgttttcctaaaaggaataatagaattaattaaaattcgaaaagaaattggcaaacactaaaatacgtgcaagaaaaattcaaatgtgacccggagaatttttgttaaattctccttggtctaaaatgagccctcaaattttacttgaattttcagagcaccggaaatatttattaaacaacaacaacaattatcaaagttcaataaaaagaaaatctaaaaataatcctcctcttcctcctttgggccaagcccacccgaagtccttctctcctccctctctttctctccctctccttctctccctcctcttgggcccccttcccctcccggcccactccctcctcctccctctctctcccgggctgcctcttttccccccccctcccctcccggcctgtccggcccaggccgcctccccctcctcccctcatgggccgtgtcccggcccagccgggcctctcctgcccgagccgcccctcccccccccccgcgcacgtgcgccgcgcgtgcgctgagagcgcgcctggccgcgcggggcccacgcgccaggccgccgtcgtcttcttcctccgcccggccacctctctctctcttcccgtgaaaccctactcccttcctccctcaaatccgtgtgattcg

SEQ ID NO: 26074 - DNA, 510 bp, Oryza sativa
tttagatcaaccaaccaaggaagaatttgaaatttaagtctacagaaattcaaaagctacttcagttgagtaatcaaaatagtgaagcgatgttcaagattagtatagtagtgtgtgtgcatacctacttgatttctctcaaagttaaacattgtctttcagtataccaaattgttgtagagctgacttaaggttatctggaccatatccctcgattgaagtaattcctggtttgtcaaaggatatgacatcctgtaatgaataacttctggcagcatggacttggttaggaacagcattaaatgagcctttgagaataatggtcttgtgcacgcctcctaatagtccttcataatcagtatcaccactttcaccaacaaccactgtcatatttgacagctctaccccccatcttatatacaagtacctacaagagagcaaacatagattgtcacatccgtagtatagggaagctgaaaaggctgaaaacaaagttgatagatgatactg

SEQ ID NO: 26075 - DNA, 790 bp, Oryza sativa
cgtcacagtacaccaggaagtccttgtgagtatccggtaagaacaacactggccaagagactagcttttctttggaaagttgggaccgccttttcccttgggggccttcacacaaatttttctacctttttcagcaactgcgtcatgggtcgagcgattttggagaagttctcgatgaatcttcggtagtatcctgccaaacccaaaaagctgcgaacctgagtaactttcttgggttgtgtcgcgtcccaaatcgactctaaaatctatcctcaaaattgtgcaaaagaataagtaaaattcaatgtgaaagcctccaacaattaaaatgtgcaaagataaaagtcaaatgaggcttggaggatttttgtatatttcctaaaagcctaaaatgcttaaataaattttagtggaattttcagagcacaaataataattgaaaagaaataaacaaagttaaataggttttataaaaaagaaaatcctaaaagaagttctttttccccccccccttccttcttgggccggctcggcccattccctccctctctctctctctttcctcccgcggcccatcggcctccccgcgcgcgcgcgccgctgacaggcgggcccgcccgccactctcgctgacgggtggggcccacctgtcatcgccctcctcccgccgccgccgcgcccgtgccctagcgccgccgccgccgcgaatcccgccgctcccgtccgccccgcgtgcaatcaagaggggggaattattccccgcaatcccctctcccgattccccctcttt

SEQ ID NO: 26076 - DNA, 874 bp, Oryza sativa
cacacgagcctgccttaacccaagggctacgatgattcagaccgaactggcaacccgaccctgagtcccagctcgtcccaagccaacccaggccaaccattccacattttagttgttaagcaggttttaagaattaaaacactaacttgggtacattgctcggcttgcccataaccgagggcgcggctattcgaatagattatactctgatcagaggtgtacatctttacccacaagacacatcttcctcacgtgtaaccacgtgccacataccaccacggtatacggacggaagacgtgacatagtttccaacccatcctagccatagacaagagtaccgacccaatcccacctacggccggaacctccgggacaggtaggcaggactgagcccctagcagcaggacaccggccctgtgccatgacatctcgactaccgggccgcagctcgtgtagccttcatttgtcctagagatgtccatcgacccccgacttcgtccatctccatccgtgtacttttgtttataaccagactgagccacaaactaagccttacccactagacatgtggaagtacggtagtgctttgcaacagaggcccgaagaccggtccttatatggccgaggtgctactatcaaaaccatgcaccccgagcccagcctaaaaccattttgaggattttgaatagagggggaggtgtgaatccaattccacaataatccaacaattccatagtgtccaggtgatgagaatatcccaaagtctagagttgtaaaaccacctaatgttaccaaattaaatagcgaagcatctacctaaaatcatactagtggtacgatgagtagagtgtccactagttggggttttgttta

SEQ ID NO: 26077 - DNA, 6449 bp, Oryza sativa
agattaggtggagtccttaagtcaattgtaatcaaggaatgaatcaaaatatactcaggcaacctttaggcaaaatatgaatctcttgagttcttctcgccaacctttagtcttcactcatcccaaccaagctcgggtgtgtgggtttcctaccaacctttactcaggactctttatcctctccttaatataatgatacacagatctcctgcgtgttcaaggcaaaaaaaaagccaacgtcgtctggctatcttaccagcggtgtttatcccccaataaaaccttgcctataacacccactatagtgttgtggatgccacaatttgacgaaactactaatgttggcttatttgcatcatcttagatctcgacacccatgtatcaccttaagtttaacgaagcaaacaaattaagtatttacaagttttcatgcctaaatagcccaacaagatgtgaggtcatcagacacatcagatgctggacagaaagggtaggattgtgacgagagggagctgggctatttgtttgccgaggctgcattgtgaggagtgctcagcgcgaccgagcagattgcttggtacagtaaagaggtctcggcgcttttagttcggggtttgattgattggaagttatgctctcaaatatacagctctgcttttattttgtcaccttctgttgtgttgtcaattattatgcttttgaaatttgaaaatctaattagctagcacttctcaactgaatgtcatccaactagaactgatttattttatttcattttatttatctagttatggtagtgcatgttctacatttgttgttgatagaacaaatagtccaactgcagtggacactgtttatgattttgaacacagttctgtcctgattcgttgtactaggatgtgttacatccagttctagattcgttttttatgggacggtgagagtaattgattttgaacactgtttatgatttatttatgatctatacgcctatacctagttaaacatgtatctacttcacctacaaagtaaaatggaccgtactaatcttaactttttaaaataacttaatcttacatgtatctctatctcagagcaatataacttgaactacaaacttactgggtcttagcctgcggaactcctaaaattcctccgccatcctttgatgcaagaggatttaatttggtttagtagttatgtcttttgaaacaaaaatgggccgtcacacaacgctgaaacggttaataatactatttgtttgacttattctaattttttgcagtttcaagtagcatttattctacgtgatcgagattgagaaacgagcagtagggctccctctctgcggttctatatcatctcacacggcaccaataagctttgcaccctggtgaacattgggctatcgttctatggcccttgctgcaaccagagatgggggatacagacttgcttctgtttatccaatgtaaaactgatgatgatgagttctctaactgtatagtatatcgcaataaggccggtgcttacagaaggcactgtgtgcataacattgttttgttgctcaatcggaatattttgaagtattgcttgggtccggtcgtccggagactccggatatgttcacctgtttgaggtttcaccgttttggttggttcgtctcagctctccttcagactactgtaagttctcgacaaatgttcactgatataaaaaccaaatacacaacccccctaggccaagcggttcatgccttcatggtttctgtgaatcatatgacgcagatatcctcatcccattgcaaaatatatttttttagtgaaaattaacaaactagaaaaaccaaattgaaaaactataccctacaaaacacgtattctttagatcccgttgcaatgcattccaagggcatagccacatcgcactatattcaaatattagtgttctacgataacaaacaatgcggggatttagttttttgttttgttaactaaatctatgatagctgaacggtcaatgcggttgccttttttttttctggcctttttttttctgtattgaaaactcatgtactacctccgtttcatattataaaactttctagcattgcccacattcatatagatgtcaataaatctagacacatatacatgtttaaattcattgacatatatataaatatgaacaatgctagaaaatcttataatatgagacggaggaagtatttatctatgctttctatataagtgagaccacaaacaggcactacgtctagtgacatcatcaaaatagttttaactgttggatcgacaagtttttcaggattaaccgttagacaaaagtcccctccacttcttcaccaattaaacaacgtcattaatcaccaccctatctaaatgctatatatttaatcaggtactcaattggacaataatacaaccaagatatcatatcatatttactattcccaaccatcattcaatcaattttatatacatatactaatagaaatatatgtatatacaagaaaatagaaatgagaattgcttagtaatttccgcaggaatcacttagttcaatatatagtattgagtgatttaggcctctctcaaagagagattcagttgctcttagtagaacaagcaggtagaagtataacacaacttgcaaaagattcttgaaatatgcagataaggactccaaaagaaaacagaaaagcaatctagcctcgtttcgcttcttctcctgattcagtgacctagacaatgaagccgacaacggctacggcgaaaacgaggtcgactgcaaaagattgcatcgagccgcaatacgggccttgcaaaatcggatgttgaagcgaactctatgaacatgagaactttcggtcgaaccttggagatgcctcgtcggagacaacacatgcccaatagtaatcgactaaactcggtagggtccaccatataccaagtcttatatagaaccgcatctcgtatatagaaggagtttccgataagaaaggacaaatagagttcaagttagaaacgaccaggactacttggatcgtatccatatttatctctctagttctacttagacaaggagacatctatgggtataaatacaagaccccctaggaggagaggggacacacaagccagaacaaaccaatacgccgccaaacatcgacatcagaattagcctagacagacccaatttggtgcatgcggaggccgacaaggggatctagcgctacctctaatctcgacgagttcgtacttgaggaggaagactaccctgtcgtcgactatgtgttggtgatccatgccgccaagtcaacgacagctagataggttatcccaattattgtacttgtatgattcggatgaacaaagagcaacaccggcttcggccaataggagtagggttgttaccttcttgtgaaggggcccaaacctgtataaaaatccttgtctatgtctcttttacctcaatctcacatataccctggtaccaacgacccccataccatgcaaataccataatcatgacctaaaatgtcgacagtggcgcgccaggtaggggaattttggtgctccaaggttttgacgagatgggttcaagagatggattctctgacaacaaactagtcgacgacttcggttgccttcaggtggtcgagagatgcctactcctggttttcgaccagtcggttgtagtgatttctctccacctattagttctctttaggtgattcagagatgcctcctcctagttttcgaccagtcggttgtagcgatttcttgccacctatcagttctcttcaggtgattgagagatgcctactcctggttttcgaccagtcggttgtagcgatttctcgccatctatcagttgtctataggtgatcgagagattcctactcctggttgtcgactagtcggtcatagcaatcttccgccacctatcactcaacttctattagtctagacgatgactacaactggtctttcgaccagtgacgtagcggtcctcgcacctcaactcctagtggttgaggtatgattacagctggtcttcgatcatcagcggcgtagcgattctcccactacctctatgatttattgaatacaactacacactcggtcttcgccttgtgtggtagtgacctcatcaacccatttgcgtcaaattctgtaagtgtttgtatgtgcaatatttttccgttgatccccttttcttatatcgccctatcttgaagtcgtcctattattcctttacgctattctaaatgcatattaactaagccgtgtaatcgggaattggctttcccaacttcatggctaggggctaggattttgttagcttcaacttggtttgttataagatttaagctgcctttgtggaaaaatgacttttccataaagacaggtgagggctaggaagtgtaccatactccaattattgagtacagctttagctagaatactcttttattgtcacatgcaaattcaatttattttcaattttcaaattcatattatatcgtgttacccttgagcgttcgctcgggggctatttgtatctaacaatttgttttgagttttgatttcaggaatgtcagacttcagggctttgtcgcggactttataactactcgattactcgagaatggttggtggagttcgacaaggattacggaataaagtaacgctgtacccgctgagacaaaattttctgacttcaatccaaattcttgattacggcaagataaggaattaagtcacattctcctcacctcctcggttgtccgagaatggttaagcgagcacaaaaactgatattccaaggtcttcggttgagaacatcaagtcgatcatttgcattgaagtcggaggcttctatcagggttatgaatagcacatatccaatagtaatcgactaagctcagcagggcccaccatataccaaatcttatatggaatcgtacctcgtatatagaaggagttccggataaggtaggacaaatagagttcaagttggaaacgataaggactactcggattgtatccatatttatctccctagttctacttggacaaggggacatctatgggtatgaatacaagaccccctaggaggagaggggacacataagccagaacaaaccaatattccgccaaacatcgacatcagatattagcctagacagatccaatctggtgcctgcggaggctgataagggggatctagcgccacctctgatctcgatgagttcgtacttgaggaggaagactgccctgtcgtcgactatgtgttggtgatccataccgccaagtcaacgacagctagataggttatcccaattattgtacttgtgtgattcagatgaacaaagagcaataccagcttcggccaacaggagtagggtcgttaccttcctgtgaaggggcctgaacctgtataaaaatccttgtctctgactcttttacctcaatctcgcatatactctacctcaatctcgcatatactttagtaccaacgatccccatgtcatgcaaataccgtagtcatgacttaaaacgtcgacaacatcaaaccagtagcaacaaccccaccggagatgatttgaaagaacggcgccacttcatcgttgtggaggaagaagagttcccaccacaaggcaaatctgtttgacatgtggatccaaacaccagtacaaacctccatagcaaccctgcgaacagcacaaagctccgtttaacttctttcgagttgtatacaaaaggggaagaagaaaacctagaacgagataaactcgatatataggctgcgttctttcccacccccaacagtgctcacggaaaacggagcgatccattagcacatgattaattaagtatctgctattttttttaaaaaaaatggactaatatgatttttttaagtaactttcgtatagaaactttttacaaaaaaatacaccgtttagtagtttgaaaagcgtgctaacggaaaacgaggagtaatagcctgaaaagaacgcagccataatgggtataaacccgatagcacttggcaaaccgtgacataatataatgcatgtagctctaggccaaccacgtcataaaaatgataccaaattacacctgacttctatggagaaaaaaccagttttagagaagtcatgaaagcatgctattggccagttttaaaaattactgtgcatagcaatgaattttaataaaaaagttcttttttgcagcgagcaaaggaattttgaaggtattaggttaacacagtgcatatatcacaaaaatgagtatgcttaagtccctataagacatacagctccaccacacctgaaaacttaagcgtgtagcatgcattttaatctactctcgagtgacaaatctcccggatggtgtagactaagtgcatcttatccg

SEQ ID NO: 26078 - DNA, 2173 bp, Oryza sativa
ttggagttatggggaacctacagagatgctgagtccaaaaattcagagaattttgggcatgatatcggtgaaagcagtggtgcttatattgtgaggataccttttggaccaagagataaatatatccccaaagagcatctctggccccacatccaggaatttgttgacggtgcacttgtccatatcatgcagatgtccaaggttcttggagaacaagttggcagtggacagctagtatggcctgttgttatccatggacactatgccgatgcaggtgactctgctgctttgctatctggggcactcaatgtcccaatgatattcacaggtcattctcttggcagagacaagttggagcaacttttgaagcaagggcgtcaaaccagggatgaaataaatacaatatacaagataatgcgtcgaattgaggctgaggaactttgtcttgatgcatctgaaatcataattacaagcactagacaagagatagaacaacaatggggattatatgatggttttgatttaaccatggcaaggaaacttagagcaagaataaagcgtggtgtgagctgctacggtcgctacatgcctcgtatgattgtaagtacatctgcatcaactcttttcagtttgaatgcagttcattgctttaacaataacatttctgatgtttattgttttattaaattattaggcagttcctcctggcatggagtttagccatatagtgcctcatgatgttgatcaggatggtgaagaagctaatgaagatggttcaggttcaacagatccacctatttgggctgatgtgcgtggttcctttatattctacaataggatatctaggaataactttggtgatgtgccacatgagatccttgctatatttactcgctatcttgtttgaaatattttcagataatgcgattcttctccaaccctcgcaagcccatgattctagctcttgctcgtccagatcctaagaagaacatcactacactggtcaaggcatttggtgaacatcgtgaattgagaaatttagcaaaccttgtgcgtgagcttgtctaatgtggtttgcctagttgccctcattcttatttttctcattatctagtggtctagttagtaatgaagcttctatgtcctttctaggtgatcattctttttgtagtattttttatactctctagatgatgcttgttctcttcatttattttttctgcagacacttatcatgggtaaccgtgatgttattgatgaaatgtcaagcacaaattcagctgttttgacatcaatactcaagttaattgacaagtatgatctatatggccaagtggcataccccaagcaccataagcaatctgaagttccagatatttatcgtttagcggcaagaacaaaggtagtcaaatattatatcttcatatgttgaaatgtttcatatggtttctgcaataagtattctagtggactcttgacatgtggttcttgagattagttgtatggtgatccagataagtgttgacaataggatttatgatgagccatatgcattgatagttacataattgtcattttggatatttgcttccttttacctatcccagttttactttcagcaaggaactgattatgctgcttctatgcttctttatgccagcctcaatcacatcttcatgtttgaactaattattgtttgaatcttatcaatttcagggggtgtttatcaattgtgcttttatcgagccatttggactaaccttgattgaggttatgtactgctgtgggatttcctgttgttgctcaactttatatgtgaattaatatgcttatgcaatcttaacatcttgttggttggcaggctgctgcttatggtctaccaatggttgctactcgaaatggtgggcccgttgatatacatcgggtactgtggcccaatccttattatacatttttgctgaaactaaatgctccagttgttggtgtcatacatatttctcttattctgatcatgtttgtttgttcaggttcttgacaatggtattctcgttgatccccacaatcaaaatgaaatagctgaggcactttataagcttgtttctgataagcagttgtgggcacagtgccgccaaaatggtctgaaaaatattcatcaattttcttggcctgaaca

SEQ ID NO: 26079 - DNA, 875 bp, Oryza sativa
tacctcctgtgaaagagcttaggaagacaatgagaattctagcactgcgctgtcatgttttgtacaggcatgatggtagcaagttgaatgttattcctgttttagcatcacgatcgcaggctctaaggtcgactttttttgttcaactgctcttccattttttctcctcatgttgccatgttcctcattggagcaaaatattatactcagttttccactaaataaagtttacatataattttcattccgcaaagtaaacaagtaaagacttagataacatatattttttattgctatatttggtcatatatactcccatcaatatttatttttgtgagtgttaacatcatatactcagtttccaattctaaagtttgatcactgtctttcctgataataaatccataaaaattaaatgtataactacatgaacgtatttttatgaaaatgtactaatcatttttttcatgtataaaatctaacctttttgcatatagtagcaagttaagattttgaggattagcctaaagagcgaaaattaatcttagtggaaatctgtcacaaacaatattttgtttgttcttgtaagagcatgtattgtagtcccgtctgaacatgcaagccattattgacttttcatggtccccaatcaaagactttgacaaaagttctgaattgtgctttaccagtaaaaataataggattttgctagacaattttagtactatttgttctcatatactccctccgtttcaggttgtaagacattttgactttggtcaaagttaaactgctttaagtttgaccacgtttatagaaaaaagtagtaacattttcaacccaagataaatttattttgaaaatatattcaatta

SEQ ID NO: 26080 - DNA, 1089 bp, Oryza sativa
cttggatatacgttgtatactgatatggtataccagtgcgtatacggatagtttctgtatgcgttaaggaaatctatcacgaaatagatacagaatccacggatggaaggagttctactcggacaagactaggtttttgccataccgtgtggggtccgatatcttcgagtccaacttagagatcaactgacccgcggtataaaagggaccccctgggcaggacctaaggcattgaatctcaccgccaacacatccaccacagcctacgaagccagagcttacaggagccaagtcgccgggtgatctagtcgaaccaactcgactacggtctcgtcggtatcatcgagttccattattccctttgtaatctttaatttccatcacataatcccataccaactggattagggctattacctatcaaggggcctgaaccagtataatccttatctttcgtttgcttgatgtcgtattacgtagatcctcgttccaacgtaccccaatactctctatatccggtctacgggtatcccccgtcgacagtggcgcgctaggtaggggggcttggtgctcaaggttctactactatgacttcaagccttctcgacgacaacgccaaccccggcatcaaccaaggatcttcgacctcaacgatactggtgtggacccaagtcggcgaaatcgttttcccggtctataccacgatgccgatctcgactggcccagcaatggccggaagtgagagtgacgtggttacgaccttgacagactccatgtcgaaggatcctcccgcagaagcggaaaacggaacatcgacaacgtctgagcccgagaaggatcctaatgcgacccaatcttgtccctccgacaagaagtacgagccgacaaggacaacttccgaggcgacaaggtcctagtgtcctattcacaaaacaaggaaacacaccttgcaagcttgctgggttcttctcaacgtacaagccgaaatccgtgcctgcagagagcgcggaattcaacgtatttctccaacccgtgatgtctattgtcctatccacaagacgaagaatcatgacctctcaagctacaagg

SEQ ID NO: 26081 - DNA, 1626 bp, Oryza sativa
gaaccgagtaactcatcgtcatcgtcatcatcctcatcatcttcgtcatcagacagacatccacggaggacatatgatcgccgacaacccaccgcccccggcggcggatgcagggctttcagtcgtgctctacgagatgtccgatggcctgagagatttcgaccgggagcgatagagaagtacgatggaagcaccgaccctaaggagttccttcaggtctactccacatactctacgctgccggagcagacgacaacgcattggcaaagtatttgccggcggcgttgaaaggatctgcacattcatggctagtccacctcctgccctactcgatttcttcatggacagatctgtggcagcagttcgtcgccaacttccaaggaacatacaagcgccacgcaatcgaggacgacctacacgcgttgacacaaaatccaggcgaatcattgagggactattcggcactttaatgagtgcagaaatacgatccccgagatcactgatgcttctgtaatccatgcattcaagtctggcgtccgagatcgctacaccacccaggagttggcgacaagacggatcacaactgctcgtaagctattcgagattgtcgatcgatgcgctcacgcggacgacgccctgagacgcaagaacgacaagccgaagacggggggagagaagaaatcagccaaggatgcacctgagtcaagcaaaaagaatagtcgcaggagtgggaaacggaaagctcaaacagaggtcctcgctgcagaatatgcggacccacccaaacacccagactcacaaggcgacgatacgaagaaaatatggtgccctatacacaagtcggacaagcactccttggagagttgtttcgtcttcaaaaaggcgctcgcgaagcaactggcgttggagaagggcaagagagtacgtgtagtcgagaaggccgctgaagcagctactcaggactcagactcagcatacccagactccgacctccatgtttcacacatcttcggaggttccacggcgtactcctcaaagcgagagtacaagaaagtggagcgtgaagtttgttcaacatggcagggggctgcacccacaatgaagtggtcagagcagaagatcgagttctcagaggccgaccaccccaagaccgctgtcatcccagggcgatatccgatcgtggtcgagcccactattcggaatatcaaagccgcacaggttctaatcgacggcagcagctccattaacctactcatcgccaacaccttggacgcaatggggatcccacgaagcgagttgacgcccaccgatcagcccttccacggaatcactcctcagtcatcgtccaagccattgggcaagattacgctgcctgtgactttcggccaagcaaacaacttcctaacagagcagatcacctttgatgttgctgagttcgacacagcatataacgccatcatcgggaggactgcactcgcgaagttcatggccgcatctcactacacgtatcaagtactcaagatgcctggactgaagggaacaatcactattcaagggaatgcgatgctagcggtacagtgcgacaagcggagcctcgacatggttgagcacacccccaacccaccc

SEQ ID NO: 26082 - DNA, 1899 bp, Oryza sativa
tgagcgacccaagaaagtgagcaaaacaaacaagacgccgaagccagatggtgcaaccaagatcgttccactctccagcgccaaccctgacaagactgtcaagatcggggcgtcactggatgagaaataggaactcgcgctcatcaccttccaacacgacaatgcagacgtattcgcttggcagccgtccgacatgccgggggtccccagggaggtgattaagcacaaactcatggtgcgacctgatgccaagcctgtaaaacaaaaactgcggagatttgcaccagaccggaaacaagccatacgagaagagctcgacaagcttctcaaagctggtttcatcagagacgttctccatccagagtggctagccaatccggtcatggtgcacaaggccaacgggaaatggaggatgtgtgttgacttcaccgaccttaacaaggcgtgtcctaaggatcactttcctcttcctcgaatagaccaattggtggactcaacagccggttgtgagttgttaagctttcttgacgcttactccggctaccaccagatcagcatggtaaaagaggacgaggagaagagagcattcatcatgtcgtttggtgtattctgctacattaagatgccgtttggactaataacgcaggaaatactttccaacgcacggtccaaggggcacataacgattagctcgggaacaatgtcgaggcctacgtcgacgacattgttgtcaagaccaagacaagcgactcattaatcgatgatcttcgggaaacgttcgacaacctccgaagataacgccttatgctcaatccaaagaagtgcacgttcggagtaccatcgggcaagctactcggattcctcatctctggaagagggatcgaagcaaaccccgagaagatcaaggcaatcgagaacatgaagtcgcccacaagactcaaggaagtccagaagctaactggatgcatgacggcattgagcagattcgtcgctaggatgggagaacgaggacaaccctttttgctctgctgaagaaacaagacaaatttgtgtggacacaggaagccgaagatgcattcatcgcactcaaatgctacctgtcaaatccccctgtacttgttgccccccaacctaatgaagaattattccattatattgccgccacaccatattctgtgagcgtcattattgtcgagagagaaaaggtgcaaagactagtttattacgtcagcgaagctctccacgacgcaaagacaagatacccacagatccaaaagctgctttatgcagtaatcatgacatcaagaaagctacgccactacttccaagcacacagagtcacagttgtttcctccttccctcttggtgaagtcgtgagaaacaaagtcgttgtcagccgcatcgcgaaatgggtagtcgagctaagccaatttgaagttcactttgtgccacaaacagccatcaagtcccaggtcttcgccgatttcgtagctgactagactatgcctgacaacaggtcagacggtcagaccgacaacgagacatggacaatggcgttcgacggcgcactcaatagccaaggagcaggggcagggttcatcttgacgtcaccttcgggagatcagttcaagcatgcaattcacctcaacttcagggcaaccaacaacatagccgagttcgaaggactactcgctgggataagagcagcaatcgcactaggagtcaagcgactaatcgtgaaaggggattccgaactagtcgcaaaccaagtgcacaaagattacaagtgctctagccctgagttatccaagtacctcgcagaagtcagcaagctagaaaaaaggtttgacgggatcgaggtctgacacgtataccgcaaggacaacaccaaaccagacg

SEQ ID NO: 26083 - DNA, 4627 bp, Oryza sativa
caagcatgcaattcacctcaacttcagggcaaccaacaacatagccgagttcgaaggactactcgctgggataagagcagcaatcgcactaggagtcaagcgactaatcgtgaaaggggattccgaactagtcgcaaaccaagtgcacaaagattacaagtgctctagccctgagttatccaagtacctcgcagaagtcagcaagctagaaaaaaggtttgacgggatcgaggtctgacacgtataccgcaaggacaacaccaaaccagacgacctagcatggcgtgcatccagacgagagccactcgaacaccttcctgggcgtcctgacgaagccatcggtgaaagcggcaaatgacgaagatagcacagtcgtccccgacatcggctcaggggctacagaggcagaacgcgctgttgccgacatcgagaccacagacgactggaggaccccactcatcaagttccttagtagtgacgagttgcccgagaacgatgcagaagccgagaaaataacccgacaagccaagatttactatatgatcggcaacgatctatacaagaaggcgccaaatggggtactcctcaaatgcatctcgttcgacgacggcaaacatctcctcctcgacatacatgaagggatctgcgggtcacacgccgccggtcggacattagtcgagaaagtcttccgacaagggtttttctggccgaccgcgctcaaaggcgcttgcgacatggttcagcggtgtgaagcctgccaattcctcagcaagcatacaaggctaccagcgcaagcgctacagactatccctcttatttggccattctcgtgctgcgggctcgacatactcgaaccattcccacgaggacagggtggctacaggttcctattcgtagcgatcgacaagttcaccaagtggattgaagcgacgcccacgggggaaatcaaggccgacaacgccattaagtttatcaaagggatattctacagatatggattgcctcaccgcatcataacagataacggctcccagttcatcagtgccgacttccaggattactgcatcggattgggagtcaagatctaatttgcctcagtttctcaccctcagagcaatggacaggtcgagagggcaaacggcatagtactacaagggatcaagacctgtgtctacgacagactcatgtcacacggcaagaagtgggtcgaagaactcccctccgtcctatgggccgtgcgtaccacaccgacaacgtccaacaaggagacaccattcttcctcgtgtatggctcagaagctatgctcctcacggagctacgacatcatagcacacgagtacagtactccgacgaggaccaagaggagcagcgaagcgacgatgtgaatctactcgaggaacatcgagaaagagttgccatcagagcagccagctaccaacaggctcttcgctgataccacgagaagcgcatcagagcacgcacacttttgatcggcgattatgtcctccgacgcgttcaaagccaagcagggcgcaacaagctctcacctaagtgggaaggaccatacacgatcacgcaagtcttgcggctaggtgcattcaagattgcagacggcgatggtcgcgagttagcaaattcctggaacattgatcaattaggtaaattgtcacgtccggaatttctatccaaaatttcaaacgcttacatgtgtgtaaaccctcgtccaggaatcagtcgaggcacacaataacaaattgataatagagtgcaattattactctaattaataagcgaatataaagtcattacagaggtagatagttcctctcaaacaataaagttctaagcagcggaaaataagataaacggcgcagacgactccatcccacaagaagcttgaccagagctacgcctaatcctccacaccatcagcatcaatgtagaactcctcctctgatgaatgattgcaaggtgagtatatgacatactcagcaagccacgcaacaaatatgcaaatgcaagggataacaaaggatggcataatatagtctcattttcataaacggcatttaataaatatttcagaatttaataaaacagtaaggtattaattaaacaatattaatccaacactatacaacatacccgttgcataggaccaaccattctgaacaaccattcccggctgcacagttctatctccaaaccaggaatgtaccattccaaaccaggagctaaacaaattattaccaaatacagcagcgcttattatggtgagaggtgtgaaactaatcacgaacgacattgttagacccgcccataaccgcgggcacgactattcgaatagttttactctggccagaggtgtaccactgtacccacaagacacaacctagcgacccccgtgggcttatcttcgccacttcacagtctggtgctctacaatgaactatattatacagaaagtaaaaccgttgcccacgttggctcgtggttggcacggttaatgtttcacaaccgaaaatcgtgaaccggtccttaattgtcatgagcacgaccatcaaaaccatgtactcacaaccaaccattatcaggttttagttggcaaattgattaattaaccaatcacgatcaaccatcgtgagctaccattaagccatcattaaataatagtgaatcataagtatcccatttatatgagctagtgtctctaagcatggctaagcatcctaaacactttagctaaaaccatataatgttcaagctaatccaattattaaccaagtgacaaagaataggtaatcaatagcaaaagggctgtaacaaaaacaataggttattcccacccaatgacattcaaaaataaatacaatagttgaatagaaacaatagctttaaacgggatcaacatgctcaaagggttgtttgggatctgtgtgacttgccttgctggctttggaactcttcaaagtcttctcctgcaaattcggactctccgggaacgttgtaatcaaagcagaaaagaacaaaatcaccaaaacagcacataaacaatcatgaacagtacatgtggatatttttaacatgtagatctcaattttagaaaaatttagagacttgaaccaactaaatccgagctaagatgaattagttatgaatttttaaagattaaatcggattaaatcatttatatggattttaattgaattatgacgcaataaagaattatttttgaaaaggaaaaaggatttattgcgtcagcggctcgggttttcggtggaccgggtgcacggcgacggtctacagaacgaacggccgagatcgatctaatccaaaacgaacggccgagatcgacttgatctaccgcgggtctacggctaacgtcagcgctgacgtcggcgatgacgtcatcaccggcggcggctcggccacgcatgctcgctggcgaacgacggcgcggcggcgcaaacggagggcacctacgggtagcgggcgacgcggcgaactcaccgatgacacagacgacggcggacggtcaacggatggcgacgacagcgaggtcgaagcggcggagacgatcgggttgacaacgacagcggtgctctggcgagaaacggcagcgacggaggggttgtcacatcctgattttcgtttcaggatttataaattatttaataaattattaatagaatttatattaaatgttctttaatttacaagtgaagttaaatgtgggaaataaaatttcttaaatctaaagcatggatggatttaatttttattaaattctccatgattaagtcaactctctgaaattttctcggatttttcggagctcaattcttaaatgatacaaagaacagttcagtaattatttgatcattaatgatctaatgataattgttaagagcttttcttgtttaaaatccttaaattataaattgttgtttaaaaggaataattagaaatgattttaaaagcttaaaagagaagatctaatttttaatttgctaaatctcaatataaaattgggctagataaaattttgttaaatactttgcttaattctataattcctagatttttctgggatttatttgagctaaggaagtatttttaataaatggaattgcatttaagaaataatttaaattgaaaaaggtttttaaaagtctgttttggctttgggcagaaagccggcccaaaacctctctccttctctctctcttccctcggcccagtccggcccaggtcgccgccgctctcctctctctctcgctgtcgctgacaggtgggccccacctgtcagtcttgtcttcttcctccggccgccgccgcccgaaaccctagccgagccgcgccgccgtcgctttccaattccgtcgctcctttccatctccggccgaattgatagaggggaaatgatcttctcgatctcctcttccttttctcttatagaaactccggtcaatttcctttggaaataggcggattcgagtttgattcggattcgtttttccccaatctttccttctcgtcgccggccgccgtgggccttcgccgccgcctccttgcacctatataaggacccccgagctctcctctacccgtcacctcccttgcctt

SEQ ID NO: 26084 - DNA, 5799 bp, Oryza sativa
aaaaataattcattattgcgtcataatttaattaaaatctatataagtgttttaatctgatttaatctttaaaaattcataactaattcatcttaactcagtttaatgtggttcaagttgcaaaagttgtataaaataaagatctacatattaaaattttccataaattgaattaaatttatttaattctttttaaatgggctttaaatagatttaatcttgtaaaattcataataaattcatttgaagtcagaatgaggccgttcaagtctcataattcatctaaaattatgatctacatgtttgtttactttttatgtattgtttatttggtttttattagtctttttctttgttttgcgtgttagcttgtcgtttccgttgttgtgaaggttcgcgagtgcgccggaagtattcaagaagattaattgaagaccgattattgcaaggcaagtcacacagatcctaaacacaatcctttgagcatgttgatcctatatttaaattctctatttatttcaactgtgcatttattttcgaatgtcactgggtggtgtgaatctattcctttgttatggcctgtttgcattgattactttaatccttgataccttgggttattataatttgactagttgagctttatatattggttcagctagatattagatgtgattgcttagccatgcttagaaacattagcacactattgggataacttatgattcattattatttaatgatggtttaatgatagttcacgatggttaatcgtgattggttaattaattacttgccaactaaaacttgataatggtgggttgtgagcacatggttttgagagtcgtgctcatgacaattaaggaccggttcgctagctactattgtgaaacattaaccgtgccaaccacaagccagcgtgggcaacggctttaccttttgtatagcatgattcattgcggagcaccagactgagaagtggcggagataagcccacgggggtcgctggggagtccatgccttgttttataagggggtgattatgatccaggaatggtgcactgtggtgagttgtgttgtgcagagggtattgtcacagcctctattcgggtactttccagtatcgcgacgcatggtagacatgatgttgaggctgtgtcttgtgggtacagtggtacacctctggccagagtaaaactattcgaatagccgtgcccgcggttatgggcgagttgagcaatgtttttcgtgattagtcccacacctctcaccataattatagatgttataactggtaataatttgcttagctcctggtttggagttagatctgtacagccgggtatggtttgttcaggatggttgggcctgtacagcatgggtgtgctgttcagtgttgattaaaatttctgattaattactctactgttttactactcttaactctttgctaaatgctgctttcgcaaatgagcctatattatgccatcctttggtatccttgtgcacttgcatatttgctgtgtggcttgctgagtatgtcatatgctcaccttgcaataatcaatcaacctcagttgaagaaaaaggatccagaaggagaagacgtttggcttataccccagttgagctgcctgtgggagtggagccggagcttcgctagattttattttccgctgcagttttcttcatggtgaggactaagtgcctcttaagtaagtatttatccttttagttaatttgatgaatctgtatattaaattgtcagtttgtgtacctcggctgattcctggacgaggattttatgcacaaataaattcggaaattactagtgaatttccgggcgtgacaggggtggacgaggacggcgacgacttggcgatcccgacggtggccttccagagcgacgacgacgaccggagcggcggcggcgcacggctgaactcgcggcggcgacggcgatgcaagggctaacgcggaggcggcgctacaggcggcggcgagctgaggcgagggtggcggcggatagaagaggtcccgggggtccttttataggggctaggcggcggcgatggaggtccacggcggtcggcgacgagaaggaaaggttagggttagaggagagagacgaatacgaatcaaactcgaatccgacgatttccaaacaaaattagacgaagtttctataagagaaaagatagaggagatcaaggggatcatttcccctctaccaatttgaccggatcgggaaagacgcggccgaatttggaaggggctgcggcggcgcgaggaggaagacggccctgacaggtgggccccacctgtcagcgggagagagagaggagagcggcggctgcgcactgacttgggctggggagagagagagagagggttttgggccgactttcggcccaaagccaaaacagggacttttaaaacctttttcaatttaaattattcatgaaatgcaattccatttattaaaaatacttccttggctcaaataaagcccagaaaaatctaggaactatagagtcaaatgaagtatttaataaaattttatctagtacacttttatattggaatttagtatttaaaattagatcttttcttctaggcttttaaaatcatttctaataattccaattaaacatcaatttatatatttggggatttttagggtgtgacataaattttatgtataaatcaatagtattcatatttgtaagacatcttacgatttcaataaagttgatttcaggtaaagattacggtcaaagtgttccttcccgacgatcccttaccacgacgacacctagcgttgaaaccaatcctcatgtccctttacgctgtcttgacaaggcctctgaggaacctaagggaacttcggctacggacgccctgagcggataaggccttgtcggatcatgtagaaacaaacgaccatgtaagatctggtcatgtaagagttctcgccgtgcgtattaaccaagccgtgtaatcggaaattgagttttccaacttcacggctgggggctagggtcagtgctttttcaaccaaggcaggtcaagggtccaagagctttatcctccgagaacgtttctccgacgacaaggctgggggctagggagagtgtatgactcaagtgactgatcaaagtcgcaaaatgagaaaacactcatacacaacatatccagagtaagagaacttagctagatagatttcttttctatttcacaagtacctcttacaatttgtaaatattccaaaatatattacatgtttccttgagatattttctacaggacacaaagactaccaggacggccaacgccaatccatggactgaaagaccttctcggcaagcggcgccatcgactgcgccagttggtcaatctctgcgggagtcctccgagaacgcgagaacccttcatggaggaactcgagctgcagctgcgggcggtgatctcggatacaggccagcacatgccctccggcatagtggctcgaccgacgacactcctgcttcagggcctcgtcgatgcgcttgccgatcccttcgagctatgtgcaggccccattcaaccatgagatgtacccggccaccgactcctcgggattcccgcgaggaactcggagctccctacagactccagccattgccatgcagcagctcctgagttacgaattgaaccatacctcgcgacctcggagggcttccacagcctggtctttcttcactcccgtcaaggtcttctcgagttcggccacctcaaacttcgtcttccagtattggattcgacgatttcggtcggccaacgcactctcgaggtctgcccagcatggaaaggactgagtcaagttgttcttgtctcccgagaacacagcaaacttagtcaatccgaacaaaagagtgaaggaagtaaagccaaaaatgcaaacctaaggacgtcatcgccgtgttcgtctccacggacagtctttgcgacatcctcctgctgcacgtacgtctcaagtgcaagtgccgggacgaccaccggcatctcaggctgcccgtgctgctggacatcctcgatgtcgacatctctacaacgacaacaaagtgctcggaatcacatgctaagaaaacaaaggaaacaactgcatacataaaagcagttcgaacccgcagaagtttttacagcatgtttgttaaggggtacaaggcaaacagaatcctactcttcaaaaagggggagaacatactcccccaagtcactgacttcctccatcacgcccttgcgcgtgtcatcggcagccccccgatccagagcccttttgaggtcaaggtcgggataggccagcttcacgcatgcgaggacgtggcacgccccagtgtagatcccgttggacgtctcctcgccgatcctggttgcatgcttgaaggggatctcctccatcgccgtagccagctccacaagcgaggacgtcagcgagaactcgtcggggttcgccgggatggtgatcgtgacgccgcactccccagcaagctggtgtaggctggtgtaagatacccgcaaccagccgcggatctctgacaagttgttcttgagctccgacatccggtgctcgagtccttgtcgctgcctttcgttgccagccaccagctccctcatcttcaggaggtcctcacgggcctccaccaggtctcgtgctggcttgtcggcgcgttggttagccgacgacgctgccgccctggcctcctcgatctcggcctggagctccccccaggtgagggcattagcaggcgggccccgagtgggcacaaggccgccggcggggccgcttggcgtcccctcccgatccctagtcacgaccacgacatcagtcgaggctactacaggggacgcgctggaggccgccccggacccatcctgcgccgccttcgcccgcgccgccctgcaaagaatttccactctttcataaaatcaggcgatcaaggtttcatgaatgaaaagacttcggaaacatctacttacttcttgtcgatcgtcaccagcctctgtcttcgctgaggcgggggagacgcgtccgaggcctaagcaagataacatcgtgtgaggtcaaaacattccgactacgcgctaaagaaaaccagagaggcctaccgacggattaggcgccttccgacgggtcccgagtacaaaggagaattttcctccccttcttcggaacgttgctgccgcttgtggtagcagcagcagcaacgtcgaacgccttattcgcgacgccctcttcgcgacgccctctttcaatgacgctgctgcctgatgatccgcaagcggcccgatgacatctgtcaaagggatagcctgcgtaacatgaagtcacaatgcgatcctggaagaaaaagataaaggagtcattgagtacactcacgttgatcgcggcttcgtgttcggccggacccttctcgcaaagagggacggggatgtcgctcgccatcgcagggccactgatcatcacctggccgacgcggcgtgccacggtgtcgctatccaaacctgtagatcgagaacaggaactcgataagtcaggggaaacaggcacatccggaacaaaatctggattacaagaaaaataccccgaggagaaacccgggtcgcgtcctccggcccagagtagtcaaaggccgggtgggcagcgactttgtaccccgacaacccccgtactcggaggtcatcgatgatgtcgatgaaagattggagggagggagtcaggtcgggtttggcggtccactcaaggatcttgtctggttg

SEQ ID NO: 26085 - DNA, 1227 bp, Oryza sativa
taaggcatcgaatctcaccgccaacacatccaccacagcctacgaagccggagcttacaggagccaagtcaccgggtgatctagtcgaaccaactcgactacggtctcgtcggtatcatcgagttctattattccctttgtaatctgtgatttccatcatataatcccatacaaaccggattagaggtattacctatcaaggggcctgaaccagtataatccttgtctttcgtttgcttgatatcgtattacgtagatcctcgttccaacgtaccccaataccctctatattttcacaattacattactctactctatgcaatgtaattgtgaaaatatactcatgtgttgctaccagataaaaatgcctaaagttaaattgatcgacacatctaaatcgtggcatatcaaaattatatttttcttatatttttcttgtactctatctatggttgtcctcattgggagcccaaatttgattatagctataatgatttattagcgatcaaaatatattttacagataaaacatttatatatgtgttcttagtgaattaaaaaacaatgctgaaaaccaaactacataaagaaaactttaaacttatgttttaaaaattaaattaaaattcaaaattatattagagaaaatattttttccatttatcaattgcatttgaggtcaaatatctagatatagacagtgaaaataaatagaagtagagcagatagggaaggaaaaagatctgaaattcgatgtgacaggaacttaaaatttaaattttaaaatttaaattttaggctgagtttagttccaaaatttttcttcaaacttccaactttttcatcacatcaaaactttcctacacacataaactttcaatttttccgtcgcatcgttccaatttcaaccaaacttttaattttaacgttaactaaacacacccttagtactggatccaaacatcacattactcctgtttagtgagcataattttgtaaagaggatggatccatatatactcgtatggtagtaggcttgtttgatcaaaccgatgcgacgcagagagagagaggttgggaagcacaacaagcaactgatccaccgatccatactcagccttatctcttcatcggttcatccggtgcctgttgtctctttcttctctctcacatacagtctctctcctcttgttttttcttcttctctcctcagcggcaggcgccctc

SEQ ID NO: 26086 - DNA, 1084 bp, Oryza sativa
ctcctgtaagctccggcttcgtaggctgtggtggatgtgttggcggtgagattcgatgccttaggtcctgcccagggggtcccttttatatcgtgggtcagttgatctccaagtaggactcgaagatatcgaaccccacacggtatggcaaaaacccagtcttgtccgagtagaactccttccatccgtggattctgtatctattacatgatagatttccttaacgcatacagaaactatccgtatacgcgctggtataccatatcagtatacaacgtatatccaaggacgtagggtataccttatccgtaaccctggcagtagcccttgacttctgcttatatgaactcatgcaaccgatcacgacttctgttgtcggaatcgttgtcgttctcatctggtcgatctcggtgtgagaactgtagagacaaagagttatcgacaacatcgtacgaagttcaacggtcatgagtgaatttaaattgaagtcaacccagaattttccgacggcaatctctctcctttccttggaatacgcaccgtcggtagtgggcttatttaaaggagttttggggatccattttgaagtccgtttgccacataactctccagtcttcaagcacccttcgtcttctccgctcccgcagagaaaaccctagcttgcctctttcactttgctttgttccccggcgatcctccagcgacgatggatctcgacaagtccacctccaccacagcgtccctgaagaagttgcaggacgacgacaccctccctgctcgcgggaccatgcagagggagataggaggtactgaactcgaacccatcttgggcagtatggttgcggtcgaagattacatttcttgtggttttcttcctccgccttccgaatttcttcttctcgtcttgaacttctatggtctttccttgcttcagctgaaccccaattcaatcgcattccttagcattttctcctatctttgtgaggcctacattggggtagagcctttccttgatcttttctatttttattatgagttgcgctggatggaacccaaaaaggtatccggatgtatcggattccga

SEQ ID NO: 26087 - DNA, 4692 bp, Oryza sativa
  unsure (1)..(4692): unsure at all n locations
ataaggcacaactacttcttaaagttgtttcataatataagagcaggtacaatagcagactattagccagctgcaaatatattttaatgagataaaacatgagagagaagagcagcgggctacagatctgtagccagctgcagcacggactctaagacgcaatgtgtgtatgccatatgggaccatatattaatagtatagtaagcaactattgtatgaattggcttttagattggctatatatggattggagccagtagtgggctatactattaaacttgctctaaggcatgcatgtcattagctagcacctcttttttactaaaatattattatttaaatcctacaccataagatctctaattttattgggtgcatgctttctatttattaaggtaacccaatctatgagatgataataattatttcttggtctttgggttaagagtggttgtgccttatattttagaatggagggagtaggtcttagacttttggaacaagggagtattatattagggattacatcgagatgctgatcaaagccaagagtgttttgatttttgaagcgtaaaaatgttatttactctgttcttcttctctttttttcttctttttttgcatcaatgaagggcaaatgtatagctcgaagtgatactcaggacgataacactgacccgagcaatagcgatagccatggcctgaacgacctgcctgccaaggttcgccgctaatctcttcatcccaagcaaaagcttactaaatcgattctagaagtaatcctgtcacgacctttttttttttttttttttttttttttgcatagcagctgcccttgcaggatttgggacgtcatcttgccgaacgatgcgcgcagctgttggatgaggctatgagagaaatcaaaattttaactcaggaaacgcaagaagtcatgcaggcattggcctcgaaacacagtgaggaattcaccctcgttatttcagatgtaatggaagccatccaggcagagcacgctcaagtgaatgctcgattacatcgtggaatcaaagatgcggatgctgccgatgtgcaggcagcagcaaagcgaaaagctgcatgactacacggtaagctcacacattaacagtatgtttactagcagtaccatttttcgttgggcctatcagtgaccatttggttccattagtaaaggttataatatattttcaaagtgaaaaacacttacaattcctgtccacccgcatgtcgaagaaggtgccaagactactcgtaaacgaagcaagttgtcacgcgtggcttctgcagccaatagatcccaagcccccgttgatttgagaggtatttcgtttcacatggtgctgcacttttccgtaaaatttgatgatttcacactattcgctaccactttgatggtactaacacttgtgataatgacttatgggaccgactgagtctatggcaataagccaagatgtcaaataagcgaagcccaatttgtaaactgtaaaagaaaatcaaatctcttgcatttttccactgcatatatactcatgacacaaacatttgaatcacattcacaggtgacttgttagggccaagcaactcggaaaatgaagcaagcgagcatatagaccaacaaagctatcaagctgttgaccatgcaaatccgatattgggcatggcccctactgcgcatcaccgtccattgaactcatcagcccaagtgacggcagcagtccaccatgagctggatcaaggttagcttgccaaaaaaagagtaaaaacactgaatacttgaatacttgtgcagtaatgggactatttttttccccacaatgcaggattccaaatgcaagacaaatgtggccttgaatggttggtatcagcagcagctgtgggagaagccaccatgagtacgcatacatgcctcatatccttcaacccaccccacgcatactttagagaatgaaatgcatctgtcgtgttttatgttgcaggagccagtgccacattggatcaaagcaacgatgacaacctcgcggttgtcacgtgccaacgacaaccagaacattgcgagacacagatgacgaaagaggtggcatgtccaaggccagcttgcatgtcaccgttttcaatgcccatacttcacgaatggccaaatgctaaattagctcggaggttgtaccgttggctggagttgaagtcacgtgatgaagatataaccgggtctgtgaaaaacaatctttaaaaatgtgtgaattttcattacaaataaactttgtgttgcttattaattgtttatcctatatgaagggtttggttcaagcacgacaagcctacaccaattgagataagtgccatgaagctcaaaatgcaggtcacccacggtggcaatctatgtatggacctttgttcggcatttatcagactctaccaacagttagatgccaagatgaatacaaacccatctggacagcgttggcgccacttcttcccaccccaatttgcggtacaccaacatccccaacatttgtaaaaacataaatcgtggttaaacaatgatcaaagcttgatgtcttttccccttgattttggttttataaagctttgatgattgagccaaacttcagttccatgaaagaagtcagtgacatgtttgatcaacgtgttaatggctacaaaatacagaactgtcaactggtacagattttcaagacaaaacaagcctttttgtttttattatcaattctccttggatcatcacatatattggctagtgaaacattttatgtggaaactacagctcattgccccagttgaactagctggcggtacatggtcatgctacatttgggacatggagaagaggcaaatgcacattttggaccctgtcttgcagcagcgggagacttacaatgtgagtgctaagcagtaagcaccatcgaacagccacaatgatccacgcaggcctgttaacatgtataaacaaattctatggcggctgggatattaacccaaacgaatggatgttttcgtactacacagggattagcccaaggagccaaaggtgagtggcttctgccaatgccacagaaaaaagagagagattcatcccattacaaatttaaatcattttgctgctgcagtaggaactctggtttttacacattatactactcgcgtgagttccatgatggcaagctgcagagaagtctagattcggtgagcacacggcgttgatacatttccttatgtttttttctccaatttgtgtaacctgaaaataatgattcctcaattctccatcggcagggtagtattactgccttgcgcaaggatcttttgtaccagctcctgactatggaagggaactacgccgagctgccaagtcacattgcgagatacttggaatagttgtaccaagtgtcatgctggtcatttaaccttttgctagtatgtttatggtgcaagtatctaacgagaatttcccaagaaatctcctttatctaaaaaaaaactaggcgtctagataagccagtgttttctgttgataatagtgttgcactgaataaatgtatagcagctaagttgttttagtggttagtaccatttagcagaaacctttttgtatggctcccagcatgttactctttggaggagtatcactgaaagaatgggttttctgagtacctctttaattcagtagttttttttttttgcaaggaattcagtagttaaatttgacagtagaatcatctgcttctctctctctctctctctctttcatttgcagagtatcgactcatccctcacaagtgaaaaaagggaacagtaatgaaagcaagcataagagcaacatttgtgcaagacctgctgatatactactctatcaggagattaataaatcaggatgagcctaagaaatgaatagattcatgggtaaaccctaggatgagcctggtgcatagttgcaaaggtaagtgccctaccaaagaagctgaatgtaatatccatggcagataggcatgcttctggggcaccaagatgtcgtttgctccagtaaggtgcagcagagttgataaggccatggggctttttatgttactgtaactggtacgtatcttcagttacatgacagttgacattttaagttagggacaattgcttctttgaccctattctgaactataactactaatttgaccctacttttttaggtttgctcatttgatcctacttttcaaaattggagttgccgtttggccctggtttcatcacaccgttagggtttcatttaaaaaatagaaaaaaaatgtttttttatgccacaatggaccaaaatacccttgtacacatcaatattctcttatcctctccctctcatctctctcaccggagcttgtctccctctcctctttctcgccggaaatgggagggatggcggcggcggctcgacaaggcggaggacggcggcggcggcggcatgggagggatggcggtggctcgatgaagaggagggtcgggcggcnnnngnncngcnaggcngaggaacggcggntcgncgacgaggaggggcgacggncgaggcnnctaggcgacgganccggcggangggggggcccgcggggaggtagggagcgccgtcagcggcgacgcacggaggaagggagcaccggcgcacggagctgc

SEQ ID NO: 26088 - DNA, 596 bp, Oryza sativa
ccttaaaaaaattaactaagaaaaaaattaagatttataatatgaaacggagggagtagcatcttaaacggatcgagcaatcgatcatgggtgaatcatcagctttgcacagcaaaaaacgatcatagttgcttgcattttattacattttttctcttaacagagggctagtcctgcccagccacgtcccagcacaccactcactaagattttatggctttttcggcccagtaaaaccaacagtattggagaaaaaaactgggcctgtaagctgggccgcggggtggaagcgctagtcgctgcgggccgagctgtacttgagcccgaactcccggaagccgatctccatgtcggcggcggcgacgagcagctcggccgcctgcgccggctcgaggatctccaccgcgcgcttcacggtgcgcagccggagcgcgtcggcgcggccgagcacgccccgcacccggcccactatcccgtcgacgtcgatcccgccgccgacggcgaccgcgccgtggccctcctgcaccagcgccatctcccgcgacagcccgtcctcctcggcgacggtccggcgctggaggtcgtcgatctgcgcc

SEQ ID NO: 26089 - DNA, 1220 bp, Oryza sativa
cagcgacacttgaatttgcttacatggcctgaaatattgcgccagtttggtttatctgctggtcttggaccacagttaaggaaaaggaatgctgaaaatgtcaataatcatgatgataatgaggtatttgtctgttgaaagtgtccaatgcatatgcatttaaattagtttattcctgatagctgcatcataatcatgtgcaatctgtgtagttctgttggaggcaataacttgcacgattgtagattgtattgttgtatcaatatctctggtattttggttcctgagcaattttcgattcagagaaaacgcctactgtttagtcttatagttggctccatagaatcctgaggtacaatggtatttatgcttttgatggaaaattcaaacatagaagctatcagtaccgcgatcctatgatcttgctaggctattttgatcttggtccttccaggattgtagttaggaattacaatataaaataacagcataatcctaaatatttggaatcatagttctcgaggcattggtaggatcatggtcctacgaacaagggattatcctatcttaaatactgaatgtggtccttgaatgaaagtataattggagaaacttttgtaatctgaagcaaaaaagcagattagccacttcacagttttattctctttatggcaagaaataaaattctctcaaccctaacagccctgaacaactcaaaatttgcaaacagggtcgtaatggtgaggatgttatttccatactgagaagtggctcagcagctgtaaatgctgctgctaaaatgaaagaaagaggctacggtaatcgccgcaggtctcgacaccgtctgacacctggaactgtaaagtttgctgcgttccatgtgttgtcacttgaagggagccaaggtctcacgatattggaagttgcagaaaaaatacaggtatgccgaccacatccaaaaaagttcaattgtaacctgttgctatcttattgattttgtttattgatctcttcagaaatctggactgagagaccttacaacaagcaagacacctgaggcatctatatctgctgcactgtcaagggattcaaagcttttcgaaaggactgcaccttcaacatactgtgttaaaactccaaaccaaaaaggtcctggtgattcaaaggctgtgttggcaacagcaagctaaaccattaaggttgtttaagggggttcttta

SEQ ID NO: 26090 - DNA, 4286 bp, Oryza sativa
agagggggacagcaacggctcgccatacatcccaccagtacccattgttagctcgctgtgtggcagtggtggtggcagaacaggaggcggcgccataaccggcacaggaacctcctcctccagctgctgccgcttcggcggtggcttacggtccttcaaccgccggtggcagaaccacatctgcagctgcctgtccgtcagccctaacttcacagacaactccgctctcatcgtctcatttggatacggatcctctgcagcaacacagacaaaaccaagtaagcacagaaatcacagggctgtttcgatcgaaaaatcgacaaatcaaacacgaaatagccctaaaaatttccagaatccccagtcccccataggccatcatccacgaacctgtgtatgtcctctcgagaacctccaactgatagggcgtcttcatcacgcgcttcaccttcccgctggatccagaggcgcctgctccaccaccaacggcggcgggaacgggagcggaagcggaagccggagccggagccggagccgacgccggggcagggctctcctcctccaccccagccggcgcagctcccgctccctcgtcccctccatcgccggacgaatccatccccccacccgatcaatcaaatcgagaatcccaaaccctagattcgccgattccgcccgccgccaacacgatcgattcaacacacaaactccaaaatccagcaaacctaaatcccctcgatatatagcccacgggccaacgacgacccgaaccgaatccggcgacgacctcgatccgcagcagcagcagcaacaacaacaacaaaacgaggggaggagcaagatgatgaggagaaggagggtgcgtgcgagaggggaaagagaccgcggggaagaagaggaatcgaaagaaaagaggaggaggatgaggaggagcaacacgggaggccactccaaacctgttctttcaccgctcgatccggactggtcaggatttggatcgctcgttccatcgtggtgttactactactactctcctaataaaaacccccctttattattcgctgctcctggctggctgcctgactcttctgccgcctctgcttacttccgctgtgtatgttggtgttggtggtgctatcctttttttttctcttcgcgatggggagaggagaggagaggagtccgggagtgtgcgaaggaaagcgaggaaaggtgcggaataatgatgggatgtggctgcgtgggcgctcggattcgctggggttcgctcgatcttgcggcgttggcgagcgaatgagatttgatcatgtatgtgcgcggcgtgtgtgcgcgcgtgttcataggtggcgtagaactgggcgtggatcttctgtggcaacggcggcgtgcgggtgggaggagtttgggagtgtggggccctggttggtggtggggtacttggtgtgcctggcgtgccagttgggttgggtcggattgggaatccagtgaagtatccgcggcctgtggtgtgggtggggggatgtgggccgtgggatttggggcccgtgtggcagtgggattcggggtcaggttgatgagtttggatccgtcgatgtttgtgttctgtaccttcgatgtgatggttaaactgttcttgtgattggacgtgttttgaattgaagactaccactaaaaattttagatccaacgtaaaaaaaacttttacaccccgtcacatcgaacgtttgaacccctgcattaagtattaaatataggctaaaaaataactaattgcacatattgcgattaatttgcaagataaatattttgagcctaattacgccatgatttgacaatgtggtgccacggtaaatatttactaatgatggattaattagacttaataaattcgtctcatggtttactgatggattctgtaattagtttttttattagtgcccgaacaccccttgcgacatcctatataaaatccgatgtgaaacgtcaaaattttacccctggatctaaacacccccctaagagcaaggtcaatagtatagccagctgatggctccactcgtatccatgtcattttatagttgatgttaaagctaatttgtacaacatagtggctattgtgttgactgcatctcatccatcaaaaatttattttatacgcatatattgatatacatgatcgaaagtgaactcaatccctgtggtcgttgttgtgcaatactcaggagtgctatatacataaaaggaaaatacaagtcacagacagcaaatagacgagaagaacaaaagaattaggaagagattagatgacaataactcaaattagaaagctattcgctgctccatcaacgatgagatccgtttgttctgctcgtagatgcatctgccccttcttgacgcgatggccagcagcagcgccagcccgcagttgtcgtcggcgcccgccgctgccgccacgttcacgatctgctgcgccgcgagcgctgcgttcgtcgatgccagcggccgagtcgccaagaagaacgcccttgtcatcgccgccaccacgggcgccgacgacatcaacagacccttcttggtcaggcttttgagcgagattgggctaggcgtccgggtggaagataatcgcaagcggcggccggcgaagacacgccgggaagattgggcggggaatcgacgcggaagacaactgcgaggcgatggctggcaaagatcgatctgcgacactcccgtgaggagagaaacaagatgggctgcggagggggagggaatagcgctgcatgtcacacgggatcggatggctcgccgtgggacccacaaagcgcatgcgaacccgtgctatcgcccagctatagattagtcgctcgctttgttctctcctctctcttccacgtaggaatttgatgagctggatatttttggagcctgctcagtcagcttattgtacctgctctaactctctttctacgaaagcagattgttggatacacgcacatccgtataagtgtatactctacctctaaaaatatttttaaagaataaaccggtatactatatatcttaaacgtgctgggttcgccgccatgccacgttttcaacttttacagaaaacccctcgtcgttttggtatatcggattaggttcagctgatcagagccgttctttcccacgcgtgtatgaaatccagtactccctccgttttttaatatatgacgccgttaactttttctcacatgtttgatcattcgtcttattcaaaaaatttacgtaattataatttattttgttatgagttgttttatcactcatagtactttaagtgtgatttatatcttatacatttgcataaattttttgaataagacgaatggtcaaacagatgagaaaaagtcaacggcgtcatctgttaaaaaacggaggtagcgaaataagtgccttgttatttaccaatgaaaaaatagtagtggtggactgattgagacggggatagtacatgtttcctcggtggaagtcaatacaagaagtcacaatcaaagtcaacagcagtagtatagtacacgatgtcatcataatgcatatgggccatgagaaccgcggtccgaaccccgtcctgctctccccgggccaattctctcgacaatatcatcaataggcccaaccaaaagtatcatcgtccacggcgtgcaaccccgctgcacagcctccgatcgagcgcgacgcgacgagaaaacaccacacacttcccactccacagtccacacacccgctgccctcgcttcacgccttcacggtgccggcgcgagaggacgacgggttggagttggagatcgcgtcactccccggtttgacctgtgacttgtgagcttggtattcctcacaagtttgtcatcatccaagcttgcacgcatttctagtacgaggtaatgctagctaatttcccgcccgtttgcacccacaagttcatcatatcgtcatgccgtactcaaacaaagcgtagattaagttaaacttgtaagcatcgactccttgcgagcccattggggccgtgatcagctttacagtgtgttcgttcgtgtcacaatttaattacatgcaattaatggtccaaagaactaagacgaggatatgcacatataggcgtacgtgcaggcagaattctactaaatattagcgcggcgagagtgggaacccgatgccatggcgtgtggtcgggaagctcacgaacagcatgctcccgacgacgccgatggcgatcggcagcgccgtgagcacctgcctcgtgccctcgg

SEQ ID NO: 26091 - DNA, 1628 bp, Oryza sativa
agtgctttacactacatccatcctcccacccctcatttcatataaaaatcttcaaaccaacatgtgtgatctccatctccatggacctaaccatttgcccaactttggtgctcatttaaaaacccgtgtataaatggaagaattagcaaatatgctttagtttagagaaaatcaaatccacatgtaaattatgcactttacaatacacctttttcaccattaactaaatatcctaaaaggagctggaaatcctaggaggaaaaatacaaaagttatgtaactagaggtttgtgctatagtcatcctcttacattcccattggcttatgtattcatcattagtatagaataataatttgcccaacatttttgtaagtccaaatggaatagacaatagtttagctaagcatagttaaggtgctgctattagagcacaaaaattcagtccacaccactttgctactcaattctcagttactgcttatcaaaatgtcaatgtaaagcacaacatacctctttcacatgcttttcgaggcaacggaagttaatatttgcttcaccatggtaatccatcacatcacttcgtaattctccaattgacctttccagcttatagcaatacagctccaactgtgatagcctcccactgatgacatccagtgtattcaccaagttgtctgcttgtttcttcatgcagctctctatagcttccgttattatttctctggaataagtttcttgttcatggatattaacaagtgacctcagcagccggttgtcctggaaatcctgctttattgaagaaaggaaaatatgctaaggaccagatgttttgagcctatagaatcatggcaaggaaaagaaaaactatatagattttgccaaaagcctagcaaacgtgatttaagctaagaaatataatacgttcatatgtgttgataaagggtgaacatcaccaagttgactccagatcttcatctggttacaacttacaagttacaagaaatgtatattgatagctaacacacccaacgaatgattacttcccggcgtgtttaaatctaaacagcagaagaagcaaattcggaagatgtaacagtagaacgaccaaaaaaatcttaagataacagaagtgatatgtcacgacaacacctaagattgattataaacacgatgagaagtaaatcaaaagtagcatatccgcagcaagcacacaggacaaatccctcaaaaatttgcagctaccgttttgcacaaggaacagtgaaaccctagtcgtaacgaaacacccgcaaatcccacaaatcggccaaaattaagacgaaatctccacatgaaaacgaaaagtgggctgtctcgttcatttctgaaattcaaatcggtcagaacaaatcacatagaacagtgtgcaacctcgcacatcatcgaaatggttgacgagctcgcagatccaccggtacgcacaaacaacagacgagaactcccaacctttccccgcatctccacgaaatcagaagcagacagcaaaaagctgcacccccccccccccccaaggcgagagtcgagccaccggtctcaccaacacacacccagaacgaagcaaaacatcaccgaacacaaagagatctc

SEQ ID NO: 26092 - DNA, 15851 bp, Oryza sativa
ggaagaggagaaaaggaggagtaaaacgtaaagaaaagtggagagtagagacgagttgggtttgttccaagcggggacggaataaatacggagagaaaggaaaagggaaaaagaaaagaaaaagaaaaaggaaaaataggcgggggggtgaaaggctcaaggcgggtggcgggtcagaatccggggcgggtttggcgtgtggtggtggggctcgtgatccgcgcgcagggtcaaatggccgccggccgtgttcgctgcatcccccgtacgcgaggactgtggacgaggaaggacgaggacgcggcgcggccgcttccaccaagtcgccggcgttttccacgatcatggattggaaggtatggatttttttttatttaaaggaaaagaagtcatcagccaaaacgcgggtcagtttgaaatatttgaacgaactgttagtactataatttttctatttattatatagataaataaacttaacaaatgatttgtaataaatggtccaaacaatacagtagagaaaagtatctttttaaaaaaaatgtgtttttttcgaagcgttaaataactaatccatttcaacgaatctagagataatactgccttcgtattttaaataggtgacattgttgacttgaataacgtttgatcatttatcttaaaagttgtacttaaaagttttccaatgataaaacatgttccagcaaaataaattatatgtacatattttttttaataaaacgagctggcaaatgtcacgaaaagtatattaaattttaaaaacaatgagtgtaacaggaccgacgtataggtttgagtggttttctttcttataacgcttaaaagccaaaaaaaaaagtcaatttaaaagcctaaaccaaccagattaagatctcgttcttttctctaacaagagttggatgaatatgaagataaagattttcgtgtcatgtttttcaaactgctaaacggtgtgtctcttacgaaaactttttatatgaaattgctctaaaatatcatattaatctatttttcaactttgtaataattaaaacttaattaataatacgttaataccacctcgttttgcgtaaaaaacttaatcttcgtcttcttaatcttcaggggaaaagaacaccacctaagccaaaacaagatgcagcttagttaccctctgacactatcttccgttttgattcgatgttagtcgtcagtgttgttatctctatctttaacgttgtattataagtagtttttttaattaagccgtaattttacaatttacagtagctataataactggttatagtttatttttgtcagggttatagataccacatacctaatagtagttgactaaatctcgacaggacccaccacataccatgtcctatacgaaaacaacctgcggatataggaagagttccacataaggaaagacaaccagagttctacatggaaacgacaagtactactcggattatatccatattggttttcctagttctacttggacaatgggacacctatgagtataaatacaaggccccctaggaggagaggagacgaccacctcaatcaacacacccaccacagtctacggaacaacagaagatcaacatacaagccaacatacaccaagacaagatgccggatatcgaattcagggataagtacggctagtcccctacggtgtctccggatactgtcaagagagacaaaagcgctgtctctgatctcgccgggtacggattcgaggaggaagactacctgttgtcgactacgagtcagatcttcagaccgccatgttgacaaaagttagataggctaccccaaatattgtactggtgtgattatggtgaataagagcaataccggcttcggccaacaggatgtagggttattacataacaattcagaggcccgaacctgtataaaaattaatgtctccatctcttttacctcaatctcgtatatatcctagtactaacgattccaatactatgcaaataccggaatcgcgatatcaaacgtcgacaatttgaagcatgaatgaaaatgaattttattataaaaatagacactttattgtttgctgattgatttgtaagccgtatccaacattttaaattattatatgtattttttatcatattttattttttggttgtgtattttttattaacccttaagagtagaaacatacaagtaatgttctaaaaatcttttggctcgtttatttcttttaggaggttttaaccggagacccgaagtcaaccaatatgccaaaaaacatcagccgaaaattctaaaaagtttaattaagatctgtagcacccagaaggaaatagaaacaaatgctgtggaacactctagacaagttttgacttgttcctaacattagttacagtactagtacttgcatttttacaattggaaaggctagttggcgaagccaagtcagtagacaaacgtgctttgatctctgcatcgacttgtatacttacgtcattagtactcctattaaacaagtaaaacgtactactcctacttatacatgcgttttaaaaatgaacgccaggcaaatcgcatcggcaagttggaattaatgaaaaccccaatttggcgagtcaaatacgcattacagcttatcaaaagttccaagttgcgtacaatcatagactaagatatcgtaagtacgtgcttaattattccaggattttttttcttcttccgcattctcccctaactaacctagaaacttcgatttcctactactgctggtaagcagtgcagcatccacacatcacaaaaaccacaataataaaaaaaacgatttgaattctcattctaccaccaatccggtggttaataattctggtgtgattgcgaaccgaacgaatcgaacgggaggccacggtggcgtttgtggatagacacgagggaaaaagattccgaccccattgtttatcctactataggacagaggcggaactagggtattgagcgggtgaaacctggtcaagaaaatattatagctataacttattttttaaaattacacagtacaacatatacattcacaacacacgcgcactcatctttataaacgcacgcaggcaaacccatctattttcaccatgtatgcatcactcttaatataaatttagacactcgtatcatcttaaacttgatataaagtagagtaaattaaacaagtggcacctcactttatttcgttctagctccgctagagaaaaaggcaaaacggtatatttacaaatgaaaaataaacacttgtggatataacttttacatacgtgttctcaatgatctaatagtggagactaaaaaataaactatgatgaaaaatttctaaaatcaactttaaaattaaagttaaaaacttaaattttaactgataagtataagtataaatgaaaagatgatgcggttcagtttcatggggacgataccgacgtcacgatgaattggattcttggagctaagagaaaaatgaaaatgatatggccggatcgaagcttaggtttggtgaattgctgacgggtcacgcgccgtccctgccacacgaaatctgtggccgtgcttaattaaatcgggacaaaaaaaatagtactaacaaattaagtggctggtaatgtcccccttgatcgatccctttctgtcaccattggccgcacccgtccaaaacgccggaaaatgacacggaattgaaatgacaggattcgaatccagctcgatcaattcgttttcagaaactctcagaagcaactgattcgtaatatcattcattcattcccttgtgcatttgcattcagttcgtaggaattgagtaatgctttgtgtgtgcgtttgtgattgcgtcggtcggtttcagttcaggtgcccttcgttgaaggtagctcgagtttttttcgtagaagtggccgagggaaatggtcgaggagttgtgcaattagcacgtaatcctcgtacacacggcgtgtgtttaattaggcgtgtggataattagcggtagcttttgtccattcatgtcttggaatagacagcaagagctatgaaatgcacacgtgaagcatacgaagagttagttcgtcccgcatggaccagatggtgtatttatgtacactgcgtgctacgagccaatgacgtgtagcctaggaagtatatgtttcacgcgtacgatctcatcatgccccatctgcaataagtcaattccgtgcttaatcaagcgctactttgttgacaataattgttgacattgtcgatgagacgagagatcacttgatatgcatttccctgcaagttaagtaatgcaaagaaaatgctgacgtcgtcaactctgtttcaagtctcacgttttctttagaaatgcacaaatttaacgagattttgagtttcaacagtggttcacttcagtctcggtgtgaatcaagaacaagaaaatcgggtgaactgagctactattttttttcctcagttttgattcctcatttggaggagcaattttgcaccggctttggaagttacggtcgagggatgcaattcgatcgagggtaagacatagggagaaaatatagacttgctacttcctcgttgcatccgtggcatttgggctaggcccagggaagtagacgggccaggctaggttgggcctggctgcttcggcggcgcatcaaactcgccgctcaccagcatcgcgtcggtggcacgtggcggtcgcagtcgcagtcgcagtggggatcagcggcgccgccgtgcgaagaagccggcggagatgccgatctgcccgccgtcgtcggaatcctcgccggcgccggggttgggggggcgcgcgttgatcttccacgggttggccctcggcgcggcggcggcggctgcggcggccgcggcctacttgtacaggcggccgggcgggttccgcggccgcgcggtgggcatcataccggcgcgcttcgcctcctcccgcttcgaggggaagccgctcgcccccatcctcggcaagcccatgatacaggtaggtcccgactcccgtcctaccgcctacgccacccgcttgatttgcgcttttgcttcgcgtgttgagactggatctgagagtgcgagtggaaagcttgtgctgaggaattcaagcgaggaaatggaatcggtgatgaaaacccgcgagatgagttccattcgtgttttctcgttgcgatttgctgctgctgctgctgtgcctgtggcgtcctcttcatcaggatgcaatttcactacagtagtaggcagtagcagcagcagcagtgacttgctgagctttcagttggattccattattgggaattgctcgtttcgttacgtgcgacatggtcgtacgcgtcaagaccttcgatattcttctacatgttagatgttgttataccatgtcgcagtttcttggttgtttcgagctgtggaatgagggttctcattttgcgtttcgtccagaattcacattgtaacatctctttacttcataactacggcaaattaggtggggatgcctaatttaccctaaggactttaaggagtcctttaaagtgaatgcaattttgttgtattattaatattactttgagcaccgaggttagtgccacagaccagagctgtctgatgagggattatgctacttcaagttatcttctatgtgattgacatatagaatgcactattgcctattggataacgttgatatgatatcttgcaagttggtttgttgaataatctgtgtagttcctcatgttgggaattttttttgtcctaagcagatctagttagtcctgaaacttttaccttacacttttacagagaacatgggaaagagttatgttagcctcctctttggaccatgttggtaagtccaagctcataaatcttatatttaatcttttcctgtttctgctcaaaacattatgtttagtatcatcgtatattttgacttgtggcctatctctcttttgtgacaccatttgtacaagtaattgttgtttataacttttctttcatgatattagtcgtaggtgtttttgaatctgcattgcacatgctaatcgttttgatactgccagtccactcagccattctcaccattttctctgtgtcatagtcgtggcaacggacgatgaaagaatagctgaatgttgtagaggattcggagctgatgtaataatgacatcagaatcatgcagaaatggtacagcttatgttgttttgtcattatttgccctttccatgattacttgattaacccctacatgtttttcgttggcatatgcttcatttaggatctgagcgttgctgtgaggctcttcaaaagctaaacaagcattatgatattgttgtcaatattcaaggagacgagcctcttattgaaccagagataatagatggtgtagttatggcactacaggttgttacttatgtaaactatatcttgctagtttttgcagttcccatcaaataaacaaatttttattagatatttttttgaactagggcttttattttatcataagcaagcttagacttgaatacattgaaagttttaaattcttcattggagaatacagagtgcacttgatgttgcactcctttttatcttttaccttttgcatctccttttaattcacgtaatttacttgctctagtgatgtccttcaatttggcttgcagcgagctcctgatgcagtctttagcacagctgtcactgcactgaaacctgaagatgcatctgatacaaatcgagtgaagtgtgttttagataaccagggttatgcaatatacttctcaagagggctgattccatttaataagtgagatactacctccgttttttaatagatgatgctattaaatcgatcaaattgtcacttgcaattttgaacatttcagatcagggaaagtcaatcctcagtttccatatcttcttcatctgggcattgcggtatttatcaactcatacttcattctcagctttgtgttattttcttttggatactcctgtagcctgtagtgcctactcttcatagtgtgcctttttttcatgaagggctttgattccaagtttttgaagatctatccagagcttccaccaactccattacagctagaagaggatctcgagcaacttaaagttcttgaaaatggatacaggatgaaggtaagccagatagaaattgtatttgttattgctatgctgttttgctatgactcctggaaaaattaggtcatctgcgtgttattgttggaaattcctgttttagaacaagtaacatttatcaatcataccacaacccacatcttatgttcgttataatgccaagatggtgaacttgtatgggtcaaagacaaatttgtgatggtaggcatcagtgcatgctattcattgttcagtatcgtaagcctttatatggtgtatacaaatgtcgcgtttgctagcttatgccttatactgctgaattgaattttcattatcctcgttgataacaggtaatcaaagttgatcatgatgcccatggtgtggatgcgcctgaagatgttgagaaaatagaagcattgatgcgtgcaaggaacatccagtagcatgaaaatgatcgattttgtacgttgtgtggttacatgtttgattcgactgttcgtgttctagtatagcctttctgaagagcacatgaggttaatttgagtttgtaaattagaagctgtttgaaagttgaattactgttttgagtgtgcatagcgttgcacttctttcttacaacgttgaaggaacatagcgcatctccatttactgaaatggcagtgcacctacttgtatttactgtaattaccaggccatacagttcgtttcgagtttgttcttgttaattaagctgttaatgttagcgcttctccatcgttattgttatatttctcatcgattatttggctaagcttcaaagcttgcctttgtatcttcagttatcaattaacgtagggctaactcagttcacaaaaaaggacactaacaaacaccaaccgtttgcacttcagtttaaaagcactaacaagtaacgacatcacccaggaagtaaaataatgatcacaaagcacataggaaaccacaagggattacataaagattctccatgcattattcctgcagcatatgcatggattctccaaacattgccgatttattattcgttcattcactcatgcagtctgagtccgaccaaaccaaactaagtcgacgtcaccgtgagttacatcctctatcataatagcactattattataggaactgacgacgtgtcggtaacaataatgaaagttatattatgatagagaatcctcacccgaaaacgattatatcatcagattagtggtggtgctgcgggtcaggtccgccggggacttcccacttgccgccgccgccgacgatctccgccgtcacactcaccctgttccacgccccgccgccgcgagccgccggcgccggcgggtgaagccggcggccgtcgcgggccgccattgccggcgtcgccgcgaagacgacgatcatggcgagcacaatgaggcaccatacctggacaacacgaggcctcatcgtcgtcgatcttcttattctcgatcgtcgttagcttcagctactggggttcgatcagtgtttgatcgcttgctgatggcgttcacgtactccctgatcggctagcttatatagagagcgcgagtgaggcagctgatcacgcctcatcacaagttcacagtacgtacatgcaaaaacataacaggttcagatgtgggtgtatgaccacgtatatccacgtactatgtttcaaattttgctgtccagaaatatatactccatctattttttaatagataatactattaacttttaaacacatgtttgattatttatcttattcaaaattttcatgcagatgtataagatataaatcgtatttaaattattttaagtaataaaataactcacaacaaaataaattataattacgtaacctttttataataggacgaatcgtcaaacacgtgacaaaaagtcaatagcacgatttattaaaatacagaggtgtatatagttatatatgtgtattcttttttttttgaaacgaaccgcacaagatagtgcgagtttcatgtatttataaagcaggagaaaaatacaatctatagtcatggaagagcacataccagaaaaagaaaatacaaccacaccgcgatatacgtgtattcttagttagtgcagagaaaattatatttactttattaaaaagagagaaaatcagagtgtatatgagccaggactagagcccagggccgtacctaaattgttagggaccgctgctaacacaaaatgaggttccagcaacgacaaatgggtcctgatgcaatttattcgatttctttacttaaacagaaaataaactcattctagccaaatcagtagaacgagatacattgttttgaagtaaaacatggaaattttaaggctccaaatttttaggggttgtgctatcgcgcaccttcgttacatgtcaaatcgacccgggccttaatcttaaaaggtttttcatctctatctaaaatctatcttggcatacagccccagccacttagtcaactatattactcttaaccaatatatatcctgaattgcacggtggatttttgccgcttaggcactagctatcctcctagcttaattgatcgaccaccgtatctgcaattcgagcctcttgtcgactcctgaatcgtcaattacagggggtgattttacacagacgtcgagcgttttgctacgtacttttttactgccgatatatatgatctgtgtctgcaagagcgacaggcaacaacgtcacgtcgtcacggagcaaatggataaaaacagagctagacaacggcacgatcattctgctgaaatgggcttttagacctaagcttagcaatgggctatcagcacgcagacagccgtttaattgggttgggctcgatcggattggttcgatcgatcacacctctgcgtatatggataagcacgtacgttaattacttgtggatgctgagggcaaaaggcttttctggtcacatccaaggatcatcaactgatcaacatcaatacaagaattacatgtgttatatatcaaagaggtgaaaaagaatcacaactttttatctccctaacagttcactggatatcaagagagctagtgtgtatatattgtagtagcactagacactactagtagttcatcgaacaacttagtcagcatgcattgccgagagtgggaagaaataccatatccaatagctaggataatctgcatattgggataattaactaatccaaacttactttctctagccatcatacccatcacctttttcttcttcttctttttttttttttgccgacaaacagctagctactagcaaacattgctgccatttagaccaattaactaactcacttctttaaatgttattttgcttctgtcaacactagtcacatggccggccggttcaatgcactagatcatgctacttcattggataattatcgtagactattaatttgttccacgactctaatcttctgatgtattaatttacttcccttattctaagttaactactattaaatttgtttgtcaaaatatttaattgatatctataatcgtgtaaacaacctactataacaattcagtcaataatctatttgaaactagatataaattgagtttgattcagcaattcgggtgagcaacttcctcattatctatagtcacgtttcttaaacagttaaataggaggtttcataaaaactttatatataaaagtttcttaaaaatataaaataatagatttttaagtttataatagttaattagtcacctgctaatactctttttccataccgagcaaaatctcaccgagttgtttaaacggacggactattagaattagactgattttgttttccataccgagcaaaatctcaccgagttgttcaaacggacggaccattagagttagtccgatttcgttgtttgttgttggaaactcatacctcacgcactaaaacagaatgactcattagcacatgattaattaagtattatttttttaaaaatagattaatatggtttttttaaagcaactttactatatatttttttaaaaaaacacactatttaatagtttgaaaagtgtacacgtagaaaacgagagagttaagttagacctaacattcagatatgacatgctatgcacttgctttcccggtagcagttggacagttgataaacaaatgtgcataaactgattaagcgcaaaccacttggctaatggccaacgcgatctgatgcgcttatcaaacataaattttaataatgctttatttgcatacggtttctggtcgtggcgccgcacatgatcgaagataaagtggaaattaataactaatgatggcagacaatttttggtgtgtcacgtacgcacatattttctgtacacatcttggttgccgacgacgacggtcaaaagtgttttgttttggtgtatacgtccatcgttttcagttctagcagggcccggcgaaaatttttcctttcaacggttcataacttcatatttgctgatcagttgtgccattataccaccaatatatactcctgttattgattggtacaaatattatccatgtaatatttgttttccccaaaagaatccatgtaactttttttaacaaataaattatattatatctgttgtaaatataagcatttctacgcgatttccaaatgcatcttaacatccttatacttccggatgcattttaaaacacacacataattacatatatttcaaaactgagtgagtatacaactgttagtattttctataaacaacttttacttatttttgcagttggttattactagccactagatatgcctggtactgtaatagctataggtacggaacaataggtttacatgtatgtttctcgaccatctaaaaattttgtgagtttggtaaaaactatctaatatgatttttaaatactattttatatccattttttttagttttgtaatgcttaatttcatctgtgcccttaaataattctaacagattttcagctatttaaccattttacacaaagatcattgtatttgaaaagatgcacttgatagtgtaatggcaagttgtatgtggtttcaatcccgagttctgatgttcaatccacacacccacaacttcttcatacaaagtgtttggaggcacgtgtctcccaccaaatcttgttttttttttcgaaacgatagaggagactgatccagtcccttaagttttgcttgatgattagttttgctttagactggttcagccttaagactgcttttaaaacctgtcatgtggcataatatatattatagaaaccatattattactgctcaaccatagagaccaacatatagctgataaaggtaaatcagatatttcacatagattttgtatgggaagataatatggcatatccccacgatgatttggatatataggcccatggataatattagaccagatgataaattttaatgatttgttaatattagaccaaatgatataccaaattgtttgtagagagaaattttgtagaccgtattggccgctatttctcccactcgtataatgggtatgttcagttcagctagatggtggttgtacagctgcagcgcttttagtacaaatttgcttggtaggtcctcttggtgtggctacaacgttgccactcctagctcttccgaacacagccaatattaggctgaatatattaagaatattgtctgagttcttctcgtattatttttgaaaaataaaaaatggcaagatcagctatgccttattgacgtgtaaagttcgaaagaaaagatcagatctaccttttatttaagcggggtgcagaagtggcattgatcttttcagtttcgtgatttatcttgggttagaccctaggctgttgtacgaatttgtgggaatggtgactggacgctgaagtgataaataaatataaaatgcattttcttcggttttcaagtgagttgtttgccctcttttggctagtgggattagcgtcacttaaataattataagtatcctaactggaacttttctgaataaaatctagttagtacgatctctgatagacaaaattatagttacaaaatgacattttgtttaccaaaaattaaagcgtcttagctcggtgcttagtcatggaatgatgaccaccttaggcattaatttgttagagagaaggcattcatacaggagaacaatccggtgcatgtctactcgtcttgaaattaaggccaaacaaaaaaaattaagatagtagtgaaataatctctatcagtaaaatccaggtatgaaattataccttttttcatattaataaattttacactgtgggggccttcccatacagagattttggcaaaaaagaaaaagaagtcttccgttccattatatttgtcatcactgatggttacagttgcaactttgatcactaataatttttttaatggttaggttgtgatgaacaaaaatttaatactcatatctagtatgtaatatacttcaataatatgacatctatttaagtaatatagtataacatttgactattcgtcttattcaaatgtaaatattcaaaaaataaaagtcagcttaaagtttatttaatgataaaacaagtcataaaaaataaaaaaatactaatatatttttttaaataaaacaaatggtcaaatatgatatcacaagttaatgatatcatccactaaaaacagagcgagcaataccttataataacagtaaaaagagaaagaagattttagaacacaaatacacattcgcttagatgctatttagatttgtgctatattgaaaagaggaatatgaacgtctacataatattcgtgctatttagtacatgtccatgtccatgtgtatatgagcgattgtgtctatatcatgtttcgcaaaataaaagaggaatataatatttggccttattaaatttgtgccatatgtattaatctaaaagcaaatccgacaacaaggggtttaggtacacatggacttgtgttataaattgacttttctgtaaaagttacacaaatatatatgaaaaagaaaacagaactctcttttcatctcaacaaaaatgaaaaaaaaaaatcgaaccccattgttagccttcaagcgaaaatttgaattttcaaacttaattttgattttagagttgatgtatgagaaagtttttatcgtagtttattttccagcatatgatttcgtatataacaagttttatttatatttttttactaaataagttgttttgcttataataaatataagccaaatgatgaggtgggaatacagtcttattcagacaagcaaatgaacacacactctcaatcttcaggatctttgcaaatacgcgcgcgatggtgggcatatatatatatatatatatatatatatatatatatatatatatatatatatatatatatatatatatataactgtgcatacatgtacagtatacactacaagtaaaacatgcatgaaggaaaaaaaaacagctataggaattggtacagacatatttgttgatgtatcgtcagtagacactgcaggcaacacacagtcacacagatgatcgtcgatcatatccctgctcagtgatgctgagggtctggaccgccggggctccgcctcttagactcaccaatggcggcgccgccgtcgtccagcgtcgtctcctctcgcattatcttcctgaaacgccccctcgccgccaccgtaggctccctcccttcccattgccgtccggcctctgccgtcaccgcggagtacgagagaatcagcaggattatgcacatcagcgtcgtcacaccagcaaccagcacgctaaccttcgccttcgccatgcctaggaaaaaccaagagctcaatgcaactaaactgctccaacaatatcgatcgaacgtgccaatgaaatgctgtagatgcagtagtgtgcaatgctacgaagatggcaggtttatatatagagagaaagagagaggcgtgagaccagtggttggctgctgataactaagctaatgctctcaggtcaaatcagttgtaatctgttcctttaattttctctgttgttacatgcatcgaaccatcatccatccaatccaatccaccggcggcggccggcgataagatggccggcaactcgcccacacaaaagccggttggtcgctaggcaatctcagctctgttcggtttgtttataaagctgtacacgttgggcggcgcacggtgatgactgagatgagcagccaggttcagaaatggggttacacgtacgtacgttagatggggcatgggatgcatgggcgcgcactgccggccgcctcccctgctacgctcgtgctccggcggaaagcttttgctttgcgtcgtcacgcggaggtggaggtgggttcggtgagtgtcggctgggttggacgacgagtcgcggggctagcaggagctcttgatttacgttgggctgggcgactgaaaggccgggtaattaggccccgcgagaaaagggctggttttgaatgggctgagaaagaatgttaggcatcgcttagcccattgcgtagggatggtccaatactggtgtgacagcccgttgccgagaaaaatgtataaaaacactctggtatcgattttgctatatatttgtcgacaaa

SEQ ID NO: 26093 - DNA, 11503 bp, Oryza sativa
actataattacatctgtcaaatttttggggaaaaatttgtcgacaaatgtataggtagtcccctctggcatagaagctggtaatggtaaggctgtaactaatcgagaattgagataagttattagtgtataattaatttagtattagttattgtaaatttaaaattatatttattgtattttgtaaaaaagtttatatacacattattttataaatgcatagtttatcagtttgagaaatatgctatcgagaaacaggaaaattattaaaaatttagcccaaaatgaaaaggccctaagctcattgtctcgtcaatccgtcggcgtcccctgaagaaacggggaacgtaatttcggtttgaactgcacactatcaagaaaacaaaggcttccagagtttgttgcttttttaaacgtactataaaatataaagatcattgcatcgacacctctgtacgtactaaaatatcggaacctaaatatctcatcgatgggcgatggcagcggtttctctgtctcaatcttaatttggtttcgattcagagcatatatcatccatcgctgatgatggaatgtaagggagaggatacgatcgatggatcagtggtaatccctccgtcccagtatagtggacgtcctaggataatagaagcaaattatgtttaggtaaaattgaccatattgcccccaaattattacatgcagttaatcatttcaatccaaagagtgcactgccactcctgacacacaacgaatatttcattttgcaattaattaatgaaaggtttgtcccaggcagcaaagcatacaagtactgtaatttgagtttactggcgccaaaacactcctattacatggtggcatagttatctaaacaagcccttgaattcaaaatactacaaacatatgctactttgccgccaaagggtgcccctccattccctacaaatcctcaaggagccagtcaaccagtcacttcccattccattgatcagcttgcaaagcaactccatgcccacaaatcacaatggctatagatttaaacatactagcagatgaagagggagatggaggggctttacctgacctcaatgaagcacaagtcaatctggaggaagaaggagaaggaaggcatgctattgaagcagaaggtggaggggttgtacatccttttgatctcaacttgagggcttttgatcttaacatggaagttgcaggagaacaagaacaagtgcatccaggtatttgacatcatgtaatctttctcaatgcataaatgaaatctttctcagtcaatgcttcaatgcattagtaaatatagttcaaattatactccctcatcagcacgcacccatagaatatgtgaacaaaacaaggactgctactgtacaaagattaccagttatagttgcattctttcaaatgatgccaaatgtgtaggatttcatattcaccaaaagaaaggcacatgtttacatgccaaatatttattgatggttagatggtcacttacttgtgaaattggatttgtgaaagcatatgcagcataactccacctcccaaccccagacaccatatttttgcacttgtttctgaaaataagcagtcactgaattaagtagctgaggaaaaataagaacttttaaaccactaaagatagagcaaaacaaggacacaaaatacattattgcataagcattccagacaccatatttttgcacttgttgtaaataagtaatcactgaattaagtagctgagaaaaaaaaagaacttttagagcactaaagctagagcaagtatgtaattaaacaaggacacaaaaatacattgttgtataagcattccagcaaatcatacctgccatactagcaagatgtatgaataagtcatggttcttgacatggaagagatagtactattgtgacctacagtcatgtatcatgactttgcaaatcctaaacttattcaatgttctttgtgtctacataaagggcactgaccaacaagtaattttttttttgtagataatgatcagcaaggcatgcagtatgacatggatgttaatgcaaatggaaatgaggaacaagaaattgaactaggtaaagttcatgactttatgatcagtgccgaacattttctatccttggttttaggattcaataaatctgcataatctgattagcacatattaacttaccaagtaaataattttgtagacgacgacgatgctttgcaacatgagctagaagccttggaggatgacattcaggattatagtgtgtacgctgatgctatcaatgttgtgctcgaagaaagaggagttgcccgactcagatgaagaagaaaatgatgcaaatgcaaatgagccaatcaatgccagagaattgacaaacccacaaaggcgaagcatttatgaattgttgcttacaaaaagtctggatggatacctagaaaaaggcagcacacgtgtagttgctgaagtgttcaatgtgagcattcgtacagtccaacgtatttggaagagagcacaactttgcattgcacagggagtacaagtcaatgttgactcaaggaagcgttataattgtgggcgcaagaaggttgaaatagatttgtcagttgtagcagcaattccattgcggcaaagaagcactataaggtcacttgctgaagcgctaggtgtgtcaaaaagcacattgcataggttgttcaaagaagggcatctacgacgtcactctaactcattgaagccttatttgaaggaagccaataaaaaagaaaggctgcggtggtgtgttggtatgttagaccatcgtacgttgccaaacaaccccaagtttattgaaatggaaaacattatccacatagatgaaaaatggttcaacgccaccaaaaaggacaagacttactacctacatcctcttgagccggagccgtataggactgtccaaaacaagaatgcaattgagaaggtaatgttcttgtcggcggttgcgagacctaggtttgatgatgaaggtaactgcacttttgatggaaagataggcatttggccttttgttagaaaggtaacacaaccttcttacaagtgctgtttgcttatatttatttctgtttttcatgtttgaacctaacttgtttgatgtactaataggaacccgcccaaaggagcagccgcaatagagaaagggggacacttgtaacaaagactattaaggttgatagagacactatgaaatcattcatgatctctaaagttctcccagctattagagcatgttggccccaagaagatgcaagaagaacaatatttattcagcaggataatgctagaacgcatgtcccaatcgatgatgaacaatttggtgttgcagtaggtcaaatgggtcttgatattcgcctcgtgaatcaacctccaaattcccccgatatgaattgtctagaccttggcttttttgcctcacttcagtccttaacatctactagggtctctagcaacatggaggaactaatagagaatgttcacaaggaatataatgactacaatccaaacactcttaatagagtgttcgtgacactacaaagctgctacattgaggtaatgaaagctagtggagggaataagtacaagatccctcacatgaacaaagagaggctagaggcacttggcattcttcctaaagcgctttgttgtgatcatcagctgtatgagagagccatacagcttctagttgactaattgtgcacttgtgtcatctatgtacatatgcgtctatgtaattgtggaaactagatatataagttgtgcgtctatgtaattgtggaaactaaatatataagttatttgcttgtattaatgttttatcctaggttatattaacaagttgattgttcatatgcacaatcacataaaaagaatagtatttcattatacaagttgattgtattgctatcgaatagagacatagcatttcattaagatgttttcataaccatatttccaaaagatgccaccaaaacagaaccacaacatatagcatcataggatgaactatgcagcccaatcattatgagttcatactttagactaataacaagttggaggtagatggcacactattcatgtcacataatcagaacactactttttttttggttggaaacactggatgtaacctgggatcagtagacgaagcatttccaacttggtgtcatcaatgggctcgtattcttcctcctgtgaataaccaaactgttccacgccaccaaacacatcaccaccattttctttgtcgttgggtatcttctcctcgccgtgtatctcctccttgttgggcatcagtgggttagacacgtcctgaacatatatgaaaacaaatcaaaactaaaagttacatcaattaaatagcagtgagcagtacactctatgttcagtgcttgcatatttgaatagtgggtgtgtgaatgtcatttctaattaaggctcatgaaagaataaaaggagatatgattatctatggaaatctattataagaacatcataaataaaacactttgtatagcacctgtatagtaccacagaaaatccctaaaaattgattcataaatatataatttcatttatttttttatgtacctagctagctgattttgggcatgttcgtgagttcgttgatgtgctcctagatactacaacaaatctgtacctagttagagagaagaaaaataaaaataaaaactcacatccatgggacgcaatagcactgagcctcttgatcttaaatctcgatatatttgtgggatgccctcgagccatgagaggcactaaaatctaaaattttaatagatgtggtggcactgccatggctgcttacaacatgtatataggagatagtacctcatctatgacagtgtgttgtgtgcccaaagaagaggaaacatcattttatttggatggacatgaatatgaacagttggagaaacgaaagaattcagaagttacgtagtagtattaacgaacaggtgggaccatgccatgggggggttaaaagaataaagaagatgagtcggtagtccagcagttagattaaatcccatggctctagattgaggtgacatttgagggatcatacaggtaagaacgtatctaaccaacagatcgaacggctcacaaattccagtgatgtggcttcatgattttgtagctttatagcaataagtaatctttagtggttaccaattatatagaaagaaatgattgctaactgaaagaaatacaacaaaaaggttgtcgggagcttacattcccttttaatcaatacataatgagccttacactattaaatacgatatacagtacgctgtcctatggtgatcaaatggaaaactgggcttaatatgttcaaaaactagcatttttttcaaccaatacaacccaattttcatgtctaaatttaacgattaaaagcacgcaccttgctctgcccgctaatattggaggcctccaccatgatgtgcttgctcggtccaccaccttggttggccattgtcccctgccgcaagtcacctccctgtgggtaaaaagcattcgacgaagtggacaccttcatcgaaccatcgaaccaatcaagtatcaagccaccaccttcatcatccaaatcaggccagaactcgtactcatccaaatcaggcccatcctggctatcaaagattatatttttgccttcttctaataagtagccggatttacgttcaaaccacttgcctcgaatatgccatccgcccctccgggcagcagtccgtgtccctccatcatgtgagtgccccatgctgctgccaccatagatctcaccacccttctcctccactttcttacagtcctgaatcacatcgacattctcctccgttaccccacaatcttgaatcccaccacccttctcctccactttactgcactcttcaatcctaccacccttctcctccgcttccccacaatcctggaattcagtctcgggcacaaactcctggtccaaggagaactgatggtcctcggcttcatcatcggaatcagggatgaactcgaactggtcatcgtcggacccatcttgtgtatccaaaacaaaattcttgccttcttccaataagtgtccgtatcttcgcgagtaccacatgcctcgacgccgtttcttactgcgcatcagggaggcactccgcagcccatctccgtcgtcaccgccacaacccaatctcttgcgtaagcctccgccaccgccagaaactccaaaacccaaccctccgccaccatcatcgctgccgctgccgccgccgccataacccaaccctaggtcgctgtcatcgccgcggccacaacctagccctccgtcgcccctcctaggcttgctactgccgctgcccctagggcctccgccaccaccgcccctggggcctccgcctccgccgctcctggggcctccgccgccgcagcccctggggcctccgccgccgccgcccctagggtttccgccgccgctgaacatgcgcacgctagatgtgttgcgcgtggtgatgagagggagaagccgcgtggagaggaagagagcgcgatggggtgcggcttggtgaggggagggaggatggggtgcggcttggtgaggggagggagaagcggatcgggtgcggcgtcgagagaggaagagcacgcgatggggaagaagaggaagtgcgattgagataaggtagagcgcttgcaagaaaaaaattcgtgtggaggaggacgcgatggggaagaaagagaaaatgtgattgagataaggtagcgcttgcaggaaaaaaaattcgggtggaggagaaaaatcccacgctactggcccacttcttttttttttttggagcactttcgctcttgggacttgggcgcgccaatctttctggaacagcatctacagggtagaacgaccgctatactgggacggagggagtatctgctgcggtacgcgtggcgtcgtgatcgggtcgtcagtggcgccctcgacatgtagcccgcgtggaggcgctccattgggacaccccagtccaagcagcgtgcggcgcacgtgaacagagctaataagagttcgagatagcgaaagcgacgtaccttcgctcagctgctgcatgctgctgctccattatcctacacttctcggtcgccgtgtatcggtgtatgtacatgtaattaactagggggcagacatagatgctcgcctgtatgcgactgtgagtgagtgcatgcaccacaaacgtacgatctccctgacgttgtaccggtggaagcttcttagattaatcgacttctggacgttggatcccccaatagcttcgtcgttttgctcttcagcttatctttttttttttcacaatcacgcaaaaaaaatgtacaccaatatcttagagagaagaattttttttatacacaatgcaattcagtcagaccggcttatgtcagagaaagaaaaaaaaagtaaaacaaaattattatcctggtttatttttagtattggtttttaaatcgtaaatatatttatacaagagttttacatataaaatatcttacggtttataatcatatcagacggtaggcgaaacgatggctggtgcagtggccgccgcgccgatggatggagacatatgtgcgtcgtggtgggatgtaattataccgagggcgatgttgtgtatagaagcggtggatggccgcatcagtggaagcactagtagctatggtagctagcgctagaggcagcaagcttagctgccggccgccggccaggcacgatggacatgcgtgacacaccgcccggggcgcctggtacattatccgatctctacgactcctctcctcgccgagtgatcaccatcggcgctactggtgcgatggaacacaccaccaaccggactacccctgctccctacttccccatccaaagagagctcgatctgagtgcatgtaactacagtacacgtgcgtgtttgctcgctccatcgattagtgccttcccatcagattcagaaagggggtgaaaaacggtcggaaacgatcgaatcggtagcatttcttcgaaaacgatcttcgatcggtcagtaattgaccacattaatacgatgtagaaagaattgtgaaaaaacaacatttaaaaatagtcaaaaatagtatggtcggaaacgatactccttatatagaaacagtgctcgatcgatcaggaatttccgtggccattttcacccccattcagtgcatctttttgttcacggattattgcacacgcatgtgaaacttttgagacggaaatgataggcgaccatgcgtagtacggagtacacgagtgcgcgactcgatcggtggggtggtggccatgccgatcgacctgcgcgccgccgacgtacgtacgtacgccacgcgtgggggaccaaggcgatcacggccgcggggaagagagggaagagagtagcgtgcgcgcgcgacgtgctgtgcctcgcgcgttcgatgggttcgaggagtgcatgtgtttcgaggtgtttcgccacgtaacgtacgggagggagagatgatgcgcgtacgacgcgctgtgcgcgcggcgcgcgcgggggggagggcgctgtcacgggacgcgcctctctggacgacgtgtgcatgcactgcactaccaactggttttggagacagaattacggccggcctcccaatcggctggttgatcgataccctcatcttgatccgtccctgtttggcgccgctactgacgccaactcaacggggctagctagctcaatgatactgatgattggaacaacttggagtctaagccgatatatgttctgttctgatctgtggggattatgctagtagtgtgcatcattcggcgaacgctgtttagtgtttacaactgcgcggctgctggtccctggcttatcccttgtgaacgtacgttacccgtattcgtccaagtgtgtccaatccacactatccgacttgacgaagaattcattctcgccaacagagacatacatttcttagggcgtacgttttttcagcttggtatttctgtttttagataatgttatcgatttctattagccgactttttttaattgttaaacggtgtgtttcattccaaatcaaataaattcatttttaagtttttaataaccaatactcaaataaacatatgttaatcatgtttctttttttatgcgcctaatcatccattttaaagcactttaaaacgcgccttagttgatggtgtatccacacaatcaatgcatgtatcctagcgtgtctaaaagttgggagatttacatataagtaagtgttatttgctcttttgagaggttcttccacttccatttctacgactcatctgtgttcaccagctgcccccggccaaactgacaaaggggaccgcacatttcccgctaaaggagttcatcctctgacacaatcaactttgcgtatcatgattttgtctgtacaaaattaagaacgttaacttctgtacatatacttgagttttctagctctagctaacttgatgtaactttggtctgtgctgagagtttcgtgcacggtacaccaagtttctcggtggcctgcaaaaaactaggcggatgcatcgccggaccaccggatcattgtgtgcatcccgcagaggcaggtgcgtttgtcatcgacgttcatagtatatggccattctgtgatgtgaagtgcaacatgtgctgccaaacgaatcgctactacaagtggttagtttcaatgttgcatggggacagtttgtaccgagcacggcagtagattgtagccagtggtgaactcagaaaaaaaattaccgtagatctaatacatactaattatctaattattaactaatatattaattaatataatgtaatttatataggatttgaataatctatccggtgtcctatgacaccgggtagtatagtgtaggcacgccctgattgtagctagcttgagcgaggacgcaatataggccacgtcgtgtcatgttcagaaaattaaaacgagcaacacacataagcacacgtcgtttttagctttctgcggttctcatttgctatttgtccgactactttggtttgagatatgatcaatttgatgaaaccacatggctgttcatctgatcactcttcgataaggcttgacaagataagcctcctctaccatatcggcatctatcccgggcccaaataaggcacattaatgggtgaggatagaagcacgtactccatccttcgatcatcatatatgtttatgcactaaaactaaggataatttaaatcacattaattaagacatcatgtatatattctctcacaatgtattcatcaattaaaacaccataacaattacaccttagtatatacacattttcttatgccgtattaattgtactctgataaaatccatgtccatacagttatattttgatcaatttaagaaattttgaattccattatatgttgatcaatttggaaaggagggagtaccattttagcaattaaagcaagctaggtcattactgagaaacatccagggtcttccggctagctccataaggtggtgagctagacaatctggtttttagcctcacatcttctaattatttgatattaaatcattcgctaatattcgcgtcttttttgcaaggtcaccaaagcgatctgtggaaacatttgtgaagaagtttgtggagacagtaacaccattttagggcacgttccaaccggatgattggataaattacaggcaaaggaaacacgcttatatatttttttaagatgataaaaaatttaggtctttacttcgatagaagatataacaaatgcactaatcatctcaaataataacaagggttaaaaaaacaacaaaatccagatgaaaagacattatttagaaagcaattgtttgtctaaatctccatccataaatagtggaaattttatgaccatcctctttagattttgacatccaagttgtatgtttccttatcatcctcatacttgtgtagctggactcggaattaaatctatattatctatatagttgatgcccactaacttctaaagctcaatatgcaagtgtaccatattatcacctactagcaattattatataaaatattttaaatcacatgtaagcgtgtattttaaatataatgcaaacatgacatattatttacaattttgttgtatttttagaatacaatatgcaaaaaatgtcaagtcattattttcatattatctaaacatatacatctatcatttttataatgtataacatgcattcgttcacatatatgtaccgcagcaaagcggggagtatcaactagttcaataaataagcaagagcaatatcatgtcatggtttattttcatattatctaaacatatacttctatcatttttatcaatgtataacatgcattcattagcatatatatcccgcagcaaa

SEQ ID NO: 26094 - DNA, 8741 bp, Oryza sativa
aggtgcgtgctgcggcggatggtggtggggtgcgagggcagcgacgagatgctgcgggtgaaccactacccgccgtgcctcctcccgccgggccgcgaccgggacgagtgcggcgtgacgggcttcggggagcacacggacccacagatcatctccgtgctcaggtccaactgcaccgcgggcctccagatcctcctccgcggagactactcctcccctgcccgctgggtccccgtgccccccgaccccgattccttcttcgtcaacgtcggcgactccctccaagtacgtactacgctacccgagaatagagttcttaaaatctacaatagatctggtttaaataagaatcgaggctaaaaaaattttcggtttaaaaagcccaagatacttttcgatatttagttccatatttctttaccagtttacaacccgaaactataggggttacgaactgggagaagaggtatttttcagtagtattagggcttattcactttgctactatttttaaccttaccaagttttggtattaccaaattttgataagtttaccaaaattttgggaaggttaccaaattttagcaaaatttcatatgtacttattaaaatttggtaacaagctaaatgtagctatttttttataactttgtaaaaaaaagtaaggttgaaaatagtagcaaagtgaacaaacccttagttgaaattattattgctctatgccttgtttttactatcatttttattattaacgtatgtgtgtacgtgtaggtgttgacgaatgggaggttcaggagcgtgaagcacagggtgttggcgccggagggggaggagtcgaggctgtcggtgatctacttcggcgggccagcggcgtcgcagcggatcgcgccgctggagcaggtgatgcgggagggggagcagagcctgtacagggagttcacctggggggagtacaagaaggccgcctacaagacgcgcctcggcgacaaccgcctcggcccctacgagctgcagcacgccgctgccaacgatgaggccgcgacgaagaaataaatcgatcaacccgacgactgtgaacaactgtgaagtgttactgtactagtgtagttagctccgtggtactggtagctgtgaatatgatcgagatcgatcgatcgatcgatctatccttgtgttgtgttacttttaacccatttctggtaactaaaggccgccgttgccttggcttgcttggccagcccaaaactggcactggcgagctgcctcctcctgcatgcctctgctgtgcagtagtgcagcagtactcctctgtcctggggttttctgcagcagagcagtggagtgcagttcagtgcagcgttgtgcatgttgtgtaaaatagcttgccgcatgcatatgtgattatgtgctgctcctgtcgacgctgccgccccttttgtagcatggtttttaccggctgggcggtcggcaggtgcagtagtagctaatgatgcttactgcgccatacgagtgtacctatatgtgtgctatatgtgtgctacctccgttccaaaataagtgcagtcgtggatatctgtgcccaacgtttgaccgttcgtcttatttaaaaaatttataaaaaatttaaaaatatttagtcacacatataggtactatttatattttatcatctaatagcaataaaaatactaatcataaaaaaaattcaaataagacgaacggtcaaacgttgaacgtgaatagtgcaaaactgtacttattttgggacggagggagtataaacaacttaaacaagaatgtgtagtactccctccgtcccacaatataagggattttgaatttttgcttataacgtttgaccactcgttttatttaatttttttttgcaaatataaaaaacaaaaagttgtgattaaagtactgtagataataaagcaagtctcaaataaaataaataataattttaaaattttttgaataagacgagtggtcaaacctcgtaagaaaaacttaaaatctcttatattatgggacggagggagtaactgtattatatatggcttttacctatactttcgaaatgtgcacgtcgatcggttggtaatctttatgttattggatctcgtcttctgaatgaggtcactctgcgttcgcaaaaatgaatgaggtcactctgtcgtcgatgaattcaagtaatcttccgtgtatggattcacggatccggcgaatccgggccatccgagcatctctcgatgtgatttgggatcgatgggaatcaccactggcggcaggtaggggcccgtgcctccctctctcactcgtgttcttgatcttttcctaggacaaactttgcctgaacgaacggaccagaaaaaacggaactgatgaatgagagcctgacttcgattgatcgggtaggtcgggacttgtgccattagctagcatactactgtagttgctaataaggcttatttggtttgaagcccaatttatatcatatcaaaatgtcggtagtgttaaaaaagctagagaagtattgatactatcaaatttattagagtacaatttataaatttgatatcaaatcaaacatccataaaatatattagtaatgaagttatcaaagatttggttaggcatagattggcctcaatcaaacaagcccatagatctctctgtagcttgtatcatgagagacagggaagactagttaattggagtactccctatgtcctataatataagaaattttgagtttttacttgcatcatttgaccactcgtcttattaaaaaaaattgaaattattacttatttttttatgacttactttattatccaaagtattttaagcacaactttttattttttatatttgcacaaatttttttaataagacgagtggtcaaacagtataagcaaaaaatcaaaatctcttatattatgggacggagggagtagatacgtaccagctaattataagtaggtagtcagcatagctgcatagactatggacgaccgatcgaccaccgtcatttgacctggacgacacgagagccagtaatcacgggccaggttacgttgctttcgagtttcaacgacataccggataaggccgtgtgtgctcgaatctattctccaagtggcaacagaatattactgcatgcaagccatagcgccatagcaacaagtggagtttgtaccatgctagcgatgcgttttgtacgtcgtgcatgcatcgccccgcggcccttttgtttcccatgaattaatccatcagttcgcaagctggtactggcgactcgtacaactcacctgtacacgtacggctgtaatgagattattttgcctcttttgagataggttactgcgtgttccattgggagtccgtgttccattcgaatctctatcccttccggtctactctctctccctcttgtcccaaatactatatgagtattcaaattgttccttatcttacaccaagcattaattctcccattttcgatcaactcacacttaatgacacgctataaatctataattttttcgtgaaccttaattctcctaaatgacgtacaaatgcttatagataaaaacagagggagtaagatttatgtcgtggcatcatcctagaggtggtaattaccaagcgagcatcgatcctaaggtctgattttagataggtgtggacggcggtcaagcatagcgtgttgtgctggatggcttcgcgacactaggccgcgtcggccaacgggaagttcgacggtttgcggaagacggttgtagtgcggcatagcagcatcacgacgcattagaggcatgcagaatgcgacggccgacggcgacgcaaggggattcgaaaagttacagcgaacaacatacacgaaagtttagcaccagatggtggttgcgatccgcagaggtgaagatggtgcagcggcggatagcacatactagttccgattatccccttccgcgctctcgtgctgtgacgaaaagataagtcactaatgaagttggaagctactcccttccctccgtcccaaaaaaaacttaattcataggtttccgtgtctaacgtttgaccgttcgtcttatttaaaaaattatgaaaaaaaattaaaaagataagacggacggtcaaacaataatgttttatcatctaacaataataaaaatactaataataaaaaaatttcatataagacggacggtcaaacgttggacacgaaaaccgaagaattcggtctttttgggacagagggagcaagtcactaatgtaggaggtttagagtttaaaaactgtgcattgtgtttttttataccctgtgtagatatagagattaataaaaattccaaagaaaaacatggcgtggccatccagttgcatgcgccgtggcaaaatcggtctcatcacatggtagagtacagcctcccgcacgcggtaccgggacacgcctccgtcgcggcccgggcttgccctggtgcacacgggacgcccggcgcccgcgcgtaagtgggtcgggggtgagaattgtattcgcccacagagtgcgatctgcggatctcctgtcaccgcgcggcccggagtgcgcacgggaaagatagcctgcaggctgcaggttagtgtgtacgccgcaccgcgcgcgcgcggggccttcgcgcgtcgcgtcgcgtcggtcgctgcgggggcacgggggttaggcgcgcgtacgcccataccagatatagcatctcgtcttgtcccgcccgtggatgggcaatcctattgccggttgatttttttactcctctttttcttccgctcttggttaatttgctgcaatttcggaggcgattttgggagctcgatcgatcgatcggatcgacgtgcacatgcatgcatgcgttggtataagctaggtagatcgaggaggacatgtatggcttgaatttgaatgcactgtcacgtcgtatcgtatcccgggaggggagggcagggcaggcaatgctatgcatcagagtatcaagctgcgccagaaacaagctcaagcaatgcaagtggggtgtactctggagtctggactgcgacaagagccagatcgaacttttcggtgatcacgaccaacgccagaacttgcggcctctacaatcatttcgaccccgtttagtcgtcgtcggtagagatttctttccggacctcctgccctaatttctcccactgatcgaccagatctcgtatactcccagtgatcaatgagcttagggcctgtttgttttccagggacttattccaagttcatgtcacatcggatgtttggatattaatttggagtattaaacatacactaattacaaaacacattccatatccttggactaattcacgagacgaattttttgagtctaattatgtcatgattttgacaatgtgatgctacagtaaactttttataattatagattaattaggcttaaaaaattcgtctcgcggattagctctcatttatgaaattagtttttttattagtctatgtttaatactccaaattaacgtccaaacatccaatgtgacatgggctaaaaagttttagccccatctaaacacccccttagtgcatggcgcaacttgtggattgctagtcaaatgcacccagcatgcatgggagcgtaaaaggtgcatggttactagaggtggagtactaggtagtagtggcagcgagtcacatgggaataataccgtttccttggattagggacgtcattactgaagatggagcaggcagtcccccacctgaagattcactttgtccagcaaaaggcacgaatcaggggggccgctatccaaaccgtacaggattccaaacagtccaggccatgcatgcacctcctttttcctagtagaaacataggagtaattctcaatttccctgccaatttcttacttaaaaaaatctatagttggacagtgtttcagaaatggagcagaaaactggaatcggcatagattctaccgacggaacaacatccgtaattatttcgttggattttttttgttacataacgtgagttatatttagtttctactacacatgttcgatgaccacaaaacggctcaatttggatgaattttcagatcaatgacctttccatccaacattattactcccgtcattctataatataagagattttgaagagatgtgatactttctaggactgtcaatctggatagtctcatgtccagattgatagtcacagatgtcacgtccctctaaaataacaaaagcgagcaggcgagcacgcacatgcatgcgctggggttgtatataccgtttacaccagcttagcaggatatagagtgtacagatcactgagcagcgagcatcagtgaccacagaagagaagatggcagtggcacacagagcgtatcgctttctaacacatttctccgacagaaaaacagttgtaactgaaagacgagcactgttcactgttcagtattattcacctcaccaattaaaaaccatacgaaatcaatcatgcatgcattcgcatcgttcagctcgtccgtgataaagctctagagatttgccgtgcagacaatgaccgctggcgccgacgcgtaccatggttagtttattgtcaaaaactgccgcgaaaccatggttaatttgctcaagaaaactgccgtgaaaaatggctcagaaccaatagacgtactaggcggagagaatctcaggtgcttattagtgccgtgctaccgtgttgtactaaacttaaaaggtgcataaaaacgtaatgaaaaatattaaaagatttttttcacatttcttttgactttgtttttacactttttaagtctagcaacactatagcacaacactattcggtagctcctaaaattctctcgtaatataagtaattagtactacatcgagtataggttggagagacgtctatgctatgtatggtgtggtgtgagcagggttttacgaggaggagcttatcgcacctcggtgtaagtcccataaccgtccaattatatcgacgaacagtaaaagccgaaagaataatataaacatttatatttttgttaaattccttttgaattaggtgggtttatcatgataaaaccggttaccgcattaagggaaacccttgggtgcgagagggcgaggctggcaccacctcgtcttgtctgcctttggggagctgccatgaaccaatgcgagcaagccgctgtgtacctgctcctgctgcagctgcagctagcgcgcgattcgatcgatccccggccggatcggatgctctccggttttgtccccaggggaacaatgccagagaatctctgccgttcgtgccaggtgtaagtggcagctagctgggatctcatctcgtctcctctcctctcctctcctctcctctcccgctctagctagctttcgcgaatccgattggacttgtcaatgaaggaggcacatctagcaagacttttcttgccccccgatttcaattcgattcatttcatctcgtgctagcaggtgttggcgtacgttggtttcagatgagagatcgatgcagcttgctagctagcgtttcttttccctcgtggggtgtatgcatgacatatcagcatctcccatcgatcccattcagtcagctacatatcttagcgccagccggggcctccgagagtgaaggtgcgggtgcatctctcttctatatatctctctgtaacacatggattttgtttacacctaaatttaacacctatgaacgaaatataagaaaattatcaaagtttagaaagtgttgggtttccttcacagagctgcgattgtatttgttgacttatatcacaaaaagttaccaacagttttatacacggtcccgagcgagcgatagctagctagtagctatactggttgaggtcctagcttgctgcatgaggtgcaggaccgatatatgccagagacaacgaagggtgaccaacgtctactacaacattctacaggacacatgttaatcgtgaggaaggatgtgtgcgtgtatgtgttgtcagaataaagcagtgctagctatatactactagcacatatgcagttgtccaaaattcgttggaaaaagaatataaacagtacagccctatgatctggagagttagctagctagccagccagctctctggaacatcatccttagccggaccacaacaaaaaatttctcaagtgatggagctgattgggcaggatcgcatgaaacccgtgtaacacgtacacacagcgcagcagtactgcaacataacttgcagcaaaaagcagagatcgatcctggtagggtacaagcagttgtttgcaatttttttcgaacgcgcaaaataattacacgtcaatatattagaataaaaaaaatatctttttttctatgccaaagaaaaggaagaaaagaaacaaaaactgcagctagacaaaaaggaaagagaaactactgaggataaaagggttgaggcccagttgtttggttgacgcagcccgccagaaactggaatggccttgtagcccgcgggcccacgcggcctggctggccgagccggcctctgtccaaacgcacggtctcgtgtgcatctctcgcgcgattcgccggcccgcgcgtatagcaaccttccacccaccaaccaggccaccgttttcttcggcccctcccggctcccgtgtcgtgccgggcgcggacggcagcaacacggcacattaccatcac

SEQ ID NO: 26095 - DNA, 3670 bp, Oryza sativa
gtcggtggctgatcttaaaccatagtgctgacacgctggtgtcgcgatgtatggtgctgatatttttcctggccacagtgtcatctttttcctggatgctagcctgctacgctgctcttggtttctttcctcctggctctgagcacgtatcggagctcctgccgctctcaactctgagcacactttcaacaataccaaaacttaataaagatataaactacatacatttcaaccattgttgcctactcttaaaactcttatcaaaatttgataaagacaacaaatcatatgaagacaatgctaccaaattttaaaatgttgattcagacaacaaagtgaataagccccatatcttcttgttataaaatccattgaagatttcaccaacgtaacgatgaaacaagaactgagaatgaaacaaatgcaaatattataactgccggctggggtatgaaacagacttaaaaagagcccagctatcgtttgaacagaaacaagacgagttaactgggagcagcggagcacatgcacagggcgactagcaacgaagcaaattcagatcagtaacagtttttggctaagcccttgtttagttccaaactttttcttcaaacttccaacttttccatcatatcaaaaacttttctatacacacaaacttccaactttccgtctcatcgttccaatttcaaccaaactttaaattttgatgtgaactaaactcaccctaaaggtgagtggcaattgagggagccagaacatccacaaactactactcctccctccgtcctataatataagggattttggttggatatgacatattaggatgtgtttcattcacctaaaatcctttatattatgcaacggagagtatatattataaccaataacttcaactgttatcgtttggtcgctttatatccacagcaaaacgcttcaaaattactcttgcaaagaaaatgccaaattatatccaatagctgttttgatgttgtgtcaacgcaacatcaggggcttatacacgattactgttgcagaatgctcccagaacttccgcagaaagttgctactcctacacgattcaaggcgatcaacaacgacagggaaagattgcaacaccttttgtcgatacacttttttttaagaaagaaaaataaaacaggaggtcagagttacatgcctaaaatgtcaataaaacaataggtaaacagattaacaacccacaggcaccaatgtcaacattgctttacactaggaacttctagtcttcaatttccatatactaccaggctacgaactacaatgaatcgctgccaagtgccaaaccagtcttcccatggtcagcaaggccatctaatgaacttcacactgataatctgcaccaaaaaaaaaaggggaaacattaagcaatcaatcgtgctagtaaatagtaatgaccaaatgggtgccttcatcacgtgcaacaagaagaacatgatccatttcaatagattaagcattttcaacagtttcaacagacaagtcaaacagacccctagagtctggaagtctattttatctttacctgcaagattcaatttatggtatcactcttgcatttatcacttgttactatattggtttaaattttatccagcatcttcaagttgtagtgacactttacaggaatagtagaacacaatggagttcaaccaatgatcaacaaagctcctcacggaatcataagatagccgagaaatatggatgctcaaaaagaacagacataaaaacatatgtaatagaacctgtccattccgatatgtctaacagaaaacacacaatacatactaacaaaggtctcagcaccaatttaacagagatagactagcaataacatatccaatgtggcttgtatctactattccagggccaagggtatgaattatgaaatattccatcatgaacaggccaggttgtcggtaaaagtctctagcgttcatgtgataattttgtctgttggaaaaaataacttcaaatctacaaaccaacacaccaatctctgcacaactgtcaaatcaaacttttccaaattgtgttgtaacaggaaaataggttttactatgcaatctaatctaccacaccagtacagacattgaaaagtaacaggcgtagcacatacttgagctcaaatgtttgttgtcaaaccatgcatatggaaaatgcaccattcaaagccactaacacactagcataaatgcatatatgttcatgagttattaagcccaatcaagttgcacttgaccttgcttcaaccttagcgaacctaggcaatcttgttcaagtttgtttactcattactaaggatgatagataatatatcatcaggacatttgtatttaccaagatagatgaaaatgccaaaagaccaaatatgtgtcatgctatcattcatgattggattaatgatacaaaatctaacaattagagcagctcactaccaggaacaaatgcaatgttaaacttctaactattgaaattcaattgcatacggggattatatggggggattaaaaatcctggcccagacacataatattcacaaaaacaacctttcctgaagcataccaatcttatcatcaatcaataaaaacatcatttcacagcatccccatcccacaggactatatgccagcaaatccaaagcacatatatataactacagctttataatattataactgaacaattatctattatccacaacaacattaattgaaaacaaaaatgctaggtcggtttttacctcaacatctcctcagcatcatatgtaggtggaggtggagaggaaaggcagcgcagcgacagaggaaaccaattccgctgcgccaataccatcgggtgcagtccctgcatgcttcttgatgcgctttgccctggcaagcttgacatgtgcatccacaaagttctccatgcgcttgacctccaactgcttcaggaagtctattcgctgccgctcaatctccagtgcctgcttttgcttcgcactctccacacgctcatacatctccgcaaatgcctcgatcgcccttgccagctccctgaaaccaccatcaacttcctgacggctgcgcttgttgctattgccggagcgcgatgacacagattgcgacggtgaccgctgcgcgttgtgattgttgttatcgccagggccttcagagtcctccgaatcagacaccgcggcagcggctgcagccgcggcctcctgctggataagagcggcggcggggagcggagacccgcgacggtagctgggcagcggcaacgccataggaggcggcggagagggcgacggcgaaggcgaggggggcttcctcaccgcggaaggatggatgggcatggcgaagtaagggggcggcggcaccggcgacggcgacggcgagggcctcttggaggcggaggcggagagggtgggcccgacgaggcggtcgagctcggggaagaaggaccaggtggatggcatgacgcgggcgcgctccgccttgtacttcttcttgagggtgtcgacgcggttcttgcactgcacgtcggtgcgcggcgggcggcggcgcgcggccgccccgcgccgcgagttgacggcgtccgccacctcctgccactgcttctgccgcaggttcccccgggtgagctc

SEQ ID NO: 26096 - DNA, 5289 bp, Oryza sativa
tttaaagatacttctatgctcagagcataatagtgatttacactgatcttaaagcggttcggcaattctggaaccttttgtattgtgtgcgtaggttgttcggttttttgctttcatacgagtaacgtgagccctgaaggggcggaggacgcattgccaccgcgcgcgcgcgagaggccgggcagaggcagagacctcacgcgctacgcgttgcatctcattctcgcgcgcagggggcttcgcttcgctttgccccggaagagccgcaggatttcctgcgtaatccaagggaggaccggccgctggctgctaccgtgctcgctatgacctactccagctactcccaggctacaggccatgccatggacgagtgcccggaccggacgacagcgagcggcagctagctacacactagtacgtagttactgtagtcccgcgtcgcacggcatccggccggcctctcctaactccgccggttggcgggcgggtcggtggacgacgcatcaaccgcgcacgtccttgcgttggcccgacgagtgcctgccctgcaaagcttgcaaagggttcaccgatcctcgtaccaaattaaaatccgctcactagcagcataatcagatttcgtggagcctatcgataaaccaataaaaaccgataaaatctaaaaaaagatttagataatggaaatggattacatctccggtctctccatgtgaaaaatccaaataaatttgattaaaaagatataattcagttttattttttgaacttgactgaaaaactaagtggtttgtgtttctcacccgctctgaaaagtcctgattttgcgaaatccaaaccggatttcactaaaattgtggatctgcctgcaactagtaggctggaaatgaagcatgatcagtagggaaaactgatgcaccttcagtaaccgttcgggcagtgggccgcgcgaaacccagcactcagcactcagatcatctgcattttacagtggtcttagcactgagtacaatcaagggagctcctgccaatgcatatgcaggttttacggtacggcatccatgtgtgcaaatcatcatccgcatgcaagggtcagatcgctctcccaagtcagtgaaggtcacagtgaaccttttccggttcataattgcccggctagccgccgggagtccggtctaagtcgccgggtctgactctgaccaagatgttcgacctcgacatctgactgcaggacaatcaatatatctttggaccaacccaatgaatgaattgaacttgataacatatccaagctaggattaggagtatataaaacagcatcaatgtgagacttctcacaagtcacaaccccgcctgaactgaatctagtgtagtgaagacaggagtggctaaactgcatcccggaaatgcttgggaggaagaaaggatcgtcgtccaggttgagtgatcccatcaacacgactgtcactactgataacggccaggaaatggctgcttcgcatttcatctcgcagcaggcttcacagctcggtaggttcaaacccccgcttcaaactttcaatggacgtttacattgttcccggcgtaagttgagcgataagagagactcatagttcttctctcctctttgtcagatgaggctgcgaggaagagactgcaaagaatgaacgagaggctgaagttgctggagatgcagatggaaacactggaggctggcgtcgcgaaggcgagcaatgactcctacgagtagagatgtttagcaatctttgttatagacaccaggtttggtgacatgcaagcaaaattagatgatagcttgagtagttttacctgaacttgcagcaaatcaccgtcacctcgttgtagaattccggatctgtttcaggtttcagcgcttcagttttgttctttcactacgagccaataagctttagtgcagatgtcattcaagttttctgccagaaggaatttacagaatttgaaccataacagccgccatgatgatatataactctggttattgttcactttacaacagtataaaaaatgatggactttctcggacaacaatagatggacaagggcatatttacattagtccctctttgattgatttcaaaacacaggctgagcctgatttttttttcttcgcctcgactaatggtacgtttctagtaaataaatacagatgcagtaccatgatgcaaaccaaaataaaagatggccatggtagcagcccaatagaagagcttcagcagaattgaccaatgaagtatgcaaccacgctgtgacatgattgtttactcacaagctagtttagtaccgaagctgctaaggcagatggcgaaagcctgaaacgccgagagaggttggcggtaatccatagtgaagatattgctgtcaactttcccaaactgcaggataactgtttcctcgtctccaacgctatctggatggctggggtcagctgtggccacaagctggaaattcttcacggatgcaactgtcactcgcccatgaaagtttaagcaccagcactgcaagtgctcatgccagcggggagctttgttccttaagacaagtggttcctgtgcacctcaaagattttgtcttgagggaattctcccaggtttcttgagttgaagggcattccattgtgcaaaacatcctcctaggtcccctagatttaagaaggttgtatttgtatgagatctgcccaacattgaagttgcctgccgatatttgggggcagatccgtctacttccaaaacggtgggtacttccaaaacgctggctagatcgagtgcttgatgtttttgcatcatcgtatggcggctggttgtcatatatcttgaaatttgtcccccaaaaatcagacctaaaaatggtgcagcagaaacacaatcaggtcaaagaggaaataataaatgcaatggaagtgcgtcaaactgaacataagaagcacttctccaaactgttatcgccaagaaatagaaagagaagacagtaatatgacaatgcatgatcattttaaactacttaatgtaaattccaagcaagtagcaactgttggtttaagtaccaatccagattccacaacaccaataaggacatgtaagagagataacatgaaagacttgcatatgctattcctgagaaagacttgcacatacagatacagcgcttccatgcataagcctgccgtgctgtaagttgtaaacttcggaagcgttgtacaggagctttaagctcctgtagcggaagcgttgtaaaggagctttaagctccgaaagctttgtaacagatgctccttttcccccttcttaataaacttcggccagctttgccagccaggtgaaaagtttcccttttcaagtcttcaccccaagagctaaggtgaaatataggtacttttcccacaatcatgtacagaacgtacaatagtcccagcacagtaataccaataaatttctagatcatgtattaatgaattggtaccacctattaattacacttactaaatagtatttagaagaatgtttatgtgcctgtttcttggtagaaaaagacaacagaagaaaacacatggagcaagtgagcaagagcaatggaaggtaaatgataactacaggatgcgcgaaagctacctcagtttccccacatatgcattgcttccttgtgacaggtcatcagcatcaagggaaataacatactctgtgtggggccccctcctaaaccttctagcggccatgagaaacttccctttatccatggtacctgttgaacatgaaataaatagataatcagcaaagcatgtctcatgaaaaatcccatttatcatggaaatcaggaaagaatatccaaaattatccaatatatgtctgcttatccagcttgtgcacatgatgtcgtattgaattataaatatcacaaatgcactgcaaacaaagcatagaaacttggcagaaatagaactagcaacataacatttgatataagaggaatcaaacaggcaagcaggtacacatgtgactgccaataactagtgagtagtgacatcagcagcagacaggagccatacaaacgtattatgtgtaagctctcaagtcattgaagaatgtacaaagcaattcaaatacaagatgattcagtggcaataaactttgtatacaggcattaaaaaacctggctaaagctgatgcagggacaagggaaaactattccaaccacatgtgaacctaacaaaccagattgagtcataatacatggtgtttcaaattgaagtagcagtaagtgaaaaacgataatgcttcaggtcattaaggaagcacttgcatgtttggattatgccttagaaacataccattcaacaagcctaggtaaagatagaacatagatttcttcttgtttcgcttgacgaagcactggattgggaagtccttagggcctggctgctcaaacaacatggaatggagcaaaatggtgtcagcactggatatataactgaccaaaagtgcaaatgcagatacctcaaacccactcttcaagttgtaagaactgtacaaatatccacatagcttatagctaatgagctaaatatgtgctacgctattcaaccccccccccccccaaaaaaaaaaaagagagagagagactagataatccttcagcgtgccacataacgaagattataggcacaaacctgtaactactgtcctaataggcactaaatctggtcagaactgaactttctgcataatcattagtcacctaatattagtgaccacattggaacttaaaaacagagatataaagcatacatttcccaattgcaagtttcttccctactcctacatactagcaaatttattaaaacttaaaactaatattctatttctcattcccaaatcctattcgaaccccagaccaaataccggatcggtggagtactagtgtacacacagattatagaccatatcgatcccaatctgatctgccaaaaatcctacttcacaaaactggtatttctgcaaccctgcaatgaatgagccctagcaccaaatagtactaagctaattaaatcaacgcctaagcaaggggccacacctgcttgagcgatgacgggaaggtgattctgccggactcggggagcggccgcacgacggccgccgcggcctcgcgccaccggcggcagacgcacgcgcacgacacgaggtccttccgcgcgggccaccgctcgccccccgacgcctccacgcgccgcaccacctcctccacgagctccggcagcag

SEQ ID NO: 26097 - DNA, 4175 bp, Oryza sativa
tggaaatatcctttaaaatatccggagggcaaggtataaatgctggaaatgacagctgagtcaaatcatggatacaatttggtaattttgcacaacagctaatcttagctactaaccttaaaacgtcaattttactgggacggaggaagtactactagtagcacagtatcttgtgctagtgccactgcttcagaaaaaaaatgctggatattgcgctgctgttgatcacctacacatggcttgtgtacatcaacgggagagtcagagtgatgaccaaccagtttgctaccactagttcttagcaaatcttcggtgatcggtgcacggtaatagcattgattaggctatgatagtggcctatttgattatggtactaacttcttcgatcttctgattccaattcagacttctgaaagtctaaacagttggtccatggggtaggttaggttaggctccccatcagctaaattatcaggaaaaaaccctgtactagtggtacaacttattagaatttagaagtcaacaatatggatgcatctgcttaatttgctttgtccctgtcaattgctgcgtaatttcgattgcctcatagcactaattttttgaatggaacacgcagcattatttttttgaatggaacacgtagcactaattaatcttagtgtctgtctcgaggacaacgatgagtactccctccataattgtttaggacaatatttaaattaaacattaggaatataaatcataaataactatcaaattattaagtttaaaaatataaaaaatatatgaataaatttgtcttgaaaaatactttcataaaagtatacatatatcactttttaataaatatttttatagaaacatgaaatcaaagttgtgttttggagaccgtgtcgctgtccaaaacgactttctttacgaggacgaatggagtatttatccagtgcagcggggcctgagttcttcgtcccagcctcccagggaggtagcagcccagtcatttccttggttttttttggaaaattccaagagtctctatccgacgaagtagcattgcaatggcaatgtactcgctctgttttttaacatatgatgacttacttttatcattgaaaacaatttgagcatgatttatattctacatattttaaagttttgaatagcgtgagcaattgaacgtatgtctacaagttaacaaggtcgtgtatttgagagagcgttacatgagccatacgtaaacatatgattatggtatttaattattcgtattattaaaaaataatcattatttatttttgttttattacgacttactttactttagacatgacgtatacttttatatacttaagaaaattgaatgagataaatgatataacgtatgtctaaaagataatgatgtcatatgttaaaacaaacggaaggagaattatgcgagtcataaaaggtctcaattacatatgatgaggacaaattcaggggtagcgtcattgcccgtgaccatcagtgcagccgttggcaaaaagaactgcaaccagcaatccagcatgcagattgcagagtggttgcttcttggctatgattacgtggccgatttttcaaacgtgagattagcgtgtactaagtggagttgcccatggagataacgatgggttagtagtctccgtcttcgtcctcttccttcttgtttaataatccctgcattaactgatcaacacaaccgagatgtttgacaaagagagaagaatacaagggaatgcagtgaaccaagagttttacccattcctcctgtatccagtttagtcgttgcagaaaaatctcccccttttttttttctttatctgaagatttgctcctggttcttcaactactaccaagaatcgagctcctgttgcttcctctagcctctgtctagtctgaagcctgaacccttgcatgctccagtttctgcactgtgtgagcagaattatttctgaagtctgaacagcagccaagcaaaaggtatgcgctttcaattgctttcgaggtgatgaagtatcttcagttccctatctgtttctgaaactgaggttgttctttgcctgatcttggcagaaggcatctgacagtaagatatgaacacctgtgtttcaggtgaatttggctgatgattctgcccctgtgttctgatttattcaagacactagcaactgaatcatcaggtgttggtcgcgaatatcccagtgatggattcatcgagttctttcgtgctcgtggtgctgattctccaagctgtcgtgatcggttgctcctcactggacgagctacccgttcagcttagcaaccggaggctacttcatgacagaaatcacgctgctctactctacaaagatcatttcccaacagttggaaacatgacgtttccaacatctcatcaactgcaaaatgatccaaattacaagcctctagatagttcatcccaccctgccgaggcttctgcaaataaaggatcaagcaaaggattcaagaagtggctgtatatagttgtgattccagtggctggtttgattatgcttgctggcatggcatggatgttcttgccatgccgcaagaaatccgttgcgactattggcccttggaggactggactcagtggccagctgcagaaggcatttgtgtcaggtaatactgcaatatttgccattttgatttgtaatattttcttatattgttctgttacatcctattcttataacggtaagttcttgactgtgttcaagtctggttttcagatcaaatattcatgttgtgtttctggttttcactgtgttctgatctgaatgtgcttcaggagtgccccaattacagcgtccagaactggagcgtgcttgtgaggacttcagtaatattgtggcaagtcatccatactacactgtctacaagggaaccttatcatccggtgttgagatcgccgttgtatcgacaacgattaaatccagcaaagattggtcaaagcactgtgaagattgtttcaggaaaaaggtagtcataatatgtgtactagatcctcaactaatccttttgcagaattgcattagcatgaaaaaatttaccttttttttcccttgtgaacaagcagatagagtcgctctcacgaataaatcataagaatttcatcaatctgctggggttttgtgaggaggaagaacctttcacgagggtgatggtgttcgaatacgcaccaaatgggacgctttatgagaatctccatggtaaatactatgtgaaagttattctcattgttgcaatgaggaataccaattttttttcttcacattcaagtgataacatgctggtaaattatttgtgcagatgaggcctttgatcacatcgactggagaagtagaatgagaataatcatgggaatagcttactgtattcagcacatgcatgagctcaaccctgccaacgtgcaccctgatctgcattcaagtgcagtatttctttctgaagattgtgctgcaaaggtacatatggtctaactaaatccttgttatgccttatggtttatcaagaattaggcatcttagccatattcagttgctatggtttcagtagttcttttaatgtccttctgatgtgaaggaggtttagagaaaaacgcagtttcagtacccaactttattcagtactcagtaaagtacagtttgatgctaaaatctgtatcctttcttcagattgcagacttgagtgtttggcaggaagtggtttccgacggcaaaaagtcgacagcgaataatgatcatcatgaaccaatatctgctagactggcagggaacgtttacagttttggcatactgcttcttgaaatcatctcagggaaacccccttactctgaaaacgagggctccctggcgaatctggtaatcacagcagcctgcaaagtcaaatgcttcaacagtttaacttacacaaaagaaatccaattcaacatcagattaaagaaaataaaactgttttttatttttcttatcttacaggctttggggtgcattatcaaaggtcggagtatagcctccatgcttgattcagtactagagtcacacaaagaaaatgagctagatgtgatctgtcagataatcatggaatgcatccagagtgacccaacgaagagaccaggcatgagggggatc

SEQ ID NO: 26098 - DNA, 2902 bp, Oryza sativa
cagattgcagacttgagtgtttggcaggaagtggtttccgacggcaaaaagtcgacagcgaataatgatcatcatgaaccaatatctgctagactggcagggaacgtttacagttttggcatactgcttcttgaaatcatctcagggaaacccccttactctgaaaacgagggctccctggcgaatctggtaatcacagcagcctgcaaagtcaaatgcttcaacagtttaacttacacaaaagaaatccaattcaacatcagattaaagaaaataaaactgttttttatttttcttatcttacaggctttggggtgcattatcaaaggtcggagtatagcctccatgcttgattcagtactagagtcacacaaagaaaatgagctagatgtgatctgtcagataatcatggaatgcatccagagtgacccaacgaagagaccaggcatgagggagatcaccacaaggctgagagagaccatagccatttcgccggatgcagcaacgcccagattgtctccgctctggtgggctgaagtggaggtcctctcaccagtggagccaaggtagaaacaatgataaatgtgcttctgaaaaaccaacatcctgcaggatgacgatcttgctgtgcatactgctgttcgtgcaacctttaccttgtgcaactccctgcccatgtttgatactgcccttgtgcaactctgctgcaaatgtcaaagatgagtactttctgtgtgtcatactccatccgttttcaaataactgacgttaggcaataggcactaatcattttgaaaatttggccactcgtcttttttacaaaaaaaaaagagttgcaaatacgagaaggaatattgtgccacactatcataatgtattgcatcctaaaataagcatgatgctttaattcatcatagattattcagtctaactatttgagattaattagtggttaatatcgaaatagtcattgtcaaccgtatcagttattcaaaaagggaggtagtaataccagtgatgatcaggtaagctttggcatgcggttggtacaaccaagcagccaaatgaggagcagctaactgacaaagaagcagtaagctctgaagtccaaaacctttgtactccctccgtcctataatataagggattttgagtttttacttataacgtttgaccactcgtcttatttaattttttttaaattattatttattttatttatgacttactttattatctacagtactttaagcacaacttttcattttttatatttgtaaaaaaaatttaaataagatgagtggtcaaacgttacaaataaaaacttaaaatctcttatattgtgggacggagggagtatacttgtataaagcaaaagggcaaagtcagagcaaaactctatacgttaacatgagtcatgagagcaaggtggccttggtcaggtaaggccacgccgccatattcgacatagagaactccattattgacaccagaaagcacaatattaatctgacctcgtgagcagtagcagacaacagtatccacattgtcgcacactccgacttagcccccccaaaatgttcctatcctcacaagtcacaccaccagaaaaaccatatgccccatttttaatctgcagaacacatgatctgtgtgcgatgttcttgaagctacggactccatcccgaacatctgcagccagccagatggaacccagccaaaaaggcgttgctcaggtggtgtttggatccatgaacttagctttagtccatatatttagacactaatttagagtattagatatagactacctacaaaactaattacataaatgaaagctaattcgtgagacaaattttttaagcctaattaatctataattagagaatgtttactgtagcatcatataggctaattatggattaattagactcaatagattcgtcgctcgaattagtccaagattatggatgggttttattaatagtctacgtttaatatttatagttagtgtccaaatatccgatatgatagtaacttgaaagttttagtccaatctaaatagggtctcagaccggccaaaactcccatgtgcatcaatgatttttgatcggtttcccggctggtcatcgctcacgtcaggcgacagatatttccaggcccaaatgatcatcgcctcgtcagtttaattttgggtttgctgctgcaaattaatcgagcattgttagtagcagtattgaacgtagcattagtactctttctgtttcttaacaaatgataccgttgactttctaacataaatatagttattcgtttggtttaaaattttataaaaataaattatatttaaagtattttaagtgataaaacaacttcaacaaataaattataattatgtaaatttttaagtaagacgaatatttaaaggtgtgataaaaaagtaatgacgtcgtatgctgaaaaaatgagttatacatcattttcgcaagctcaaatcaaatcccatccatttcgtgcaagatttgggcaacgaacgattgccgatgacgtgacatgtatgaacaggagggcagtattgcagtagaatattgctcgcgtgatcgttgagaggggaaaaagaagaggaaagaagaaaaagcactgacctttgggcaggccaggcgggcaccccactggcggttgggccacatgtcattggctcccagcagccagccaccctcgccgcggcgtcgtgacgtcgtcgccgctcgcggccggtctcttctgctcagtggctcacacatgggcctcctgcatgcgcgccacctatcgcctcctcatacgccgccgcggcgcgcccccgcgaccgtccgttcgtcccgaatccacggccctggatccccttcttccgccgcctataaaa

SEQ ID NO: 26099 - DNA, 7374 bp, Oryza sativa
ttacaggcccagtttttttctccaatactgttggttttactgggccgaaaaagccataaaatcttagtgagtggtgtgctgggacgtggctgggcaggactagccctctgttaagagaaaaaatgtaataaaatgcaagcaactatgatcgttttttgctgtgcaaagctgatgattcacccatgatcgattgctcgatccgtttaagatgctactccctccgtttcatattataaatcttaatttttttcttagttaatttttttaaggtttaataaaattaatagaaaaaaatagcaacgtcaaattagtttcattaaatcaaacattaaatatattttaatattttgtttcgttttgtaataaaaatattattatatttttctacaaactcagttaaactcaaagaagtttgacgaataaaaaggttatgaatgtcaggagtaatataaaacggatagagtagtaaaaatattctacagttccatcgacaatttacatcgagatttctgtctcaactcccatttttcaccttgggacagagggcacagacgcacaggatccctcctgttccctgaaacaatcagaaagaaatcaccataagcagtacactgctgttcatcacatcgcacagcaattactgggcgggagtacactggagtacgtacgtgctgaattaatcacgcgaggattaaatataggaatacgtacatttgtacgtataaatttcatcccagctacagcctgacgcagctataaatatctcgtgctccatgtttggaacgtccctgaatttccaagccaggcaggcaaaaaaaacggaaggaaaagaaacagagaagaagaagaaatggtgtagcttagcctcgcctcggccgtggtgtgatgctgacgcgtcgtcggtgatggcgcggccgctgctgaagatcgggcacggcctcgacaggttcaggtggcggaggtcgacgtcgtcgtcgtcgtcgtcgccgctggcgctgtcgctgtcgtcgtcgtcggcggcggcgttgtccgacgacgacccggggagccccatggacccggagatgccgcccgcggcgaggcgggcgctgtcgaggagctcggggtcgagggggaggctgtcgttcgagctgccaccgctggccggtggcccgtcggataaggaggaggcgccgccgaggacgtcgtcggctccggcgccggcgaggcccgcacccgccgcgctgcatgagggcccaccttcaggtgactaatatatatctcttctgggatgatcaatgccggccaaaattgttgccatctctcgttcaagaaatgatgggtttcgtccggaaattgcagacgcggagatggtgagggagaagttctcgaagcttctactcggggaggacatgtccggcaccgggaaaggggtgtcctctgctctcgctctctccaacgccatcaccaatcttgcaggtagtgtgtaattcacttctgtttttttctgaagaaaagaagaatctctggttcgatgatgatgttgttgcatgcttcgtttcttgctaaattccagcttccgtcttcggcgagcagcgccgcctccagccgatggccgccgatcagaaggcgcggtggaggagggagatcgactggctcttgtcagtctccgatcacatcgtcgaatttgtcccgtcaaaacaagtctccgaggatggatccaccatggaggtaaaaaaaaagaaaaaagaaaaaacttaacgtgcaaaaagattgcacgttaatatattagaaggaaaaatagtttttgttacacaacgcaatctgccagacatgcttataccgggggaaggggaaatcgctactccaattagcaggatggtggaggcagagccgcacaataaaaaaagaaaaaaaaatgacccccttttatttccattcggtagacacactgtacaacgtatcagtgaacttcattatggaattgaatgagttagtggtgcattctaattctcaatacttctatttccgaattgtttgactcattcttgtcaagcagatcatgataacccagcagcgtcgggatttacagatgaacatccccgcattgcgcaagcttgatgcgatgctccttggaagcttgctgtgctgatctttgaaccaccagaaatcaacatctatatatctgaaattctgaatcaaacaatcgtccttctgttgcacatttcccttgtggagcaggaatatctcgataatttcaaagacaagcaggagttttggtacgtgtcgaaagacgcgagtgaatcagagaagggaaacacgccgaggcaggatgacagatggtggctcccaaactgtagagtcccttctggtggtctgtcagatgcatcaacaaagtgggttcaacatcagaaggatctggtcaatcaagtccttaaggcagcaatggccatcaacgctaatgttcttatggaaatggatgttcctgaagcatatatagagtctttacccaaggtgatcaataatactacattgcacaaagaatctattttgacaatttgcaacatttttttttctagttactgactgtgttacttttttttttttttgcctgatagaatggcaagtccacccttggagattcaatgtacaagattataaccgaagatcatttcaatcctgaagaactcttaggaactgtggacatgtcagctgagtacaacatcatagatcttaagaaccgaattgaagcctctgtggtcatttggcagaggaaaatggtgcacaaggaaggtaaattgtcatgggggcatggtgtcaaatttgagaagcgggagaaatttgaagcaagagcagagaatgtcctcctcctcatcaagcacagatttcccggcattgctcagtcagctcttgatataagcaaaattcagtacaacagggtataccatgagaatcatctgcttttcatgttgtcttttcggatttgctacagtacgtatgtttactcattgcaaaaattctctgctatttttccccctcaggatattggcttggccattttggagagctactccaggactcttgaaagtttagctttcacggttatgtctcgaatcgaagatgttcttcatgctgactccctcgcgcaagcttctaatactagaacccaagaatcaatgagaatggccagcttatcaagatatgacactgataaggttgtcattgatgctaaggccgaggtagagagactgggaagaatggaaccagtttcagcgacactatttgactttgtcagtcctcgagatcaagatgttgtggcgacgaagatggactcaaaagaaaagggatgtaggggggatgctcatagtcgaaagttgacaaaggtctcaccgattgcaactaagaggtattcttacctagaaaaacttgagaatttgagtggaacaagaagcccaatatctagacactagtttatgtgtagggggaaagacatatggatgatgctcgctgcagcagctcattcagaaaaatacatgtatgtaaatagcttagatgttcatagcatcatgagatgcagaattgagcatgtaccagtgtgaggtttggcaaattttagccatcttcacctccattcccaatggaagcttggtgcacaaagctatgataattagttgatcttgacctcctgtacattgtatgaatcaatcagaatttacaccgaccctcaaaatgcctttttagtgttaattggaaggtataatacctaaactaaagaggtatacacatcctcaaaatacacgtaactgtaacagtgtctcgtatgatctcaaatcttgtaggtgggctatgcaggggttgtagttgatatagacaatgtagtatcactcaatctggataatcatatgctctagactagatagaactagaggtaatcatgcacgccattttcagtttttcgtagatttaatgaaactactagtggtgaatactgaggagacatatttactagtgacataaacgcaaaacagaagtactgaagtagtaagtagtagtatcaaactactaaggccgggtaatcatgcacgccattttcagttttttcacactaccacatgaatgtcgagatgcaaaatcgaggggagacagaaaattaaaaccgaacacatgggatcgcagtacgtcgcatgcagcatcgaattggatcctttacaacttatatagccataggaatagtacaattatatcaacatcataaacagggggaattaatccatggcgatccggccatgggggactagcagtacagtacagaggatttgcatggatggatcggatcaagaagaaggtgaggcagagacgaggaatttaatttagatcttgccgcgtgggccgggcgtcggcggcagctgcgggcccttcttgatcggaagcaggtctggcgacgccgacgcgctgacgtaggccaccagcgatccgccgccgagcagcaggaacttgagcaggagccccctcttggtgaagggccccgcgaacgtctcgaagaacttgctctgcatcgatcacccacacgaattattcagtaaattaatcatcgagctaagtatatattttagtcaggtaatactaacctggagagggttgtacggcgacggcgcgtcggagccgtacaggtcccactgcccggtggtgttgccgatgtcctcgaggtcgaagtagacgctcttctcgccgtacttggccaccacggcggcgcgcggcctgtagcaaagaaattatgagcgtgataagaattgaacacgggatctcgggattgaaaccacatacacctcttgccactgcaatatcaagtgcatctccactgttactcgcgtactcctcgtatgtacctgcgggtggtgcggcagagcgcccggggcgacggcctgacggcgagcttcctgccggagatggagctgccggcgaggcccttcacggcgacaggctggacggcgacgagggacgccattgctgcggtgaattcgcgggaggacgcaaagctgagtagatagatggatagatagccggtgtactatctgcggcggcggctacacgtacgtgcacacagacttaattcggcggatgctgttaaggatttggaacgcgtagtccgcgtggctcccgcgatggccgacgccccatagggagctcgccgcgtggcctcttccggatagccttatcttggttctcctggatttggagctcgctgacatggcgcgcctacgtggcacagcatgcctatactgaatagatcgcacaaaacacacacattgagtcgcatcgaatgcagatgaatcttgtcttcttcttttttacacaaaaaaagagcgtgagagttctttttgaaaactcggcaaaacacccatatatctgcacactcatctttgtaaaacacatacgtgtgcaccttatctctacgagcatttcagaatgactaggccggtttatgtcgagacaaagctaccacggacaccttgcatcgcctgcactaccattaaaaaaataattagtcataaatacgagcatccatattaaatataacttaaatttatctatccaattaagttaggcgcacttcgaaaagcgtagaaattttttttaatgatggttggcaagtttcactacaagaacctaaccggttaggtcgcacacacttcaaaaagtgtagaaattttgtgtggagatgcatgaaaaattatatcatggtgtaatttgggttgagcatctatcaccgaccatcactagtgatgccaatgatctgatcaatgcttggggatgtactcaccgtcatcaatccaacagtactcccctgtatcgtagagagacaacatacggcgatccagatctcgtagaatttttttattatcgtcctggacgctgtcccctacggcgtcagtatatttcagcgtactgtaccatacgtcgcatcaaagatcgtccctgtcttctcaaccgaaaatatcagcagcccaaatactgctattcgggcctggcccaagaacacccctacctcgcagcctctcatcaaaatgggcctaatgccagaagcccaaggcccaaacccacttccactacatgggccgtcgccgcacttgcgcgacggggaggcgcacccgcaccatccacggcgactttaggccgagatccacccactgctgcgcccgcgcgggccggcggctcagatcacaccgggggcgaactgctgcgatcaccgacgcgggggaaccaccgccacaccaccaccccggggcgaagccactaagcctctctctttctctctctctctggccgccgccacgaccgaacgcgacgcgacggggcccagcccacgcccaactccccctacatctcccccccgccgcggcggcgggggcgcggtgaagcttcctccccgctccgctccgccgcgctgctttgctctgcctctgcagccgccgccgccgttcccggcccttcgatcggggcggggggccagatccccccgcgcgtcggccgagtgggagtggggcgcgcgggacggaggtgcggatctgattggtctacgcgcgagatctagccgggtgctgctgttcctgctggtggttgcggggatcggagcggaggcgggggaggaggagggatggcgtggtggtcggggaaggtgtcgctcggtggcctgcaggatatcgcaggggccgtgaataagatcagcgagagcgtgaagaacatcgagaagaacttcgacagcgcgctcgggctcgaggagaagcgcgacgatgaggaaggtatggtagcgtcgctggtacactggaattgtcactctcgcccccttctcctccgtgtaattcggctgcattggggcactcgtgcttgtttgcaagtgtttgatcgaaactatgatgagatgaatcagtgtcggcaataacttttttcccatttatttcgttctacatctcgctatctgtagagattgggtaatttgatcgtaggaggatggatcctgcttatcacttgttccattacatccgatgtaccccgtaggttcttaagtcatactctatatactggccaactggagcctaagtactgccagtacccggcagctgaatcatgtgtgtttgattggtttagtgacatatttcatacttcttttccaactggttctatttgtaacagtcgttggtctatgagtagagcggtcatatttggggtagttaagcttattgtttctttgtttacatggttaaccgaattgtgtgtctttttgttgtaggatcaggatcacatgcatctaactctgatagaatagggttctttaatcctgtcatggcattcatgggaaataatggcgaggaggactctgctgaagcatcagaaaag

SEQ ID NO: 26100 - DNA, 7934 bp, Oryza sativa
gtagatgcttctgaagaatcggaatcaacaccatctccaaagctttctgaacaaggagagactcttatcagctcaactgagtcacctgtatccaaggctgaggtttctgagcaactagcaacaccaaaaactccaaaatcactttcagcaacagaagaaaagcctagtcattctactgaatcacccacatataaaggggattcagaagcaccacaatctcccacagatccatcaacagcagaagaaaacagtggatccactgagacgggtaatacaattgagacgggaaaccaggatcatcaagagacaaaatattctggtcctaatgatgaagcgccacaaagtcagattggagaatctgacagaggcatacctgatggtacaaagccttcttcacctactgaattagatcaatcaggtaacacgggaacaactgaataccttcatgctggaacggaaaacatagatgataaaaatgccatacaatcacaaccactagattccattctagccagttcagatgatgtaaatgaagctgtgaaaattgttaaaggagctgatgatcgaaatgaaataagcagttcacatgagaatactgacaccgttgaccaagctagtcatgtggaagtcatagaacatgatgagcatactaatgctgctgaaaatgatgaagaagctaatcgaacagaagcacaggtagcaactgttgttgaaagggaggagaatacaatggtgcagcttgaagaccttagctcaatgtccataattgtgagcaatgattcaaactcgcaaaatgagtcggtgcccacttctgcagatgtgcctgttggactggtagaggttggttccaattcaaatgatttgagaaaagaagaaaatatccagggctctgttacaactagcaatcatctggaatctgtcggtgctgtcgctgaacttgagaaattaagacgtgaaatgaagatgatggaagctgcattgcaaggtgctgcaagacaatcccaggtatcatttccacgtggtctactagcaacccagttatgcttgtacggtcgaaactgtatgttgagaaaactaccacatgattttccacttgtaacaaaacttcctttagtttgtgaatgcatatttgttctataaatgaagatccataaatgtttctgtgacttatggaaatatgctctaaccctgcagaacgctagttgatgaacaatatctgatttgattttgatagtagcacaatgtttttctaggaaatgaactgctgctagactggatctatctgctcaattaattgcattcaagtttcattcttctatttttggtgcagcatttttactgaaaaagagaaataaacagagacacgttcatctaatattttccacatgctcagtgagcattcctatttttgtcttatattcttggaatgcattaaagcatggacagctatttaaaactcttgtctttcatatttgcctgatttatatgaggaaacaaatataattccatgagtatatgatgctcatatgtattcagcatacagtcagaggtttttacaactaagtgcatcttttacttccatattctatcatttctgcgcaacatacatacctgggcccttcacttgtctcacaacacttcttcctgcagtccaaagctgatgaaattgcaagactgatgaatgagaatgaacaactgaaatcaacaattgatgatcttaaggtatgcttgatagcagactctgtgtttttccttctctaaaaaggtatttaagatgttatatttagcaattgctggaggttttagttaatctgtatgaaactgaatgacatgaatattatacaattatcctaagttactcagtagtgctataagcatgtgatgaacttggattgttttgttttgacatggcacagagcaagtcagctgaagccgaaatggatgcacttaaagatgaatatcaccagagagtagcaactcttgaaaggaaggtgagacacgttatcacttattaagacagtagtccgatagacataattatgctaagactatactctggtgaagttcttaaatggcactgcctagttcctgcagtcaaagtagtaaattgtttatttttcaaagtagcaggatgctattttcaccacaaaaagttattaccatattaattgataaactattttacttgttggatgcaccttacatattcatgtatttatctaaagtcggttttatttattcgatacttaattctaatagtttggattaaagcatgatgtatttattttttaaatacaggctaaccacattctttcttggtacctagtgcatctaaaataagattattcttatcgctgatatgttttatatttgcatgcttcaatgtttataggtgtatgccttgaccaaagaacgggatacattaaggagagagcaaaataaaaaaagtgatgcagctgctcttttgaaagaaaaggatgaaattatcagtcaggtcatggcggaaggtataatgaaccaacattttctttgtctcttctattatgattgcgtataaatgttaaatttgcaatacacaatgttcgttccgttgtaatgttgagacagtttgaagtgttgatccacaaatatattgcactgtgccgaataccctctgttcataacaatcatcatgattacatcacacaagcacatattagcaacattagaactatggacatggataatcgtagtgcttcaccagtaaggttgactctggttgccattggtaggcaaataggcatagacatttctctgtgaaaagggcctggaatttatataggtttgctaatgtttcttcttatgccccttttatccagctttacactttagagcccatttgattttttgcccccttcatttttatgtttagtaggttttgaggcatttatttggcatcaacaatttttttacaatgaacaggtgaagagctatcaaaaaaacaagctgctcaagaagctactatgcggaaacttagggcacaggcatggactgcaactcttatcattaagcatattttgtgcaaattaaatattttaccaatttcactttcttccattttgttttctttcaggttcgtgaacttgaagaagaaaaacaacggctgaactcaaagatccaggtaaaaaggataccaactttgggtatctatgaacattatacaaattttcttatctgctttaatgatgaaaaatacttaactttactttctttgttagacataatgaaaaatatgtctatgtttgcaataacgcaaaatcaaatttgggcctcctttagctggtttgttctgtcgtgcttgtttggtgtataccataatactgtgatattctactagacaatcacttgcttcacctgtgtaactgtgtccaaactcatgatttggttacaacagatatactcccccacccttgcacccccaccgcccaaaatcttgttagctagatagctttgagacattgcttccatagaataatggagttacttcagcttcctaaatggagtacctatattcccagtatcatatctatttgctgtcagacattgagtgtagtaatgtatttagcacttttctgatacaacaggttgaggagacaaaggttgagagtattaaaagagataaggctgcaacggagaaattgctacaggaaacaatagaaagaaatcaaactgaacttgcagctcagaaggagttctacaccaatgctcttaacgcagctaaagaggctgaggcattagccgaagcaagagtcaacactgaagccaaagttgaacttgagagtcgtttaagagaagcttgtgaaaaagaaaatatcttaattaagacgattgaggagttgaggcatgctctcacaaagcttgcatgcctgcaggtcgactattaaaatatcccctgcattggtatatctacctttcatcattgtcagtagaaatagtcgacaatatgtgctgatccaatccatgccttaaggatttgtccagttaggagcctactaactgtagatactttttgggatgttccaggctgcattcagggaagaaaggctgaaaagggattatgatgatcttcaaaggcggtatcaagtaagcatggcccttctaggtttgtttgtatattgcactgtaaaacagtcatcagctaatacttactattattcgttatttaatacttcagtccagtgaacttcgttacaatgaactggtcacacaagttcctgaatccaccagaccacttctaaggcaaattgaagccatgcaggtactggtgcatttgttttctttcccttgggctgcaattactttgctttcttcaattatttggagtctggataacacttctgcaatttgtgagttgacctcttttttctgttgtgagctggttaattaattgtgtgctaacattaacaggaaacagctgctcgaagggcagaggcttgggctggtgtagagagaaccttaaactctcgacttcaggtctgtttgtgttctgaaattatctgtttaacagtgatcccataacagcaatgaagaattctagaacaacaagaaggggcatttgttattattgtagaatgcacatggttaatgacaacaaaagatattttttaaatgtacttgagagaccagtcctttcacattggttaaaccttttgtaaatattttttataattaatatattcttactgtgggggcttcccctacatcgcaatgatattggtaacactgcaatgatatggcaagcctacagactcctctagttgtggcggctaccttctgatttcgcttttttttttttaccaaagcaatcatattagtaactgccttgccttagtgcagtaggcaaaaattcagaaacactaaaataaatatctcaatgacataatactttgttactttgctctaatatgcaggaagcagaagcaaaagctgctgctgcagaagaaaaggaacggtctgtaaatgaacgtttgtctcaaagctcatcccggataactgttctagagacccaggtttgtgcatcaagttattctgaaataaatcactattaacattaccataggtttatggccaaggtttagttttagtcagaaaggtgacttcttacaaaaatattttgttcttatgcagattacaattcttagaacagagcagacacagctgagtcgatctcttgaaaaagagaggcagagagcatccgaaagtagacaggagtacctggcaattaaggaggaggcggcaatgcaagaaggacgggcgaaacagcttgaagaagaaataaaggagcttcgtactaggcacaaaaaggagctgcaagatgcagcagaacacagggagctgcttgagaaggtagccaatctgctatgctattttttttttcaggaaaagagctggatgtatgtcattgttttgattggtttggtaacttttatggtataccaatgttgtcctgtcaagttcattaatgtgtggagccttggggaaactgtttttaacctttttaaaccgaccatcagctacaggtccgacataaacattgaactttggaatctctcttacagtaggtccttctcaggatttaacaaaagggtttgtttatgtgtgtgggtactgatgatgcttttgtatttactatgttgtttaccgcacgaggaagtttttcgactccctctgatcccaaatataggttgctttagacttgtgcacatgaattaaggaagcaactccctttcatttatactgtataggaaagatgaatcatttatttattacttgtgagaagggtggcatttatttagcaagggcaaacagggaagaacagctgcaaaagtgcgtagaagttccataacgatttactacatttggaattggatggggtatatggcatcaatcatctcttctatgaaatggcgtagttgaccataccaatcaataattgtgatcaacctacttattttctggtttatacatgaccaactcggaagaatttctcgccttacatattttattttacgaattacgttttcaggaccttgaaagagaaaaggctgccagggcagagcttgagaaaacatcttcccgtgatgcaccaaaaattccgcttccagatcagacaagtatgctgtttattcgtttttgactaatttgtacgagttcaatccaacttctttgtatctgttgcctacttgccttacctgtcgtttgtttcctctttgcatctcatgaaggaaatgctcctctcagaaagctctctagttctggcagtatcaatagtctggaagaaagccatttccttcaagcatcattagatttgtcagacaacgcttcattagagaggagaatgtctgctgaaagtaatatgtcgtattatcttcggagcatgactccaagtgcttttgaatcagcactccgtcagaaagatggagagctagcttcttacacatcgcgtttggtatgtcctttggagatttcctgaaagtactaattctcattttggatatttcttatttaagtacccttgcatgtgttcttgttaattttcgtcgtatttgctattagttgagcttgctggtgttagcacgacatgcacatgcccatcactgaactaatgctactctatattacaggcctcattagaatctattcggaattctctggcagaggagttggtgaaaatgactgaacaggtaaatcctgatgaaccaacggaagtttttttattcaactaccaacatgtgtgcaaactaaactaaattttttcaatgcagtgtgagaagttgcgtaccgaggcttctgctctgcctggtttaagggctgagctggaagctttgaaacaaagacactttcaagctctagaactaatgggggaacgtgatgaagaggtacggcttccctagaaggcaccatgactttatatttgattattttctatggtatataaaagaaacctttttccatgaattggatttatatggagctcgtatactggaattttttataaagtccctatatgatcgccaaacccacaattcctgtgccatgtaggttgcgtagctaccatcttttaaggcacaaaaattatctgaatagagataaagacaattaataagcacatgcttataaacctttacctgttatttcgtgtggatttgctctgaatttctgtactgtgcttgcagttggaagagctaagaaatgacattgttgacctaaaagagatgtacagagaacaagtggatcttcttgttagccaggtttgaagcttatcagttgaactttattttttcatttgataaatcgttgttgccataagtccctaacccccggcttccattttatcagctccaatctttgggtgctcgtgtatagtgctgctgtatgtcagtatgtagcttcggctgccatccatttttttttcgcatcgcgctaatctactaagccccatacagcagatctgaagcttggcgtgtttcttcgaaattcaagccgtgacaaataccgaaagttcatagccataccagtgtgaaaatattcgtttttgtacatcttgaagcacaagtctttttggacagttgagcacccttgtttaatttagtaggttactctgttgtatactagtttggatagctttacggtttttaagcctattgtttgcaattctttccagtgaagtgtatcaaatttgtaattcgattaaaagtgtatcacagcggaatgcaaccccaataatatgagagctcgtttttgtcattttcctcaggttcgaccattttccgtgtacctatcatatattcatatgtctttgtgtgcgaagtataaaccgcatcataatgatgaaaaaaaatcaaaaccaaatctgttctattcatatgtctttgtgtgcgaagtatcataaagga

SEQ ID NO: 26101 - DNA, 7118 bp, Oryza sativa
ccatccatttttttttcgcatcgcgctaatctactaagccccatacagcagatctgaagcttggcgtgtttctttcgaaattcaagccgtgacaaataccgaaagttcatagccataccagtgtgaaaatattcgtttttgtacatcttgaagcacaagtctttttggacagttgagcacccttgtttaatttagtaggttactctgttgtatactagtttggatagctttacggtttttaagcctattgtttgcaattctttccagtgaagtgtatcaaatttgtaattcgattaaaagtgtatcacagcggaatgcaaccccaataatatgagagctcgtttttgtcattttcctcaggttcgaccattttccgtgtacctatcatatattcatatgtctttgtgtgcgaagtataaaccgcatcataatgatgaaaaaaaatcaaaaccaaatctgttctattcatatgtctttgtgtgcgaagtatcataaaggaatcatgcaacattcaaatattcaaatcattcccagatccttcaattttattgaattcgaaggaggcatgctacatcatacaccacctcctgctttaaactacatcatcatgctacaacagtgaaacgctcggctccccgccgaagcatattcatcgcgccgcgaccgcgagcccagccaccgtcgtcgcgcgcccaggcgacgcgcgacgcgagcgcggcgaccttggggcggaccaccagcgccgcgcgcacggcggccctgaccacggcgtagacggcgagcgcgcgcgccagcctcaggttggccgcggcgacgtcggcggcgcggcacgcggcgtgccccgcgacgagcctgcgcgcgtcggacgcggcgagcgcgaccgtggcgagcagcgcgcccgccgcgaacgcgagcagcacgagcgccgtggcggcgaggagcgcgccggagaagaggcagccgtagaggagcgcgacgaggaggaggtccagctgctgcaccgccgcctgcatggggaacaagctggtgatgatcgccggcgccggcgccagcgaccagagctcgccgcgcgcaccgaggtagaggaggccggggcacatggttattataaggagaggaatcatgtcatgcgtcgcggccacggcgcgacgcgattccctcttgggtttttcttttctttttttgtttttttttggagaggttttcttccagccctctcgttgcctgtactgaacgcttggtatgcttgagcaaggtggctatataggtgccagtacgaggcaaaagggtaacggaaaagggtggtgctagaacagttcatggaaaatgcatgccatgcattctggtttaaacatggaagatgagtagtttttgatagggatgacaactgggtgcatacaggattgagaggaagtctatctcttctatattgtagccatctttataagcgtgatattattattgtcttttaagtagagtctacatggcgttttgtgatgctactgaaataaaaagtagctagcgttaccataagtgacggtacgaaagagaggcgtgacaaccgagaagtggcgagtgcggttaagttggcaagcggccacctacttttgttttttgtcatcatattgaaaagggttaatattatagctgttggcttgttgtagccatggaacaatgtgaaaagaatgacaagtggacggcgaaatggtagtggatgcatagttagacttacgacaaacctacaacctattttctatatacggatgaaagaagtgtcatttttatacctgatacacctattattcccgctaaatttcataaaaatgagccaaacttaaattccttatttgtgagttctttatattattcctttttatatcgcataaattgtgaagacacggtatctatgaatgaggtttgacaaatgctatcaatgtttacaaactactccatgtccttcctaaaattgtgcttcacggtttatgctaaaatagttttgctcctaccagaagagcttgtggagcttgtgacgattgacttgggccatgatcaccggccacgcagagcacatatgcaccaccttgatcacaaccctcgaggcctctccatgactccatccatccacttatccacagtggcttagcataggagtgtaagtggctaacctgcgaactcacttgtagattagaataagcgggttcaattatttattttggtctataaataagcttcacgggttagccgcttatgcacccttaggccttagctcagcagctcagctcacgtgttcctctctccctctcatgctcaatcccaaacccaaaccaaacttgcttagcttgctgcctagagtagcatgatgcacgcagccaattatagttcagtgaaatcacatgaaatgcatgattccatgtgtattttctctgtctcctccgtgcaaccatgaactttgcatcgctgtgatctatcatcatccatgggccatggttgattgcgcgcgtcagtgtatcctatcctttgctcgccgttccctcccccttcaacccactttcataactgagctcttactcggtctgtctcgctaaaatagccaacgttgacctatagataggaggcccaattgtgccatctcgccgaaaaagctactgatgggctcttactacattttttggtgggctgaaatattgcccaactttgtgtggaggtatggaggaagaggttgtgtttggcaacgatttatgctacaagaaattggaaaaaaaatcacttaggtccctcatctcgtcgtcaagtttcaaaatcgtcatgaaccagaatactagatataacgcatctctaatcttgcaaaatatggatacgttatatcatgatgcacacagcaaaaaaaaaaaaaaaagacagacattgacaaacacaatcacatatatgatatatgagcctactccaaaataataccttctagataagtgatgacctttgggtgaaaaaattaaatggggaaaggttgttattagttgtgatgaaaagatatgtgaagaaatagttatattttgaggtaaatttaaattctagagatagctatatatcgaggcagaaccgcagaagagagtatgtttggtttgctctcagaatgtgacaataacacacgcaagttgtcacaaatttgacactgtgaaaacttgaaccaaataaaccatgtaatcgagtctccatccaaacaaggtgctaaatggctgtgtcagggaaaaacgaaaaaaaaggcgtcgacagcaggattcgaacctgcgcaggcaaagcccaacagatttcgagtctgtctccttaaccactcggacatatcgaccatcgcgtttgttatgtatgtgccttttatattactcgaaattaatggaaatcatgctttgttaaacagttctttccaaaacaacgagagcggctcagatacagtttcagtgccatccaacgaattaatatttgacttaggaaccatcattcagaccattactggcagaggacaaattcaatttattacaggctcgtgcagaaacagcacagtagcagctctgcgagaatggccgatcgagattgcagtattgttgcaatatttgaagcatatacgtgaagttgttcacaatttaggtacttgcagaaattccaggtacagcttatcttggcccagcgaagacttcttgtgcaacagaaaaacaaacgactgttttattatttgttttacttcttgcagagatctcatggcgaagaaactccaaaaggaattcggcgacaatgtacagcaactcccagtcacaacctaaattatttgattcaaatcttttcatgtatcaatagtgttgtctttgctcttaacagttacaatggctgcatgattttacatctgtaaggtaacacacagtaaaacaaaggaagctaaaaaatctataggggaacatctagctggtggatatctgggggaaaaaatgaacagaatacaaaaaggaagtacacatttacctcaaaaaaaaaaaagaaagtggagaagaaaaaaaaaaggaaaaaaaatttggtcaggcatcttgcttggcacagctactgataatctgatatgacaattgctgaggatcaaaccacggcaacttcgtgtaatccagtgtgcggtttgttcaggaaggcatcactgagcagcctcatggccacctgtcaacagcagaaagttgatcaactcatttttacaatctgacaactcagaacctccatgccgataaaaacgaaaaaaaaaatcgaacttctggcttggcaagagaagtgacctgtacgaggtacgagcatacacagtgggtggcatggcatcaaaatattatgttacaggaataacggcatcaaggttcttatgcaatgaccagccaggggggacattgagtagaggaggttccaagttaaaattccaaaccataaccctgttgcaatcttctgggagaccctctatctggcgctcatgtttaacaagcttctcaataaatcttgactcctgcaatgaaacgtttgtcagttcaggccatatacagtgaattatcgttttttagttatctgctgtatggtctcatgctcattcagaatgatagtcatgatatgttcctgcttcttcatgagtagcgtctatagttgctttaggagatcatatgtctgcatcttatgcaattttattcattacataggccaagttttttttctcaactccaagctacaacttcctcgttttccgttagcacgcttttcaaactgttaaatggtatgttagcaaaaagtttctacatagaagttgtgttaaaaaatcaaataaattcatttttcaattttataatagttaatacttaattaatcatgtgctaatgagttttctcgtttcgcgtgcactgaaaatatctctccaactaaacagaacgaacggggacaaagtaatgaactttcatgaatgttacttagcaataggattttacacacaaaaaatagttccattagctatgctactatgattgatttatgcagtttattttgagaacaaaccagctaactcacctgcaaaccacctcttccacctgagtggacaataacagaatccataggtgggcggttccacctctcaggatcccatagcattgtgctgttgaaagcaaacccagagaaaccaactggaaatcgacgaactgcactcttcttctggatgttctggattgtattccatccagtgactcgattacctttacatataggaccttctaaaaccaccctgtacttgatcccagtatgaattgctacaggccatgcaccaaaccgcctgcaaaaaaggtagagagacatgagagagagagagagagagagagagagagcgtggaggtattatggccaaaaataagcatgctagtcttattgcattctgctttaatatgactacgggggttcctttgatctgaaatttctgcaggacagtttaaggcaacagcccattaatgttgtttcacctggtaccagaagtttttctcatagtaagtttcatcattgaaagattgcttatgatcagctcagacagagcatgacccttttgcgtaactcttcaagttttactagcctgattaatactctgatcattaggctaaactgaaagtaaagtatcgaaatactctttaattttttttttgccagtaaaagactacatttcatgaatattggacaaatcaacaatggagtaggaatgtgggggttaggtttgccattaaaaaatggtgctggttaaaaattaatcagtttcccaggactagcattctgagactagtccaaagtaactataatcaaatggagtaggaaagcaggagttaggttttattctcagtgggattgtcaaccttaatcatttctatttattttaccgaagttgctgcttcacatgtcagattactacattactgggctgcagtacacactgggaagttttttgctctactagtattcattggtatgacaaaggttcaactactaaggtggagaaactctttttatttgagttaggttgctagtcaagatacatcaagttattaaatcattcctcctactatagtggagaatataaaccatgctttggtatgaacgttacgtcatgcaactctaggagcaaaaagaattcaataattttcagttattgtactgaaatagttagtgataatttctgggaaatgccagccatgggtgcaagactttgaaactcactatgttggctggctattgtcaaaatcctacctcccatacaattcaagaggatgcattttcataaattgcgattaaggataatactcgatcagaactatttctcaactggataattcaattcatgacatagaatgcttgagacagaagcatttagcagtccactactagttcactgatttcataagcaaagaatgtggcagtcaacctagcactgggcagtggcttgtatcataagcaaggaacattgaacatttcactcacccaatatactatagaatagcaagattagaggaacaattttctaaaattggacacccacaaaagagaaagggaagaaactaaaatataataatttctgaaaaggtagagcggccataaccttatttatacaatatttttttaagagaacttaatagtcattcaacgtcaaatatgtaactacagcaaatgaagtttccaaagagaactgtcacctgattttccgcatttcttcaaatacatcactcatgtatgaccgctcttcatcagcaaaatgcattataccatcaagacgatgctttttaatatgatagattgcagtattcctctgacatacagcaattttccgtacactggtagtattcttcctgcagatgagatgcctgtacataaccccagaagacctaaggatttctgctgtttgaaaggactgatcaggccattctaccactaaccacagaagaggagactgtacagttttcaagacatgagccaaacggttcaggtaatacggctgttgtggccgaacagtagtgatcgtaccaatatccagaagctttctcacagtgatgtccaatcattgaatcaggtattgcaggggtgat

SEQ ID NO: 26102 - DNA, 5739 bp, Oryza sativa
cagtgctggaggtcgcggtgagcgaaaatcggtgttgccctgccgccgcgccctcttccctcgctcctcgcaatcaggcattgagcgatgggattagttcaaagacacaggacccacgattggtaagttagtttggatggccaagtttggccagcgaaagaaggaatttggcaactcatttgatttagccatccaagtatagaggctgatggagtgatactttttactaaagttaccaaattttggtttggagaggttattatagaggccgctggaggcctggagatgctctaacctctgctgctgcgggtgcattgcagcttctggccctgccgaccacccgtgtccgtgtgtatttcttctactagcttcagatcatgcggtccccgcatccttcgcaagccagggcctggatgagatcacaagagtgcatgttaggatccccgcaccacttgagccgcttgacgcactgccactgcaccaacggaaccctcttcccccggcggaatccttcagcggtcgcccactcgccccaccttctactttcgaaaatctcatcaggatttgccagaacccgtgccgtgaacagcaggaggttagaaacctgatgccgcatcgacccttgtcaccgcgctcatgccgattttacacggcacaagtgatggaacattcatatttgttggtgacttgtatcaccataaacaccgcaaacactgcgacacaaagatcaaaaaaacaaaaaaaggaacactgaggtggtgtttgaattcagggacttaattttagtctctgtatttaaacactaatttagagtattaaatatagactacttgtaaaattaattacataaatgaaagctaatttgcgagataaattttttaagcctaattaatccataattagaaaatgtttactgtaacatcacataggttaatcatagattaattagactcaatagattcgtcttgcgaattagtccaagattatgattgggttttattaatagtctacgtttaatatttataattagtgtccaaacatccgatgtgatagggacttaaaggtctagttccatctaaacagggtctcatcgacactttgtctattgatcccacaaaagtagacagacagcaaagcattctgctgttggataacacaattatcatagtacaacaaaccaacactacaaacacagcagcgatctacacatgtcctctctctcatctcaaaatacagaaactagtacaggatttgacattacctaagtactccagtacaataacttaaaatgccccatgcccatatcaactctgaaccttggagcaaacttctgccgatattaccttcagcttcttttgtagagtacttacctatgcaaatacgcaccaggatttacccctgaatctatttatttctgaaggctcattttgattaattaatctccaaatagactactagtgagtagtaggtctgcacaaatgttgctctgatgcctgcttacttccgttcctgtcccctttcttcacttgtgagggacgagtcaatgctgcaaatgaaaagaagaaaaaaagagaagcatatggttatactgtcaaatttaactactgaattaaagagttactcagaaaactcattcattcagtgatgcacttcccaaagagtcctaacatgccggaagccatacaaaaggcttttgctacatgctactagtaaacaacttgctgctatacctttattcagtgcaagctattatcaatagaaaacactggcttatctagacgcctagaatatttttttagataaaggagatttcttgggaattatcctggtcacaagacaacttcctaagttctcgtcagatacttgcagcataaacatactagcaaaaggctaaacgacccagcatgacacttggtacaactactccaagtatctcgcaatgtgacttggcagctcagcgctgttcccttccatagtcaggagcttgtagaaaagatccctgcgcaaggcagcaaccctaccctgcgacagacaaatgatggggaatcacggttattattcaggttaatcgaattggtggaaagaaaaagaggaaatgtatcaatgcaatgtgctcaccgaatctagaacattgctcagcttgccatcatagaactcgcgcgcatagtataatgtgtgaaaaacagagttccatctgcagcaggaagatgactcaaatttgttatgggatgaaatttcattttcttttctttcttgtgtatgtgtggcattggcagaagctacccacttttggcacctcgggctaatctttgtgtggtacgtacatgtccatccatccgggttaatatcccagtcatcgaagaatttgtttatacatgttagcaagcctgtgtggatcatcgtaactgtctgacggtgcttagcactcacatcggagacctcccggtgttgcaagacagggtccaaaatgtgcatttgcctcttctcccatgtcccaaatgtagcatgcccatgtatcactagctaattgaaccggggaaatgagctgtattttcgaaataaaatggttcactagtcagtatatgtgatgatcaaaggagattggataaagaaacacaatatataatccgtaccagttggcagttctgtattttgtagccgctaatatgttgatcaaacatgtcactgactgctttcatggaactgaagtttcgttcaaacatcaaagctttctaaaaccaaaatcaaggggaaaagacaccaagctttggtcattgttttaaccatgatttcttatatacatgtacatgtatacatatgtatatacatgtacatgtacatatgtatatacgtatatatatatatatatatacgtatatatatatatatatatatatataggacattcatatggggcaccatggtgcccgggcaccatggtatctaatgcacaaaattactcaaatttttcaaaattttcaaattgtgagtatatacctagttataataatttgattcatacctatacttatcaacaaaaaaaactcaaatttaactttatttcacaatccatgattacatacctaactaattatatgtatggatgctatatacctagaatcaaaatctaacaaaaacaagttcaaattcagttcaaacttgctttaaactagttagtaaagtagttaatgttaatacctaagtaattgaaaaagtttcatactcatttgaattgggtatatactcaatttcaataatggtgcccgggcaccatggagcaccaaacaaatttactatatatatatatatatatatatatatatatatatatatatatgtgtgtgtgtgtgtgtgtgtgtgtgtgtgtgtgtgtgtgtgtgtgtaccgcgaattggggtaggaagaagtgacgccaccgctgcccacatgggtttgtattcatcttggcatctaactgttggtagagtctgatcaatgctgaacaaaggtccgcatgtagaataccaccgcggatgacctgcattttgatttccttggcacttatctcaattgatgtaggcttgtcgtgcttgaaccaaacccttcatataggataaacaattaaaaatcagtacaaagtttttgtgtaatgagaattcacgcatttttaaagaactccttttgcacacacccggttatatcgtcatcacatgactcctcaagccaacggaataatctcccagctaatatagagtttggccaccattcatgaactgtgcgcattgaaaacgatgacatgcaagatggccttagatgattccccgcctctttcgtcatctgcgtctcgcaacgttctgattgcccttggtacttatcctgtgcaccattgttgttttgatccaatgtggcgccgtctcctgcaacagcagcaacacaaacacgatagatgcatttcattctttaaaatctctcatttaatttgttgtgtgttgggtgggttcaaggatatatacgaggtgtatacgtactcatgttagcttctcccacagcagctgctgataccaaccaatcgaggaaacatttgtcttgcgtttggaaaactgtgttttggacttgtgggggaaaaacaatagtcacattactgcacattactcagaagtgtttttaccttttttttttcttggcaagctaaccttgatccaacccacgatggtttgtatgaactgctgacgtcgcttgggctggtgattttaatagatggtgatgtgcgatacgggccgtgcgtgacaccgacaacggatttgcacggtcagcagctggattttgctgccctcttgctgcatttgccaatttgtttggccctaacaagtcacctttgcctgtgatggattgaaatgtttgtgtcatgagtacacatatatactcgatcgaaaaatgcaacatcatgtcaaacgcaatacctctcaaatcaatgggggtttgggatctatttgctgcagaagcctcatgtgacaacttgcttcgtttacgagtagtcttggcaccttctttgacatgcatacggtgcacagaaactaattgtaagtgtttttcttttcactttgaaaatgtagaaacctttactagtatgagcttaccaccatgtgatgcagttcttcgcatcgttgctgctagcatatcgtcagtatccacaccttcgattgcgccatgtaatcgagcgttggatcgatcgggatttgcttggacagcttgatccattacagccgagtaacatttctcaccgtgttccgctgccaaagcctgcatgccttccgttaaagatgaaaaaacgaggccgcatttctcgttgtgcttcgctaacaatgccagaatgccttcctgcgttgcctgaaatgaatctttgatctctgccatggcctcatccaacatctgcgtgcatcgttcgccaaaatgacgcgatagatcggacagctgcaacgagaatagaaaaaaaacacaaatattaaggaaaaatctaatatcaaataaatagaagaggtgaggctttaaacccaggctagctagctagcccaccaccttggaggtagcgagaagaccctgggcgtttctcaacaaaaggacgggattaattagtttcagaatcgatttaattagcaaggtgtaatatgcaactagttttgttgggatgaagggattagcggctaaccttggcaggcaggtcgttgccatggctatcgctattgctcgggtcagtgtcgtcgtcgtccgaaacgtctatgggctcctcgtaagcatcacaccgagctttacctttgcccttcattgatgaagaaacaactgactcaacaacattttttcgcttcaaaatggagtactacgcagtaatacgcttagctttgatctctaccgtcttagtaaagcacaatcgtattttttcccttcccactgaaaaaccgctgaaaaaaatccattgtatataaaaaaaagagaccaaacctaaagagattctgaaaaagagagaaaagaaagaatcacgttcagcagatcccgtcccgttgcaatgcttgagcccgaggcagcctgtgactactccctccgtccctcccaaactaataagcgtgtgtttggtttggggacaaagtgggatgggttagacctatcccagttttttaggatgggatagttccagttgtctgtttggtttgtggtatgggatggttatagttttttgtttggtagaagggattgaggtgggatggg

SEQ ID NO: 26103 - DNA, 16431 bp, Oryza sativa
tcccaggtgggacgagttcgtccggctctttttcccggatcgattggtcccggatgaggaatattactctccagggaccaatccatcctacccacccctcaaccaaacacctctaaaaggttcgtcccatcccatcccagcaaccaaacactacctaagttcatttttaaccaatctcacacataccaatacaaaaccaaccaacaactagaatacatatactttattaaatcttaatgcaacgataactctaaaaataaacttattttaagataaatataaaagctaaaaacaaatttattatgaaacggaggaaataattcctactactagtaacagtgaaacaccatcatctcgctgcaataaacccaccattttggccccaaccccttctagtgaacgatgccgtaatggcgtaatgggccatattttgcttacagatactcttttcgtcccataatataaaggatttttaagggacatgacacatactagtactacaactctagactgatttgtcacattactcgaaaatcccttatactatatgattgaggaaatatttcgtctaggctgaagaaaaaaaaaagaacagtagaaaaaaaaatgcacgaagcgggcggagcgatgagaggggggattgtcacctaccttggctggcatcctgcacctcgtcggcgccggcgggccgcgtttgccgctacttgggaacgttggacggcgaggaaacggcggggaagacgacggcgatccttcctcatcagtgggagtgggactggaaggatggaagggggaaccagcactggacctggagaagatcatggccatgggtgctactactagtccaagagggaagtgagctctgctgctgctgctgctacttctactactccagtcaactgagacacagcaccagtcagcatggtgcttgtgtgagaaggaacggcagccgaaactgttgagagcatcgcgaagagcatttgctacttctcccagcagtagaactgcatttgatagaaccgaagaactgctactccaacagtacggttgagctgacagcattttctatcaaccggagaactgttactccaacagtagaggttgcacagtcgcagcctgtgggccaccacggcattggttcctttactgctgtagctgccacctgccgcgcggccgccggaaacacccgttctgccttccgccgcctctgtcctgccgaccaccaaaaaccacacagcacaccgcatagtgatagattagtgtatggagtaattaattaaggctgtgtttagactgtggaaaagttggaagttgaaaaaaagttggtagtttatgtgtgtaggaaagttttcgatgtgatatgtgatggaaagttgagaatttaggggaactaaacacggcctaagaattagcaaaaatttaaaaataagttaatatgatttttttaaacatttttatagaaaactttcaaaaaccactattagtagtttggaaaacatatgtgtaaaaaacgagagagtgaaattggaaaggcgtagtaaataacacaccgggggtttagaatttcagatcatgcgatcttcgcaagctggatgagatcaaatgacaaaagctgacaaattaggctgctttcatttctcctataagagttggatgaaattttggatactcgtggcacgtttttcaaattgctaaacggtacgtttcgtgcgaaaactttttatataaaagttgctctaaaatatcagatcaatccattttttaagtttgttataattaaaactcaattaaccgcacgttattaccacctcgttttgcgtgaaacacttaatttttatcttcatttttatctccaggagatacaaacaccaccttaatcttcattgtcccaacttagggtgtattttagagtagaacgaactagaagatagaaaagatatacaaaatgagaaaaatcattagcgcacgattaattaagtattaattatttaaaacttttaaaaaataaattagtatgtttctaaagtatttttttcttgcaaaaactaggattgctagcccacacactcccaagaaaataaactagcaccaagcccagtcgacaattgctagccctacaaaggggtcaaatacgctatgcccatcaccagctccaagtagccaaaccctgatggacatccagccattgccacagagaaaggttgtgaggggagagcgtgagagaagattcactcgtcccccacaaagactcaatggcgacatctaagtgcgtcgtgcgcagaataaaccatttgaaggctgagatggtaagagacaaggcttcttagacaatgcctccaaggaagtcacggtgctagaaacactaccacaactgccttgcctacctatccactgattacacttggctttcaagtaaagaatctcactaggaaggagagggaggtatctcgacaacaccctcaggagagatcacaacgcccaaagcgtcaccattgtcgaccaagatcaccaagctatgctttcacttgtaggccctcccctaacattgcagctctgtcaccctaccaccaagcaactactactaccagtatgcgatcttcgccaagctggcgcccctccactgaccagctctccattcgaagcagacctcaagggaccttatgccgcttcctccgccacgttaatagccctttgtcaactaccatcacttctttcgtgcatcagatcaaagtgcacccatcatgtccgcctccaagcgtcgttcctcgttgtaagcctcccacacgaagcgagggcggcaagatccagccacctctgttgcccaaacaccactccgtcctttttccaaagcttcccatgatctgatctgataagtagatcagccgtagtatgggagaagcactgaggatgaaaagagagcattcccaacgagtcaacgccaatatcgctcacggggaggcatggtcgcatggggaagagggaaaaaggttaagacacaaagaggcatgattgcgacaaactgacaatgcatcaacttttggttggagggatatctctccatgggagatggcaatttaacttttgagtgtgtttaattggtgggctggatgagtcgtcgagagaggaaatattccacaaagatatatgaagatatctgcccttgctaattttgactattagtaattgattagcgataatatattttgttgttaattacttcctccatttcacaatataagtcattctagcattttccacatttatattgatattaatgaatcaatatagtatctagattcattaatatcaatataaatgtgggaaatgctaaaataacttacattgtgaaacggagggagtagtaattaacgtgtcactaattagatgtaagtagtccaattttttaatcaattagtatagtttcgggtagaattaatgatacctaatctttgtcttcattaccattacctaatagtttgttgtttatatttaatccattctagtcaatctaaacaaataagaaattgaataggcaaaaattaaactaccatatcccttaaaatataaatggtcaatatcttattcaatcttgacaaccaaccaaatacatctttattagccacaattcacacacggcccaagcaatccacacacggcccaacccagaaaccttccagattcctgcacctctcgacacttttggcgtcaccctcgcctatgccaaatgccaatgacgcactggcgctgcacgaactgaacccacctgctacctctgaaatctcttcaggatagccaggaaatcttcaggataaccacactcgtttccgtgcacaacaggctagaacccagatgctgcatccctcgctccttttcaggttagggctgtgtttagattcaaagtttggatccaaacttcagtccttttccatcacatcaacctgtcataaacacataacttttcaatcacatcatcaccaatttcaaccaaaattcaaactttgcgctgaactaaacacagcctaaaaacacaaataccgacagaattatagccgtattaaatagactaaaaaataattaattgcacagattgcgactaatttactagacgaatcttttaaatccaattgctccatgatttaataatatggtgctacaataaacatttgctaataataaataatttaggcctaataaattcatgtcgctatttaccgacgaattcgaattctataattagtttttttattagtgtccgaacacctcatgcaatactctatataatactcgatatgcacgccaaaactttacaccctcgtctaaacaccccccatcccccatgtatcgatccattccataagactgttacagcgtcatgcagtggcacggtacaagtgataccatcacgtacaacacgttacagatgcttcatcttacagcataatcttccaaaaccaaccagttgtaaacttggtttattatactctcacagaagtagacaaactgcataccattctgctgtcccgtaacataattattacgttggtacaagaaaccaatgcttctaaacatagaagcgctacaaacacaaccgcgatctgctacgtgtatcgtatgctgatcgcggattgttatggaactggagatacagattacagaccggctacaataacacttaagatgcccccgggcccacatcaactctgcaccttacgggaggaaacgacgcctggtgccgcagaagcgtgcctatctgccatggatattaccttcagcaatttgaccgggcacttatctatgcaaatatgcaccaggatttacccatgcatctatcgactacttaggctcatcttgatttattaatctccaaataaagtagtgagcagcaggtcttgcacaaatgttgctctgacactcgcttgcttccgtttctgttccctttcttcccttgtgagggatgagtcaatactgcaaatgaaaaaaaaaaattagcagatcattcaactgccaaaatttgaaatttataatgtatacctcccaaatagtcctaacatgcaggaagccatacagcagcttgttctacacgctactcatcagtcaaacaacttgctactggacatttattcagtacttcgtacaatgctattatcaacggaatatactggcttatcttattggactcgaattattgtgatcaaacatgagctcatgttctctgaacgtattgtacttaaaattgcattgaaactaaacattgacatagggcacgagtacaacaatagcttttatgaaattttgtgatgagtcagatagcgatgctagttctgaatttgcaagacaaccaagtctcaggtgttattcaggaggataacaaggaacaaggtaatcactacaaccttcgagtataccacgtgtttctatctagcacgaacaagagcaaataccttgaatcccatggctgagcaggtgtctcttttatcacagatgcatcatctggaatggaaataggtggttttgatgtttcctctgtgtctgatgttggaaagctaaggccaaacgatgacagaagagggtcagctgaaatatttgttgtgttgctgctgttgtttgacctatgtcccccacctcccagaagcacctgcaaatgggcttcacgtagatctcgactcagcaaagatagggcttgactgcctggaataacgaatctgcgcaacctgcgacgattctgcaggttgtataaaattagcaaacctcaagcgtgaacctctcaaaactcaaaaatatatatcttttatgcatcagctgtcatccacagcatgtattacatggggctgattggttgagtaggcactagataaatatacaggaaagcggaagtaccttgaacaagtacccatgttgcacagtgatatgattaagcatatcttttgcaatcttatcagaacatatagggcaaggctgaaatgaaggaaagaaacaatcaaaacaagacaataaactgttatctagaatattacaaggaaagaaaatatatttccagccatgtatagagcttgcagtagaacagataaacacaagattatgcagttgaggaataagaaaagaggcatctgtgtgagtccaacacagaacaatttgatttttttttcacaaaatacaaaagctaatctgtttttacaccttacgcaaagcagctgcacaacaagatggcaagagcaaactttctctttcactccaggttccataacacatactcaagttttacctaataaacgaactagtgaccatatgaacttcggacaagctgatcctgaaaactgaggcaagcaaaatttaggcctcctttgaaacaaaggatttgtggaggaattttgtaggattccaatcctataggaaagtttcatatttggtcctctgaaacaaaggattggagcttctcaaatcctatgaaattccttaggaatggctcaatacatgtagattttagaggaaagctagcaagagatacaacctcttggaaaatttcctttgagtctatctttgtcatctatttcctgtgcttctcctattcatgtattttaccattcctcatttcaactggagccttaacttatctttggagagctgatggctatatatattaaccacagttaagtacgctatcatttcctcaagcatttgcttataacatcaacgattgccaacatttccacttcttttttttttgcctctccatatacctatttttgcgcagccccaaatctggtcgtggctccatgcaaaactacaaacttgattactactttcgatgcccaagagaatgatccaactaaaattgcatcgctgtacaggtcaacacctcaagctttccatcttttaattcagcaacatatgctctaagcatgagctcgtcctccaggtcaaccaaaacaaagaacgccatctcttctactcatccaacaagagcagattacgagggggacgaacaactcaccgccgcatggggctcgaaggggtgctcctcctccaggtgcgcgcagagggagacgacgtcgtggtcctcgtagcagtaggggcacgcgaactccggcctcacctcctcgtccatgtccacctcctccatccccgctcgatctgcacccagcaaaaccaaaccaaataatcagaaaaaaaaaatccccccattaaacagcccccgcaccgcacggcaaaagggagaaatcgaacaaatccgaggagaagagagagagagcgaggtggacgcaccggcgtggccgagctgcgcggcgtagaaccgcttggcggcggccaggcgcgagatccagtgctccgagtccataggcttcggcggagcgggtaagataaggctcgctcccctcccctcccccactctcctctcctcgtagcgttggccgccgctcctctcctcggctccacgcgatcagcacggcggagatgtagctcggcggggtcgtcggcggggagaggaggaggagggggaggagatagtctcctcgtgccttatcgggaggtgaggtgaggtgagatgcggggcaggagtgaggaatggagctaggtataccgcgggtttttttttttattctttgggcaccgggtcgcgactcgcgaggtcgccgtcccccgccgcgtcatcgactcctcaccagccaagccggtggctgccgctgcctcccggtgtttttgggcggttttactcttaccccgccgtgaaacggaaacacgccgcgtcgcctttgtcgccgcccaccgtatggtggattggtggggccacgccgcggcgccggcggcgttcgcgccaaatgcccacagcgtacgggcgtgggagtaaaattcgttggcataaaatcgcatccgtcaccgtgagcccgtgagaccggaccgtggccgagacggcgaacggccgaggacggggtgagccgggctccgcttgaccgcgtgaggtcggcgcatggtcgggctagcgtgggccgtggggtggagttcgtgtgtcggcaacagcgtggtggtgtcgctccagcgacgcgtgttggtagccatggcacatcgggacgaccggacgagtatacgtccattcttctctcagtactccctagtccctagtcttaaaaaaaaaaactcaattcctaacgttagttccaatttttttttccaaacttctaactttttcatcacatcaaaactttcctacgcacacaaacttccaacttttttatcacatcatcgtaattttaaccaaaccaatttcagtgtgaactaaacacagcctgtttccgtatataacgtttgaccgtccgtcttatttgaaaaaattataaaaaaatttaaaaagataagtcatccataaagtatgttttatcatctaacaacaataaaattactaatcataaaaaaaatcatataagacgaacgatcaaacgtttgacacggaaatccaagaattgagtcttttttggagcggagagagtgtctttttagaacggagggagtaggagttactagcagtaactcagttcagtcattataatttttaaacggttaaatgtgtcaaatgctgcgtttcttgaaagaattttctatataaaagttgcttcaaaatacgaaataaatttatttttcaatcttctaataattattaaaacccaattaacatacattaatgatttttttcctaactttaatctacggggccatgaccggagttgggtgcaaaagcactgataagcctactaccattctttaacccactcctaaattaaaccctctaactaaggatgcaaacggaccgacccacgaatttacttataggtcaaatactagatgataaccgcatctaaatatgcaagtgggtcaatatatactcatttttaggtcaaattattaggtaacccgcgggttacccactaatttaactcgcgggttacccactaattttatctataagtgggttcgcggacaagcccgcttgcaaccctacctctaacccaaaactatcttgacttgtcaacaattacggattacgggtacaacttcccagtccatttcagaatgaacattttgtaccatcaaaatttcgtgcaataggtacaacaacatctacacctaggcatttttagttttttactccaaagcaatgtgaatcagactaccaacctgaaagagattgtacaaaggaattcctcctctatgcaccacaaaagctgtgtataacgtttctactagttctcatcagtatctcacacatctaaggccgcattgcctttttgcatcgtgtcacatgacctgaaaaagctctcaacgagaaattcgtcgcggctgccggatgatcaccagttcaacaccaccaacacaagaaaaggctttgatactacatcggtgcagttgctcgatctactgccccagcagccgcttgacgccggacttctggtcggcggtgagcctcgccgggaacttgatgtcgaacttgaccctgagattgcccttcttggaggggtccttggggatgggcatgccctcgccgcggacgacctcctcgtagcccgggttgatgacggaggtgatcgggatcgtcaggctgcggccgtcgagcgtagtcaggtggacggtgtggccggtcagggcctcggcgagcggtatcttctgcgtcacgacgaggtcgttgccgtcacgggtgaacaccgggtgcggcttctcgtcgatgatgaagacgaggtcggccgggatcacgttcggctgctcgtttcctttctccgggaaggtgatcttggtgcccttcttccacccaggcttcacatcgatggtcaggatctcctccactggaattgtcttcctgcacaatcacaatgagcagcattgttcagtacacaatacgaactgaaacataaggctctgccacattggattattagattaaggaccgaggagaattgctcaagcaattgattaaatactaatatagctaacaaatacaactagcttaaagaagttgtctacacaatgcagtttgtgaagaaatcataatattagaagcgtggcacaaataatccatatctcaattactatctatctagaacacgctgtaatttggagaatgtatgaaattaaaactatttggatggaaacagttttaagcatccatcccaaattcaattgacacaagtgctgcagtactaaataagtactgctaacaaaaatcgctaatggccgttcgaaaaaaacaaaaatcgctgatgctaattgcatactaaatcaaaacagttttaagcatccatcacaatttccaatctgataacagtgctacaatactaaatcagtactaacaagtgacaaatcgttaatgctaggacatactccagtaaacaagattgttaattttgtgatctgtgaagcaaagggagagagacttacccactggcgtcagcgatttccctggaaatcttcatcttcttggtggtgcctttgtagagctcctccaggctgcacggcagcttcctctcgatcgccggcgccttcaacgccctcccggcgccaccgccgtgcatcccgtggtgcccgtcggcgccgccgccgaacgccgagccgaagatgtcgtccccgaagatcgacgacgagaaccgcgtgccgcctgtccgcatcccgggccctccccccatgccgccgcccatgccaccgcccatgccgccgaacgggctggacgagccgaagaactccgcgaagatgtcctccgcgttgcgcgggttgaaccggaacacgttgggcccgtcgccgccggtggagaagaacgtcgcgcctcccgggccggccccgccggcgcccggcggcgggacctgccccttgagcccctcctcgccgtactggtcgtacaccgctcgcttctgcgggtcgctcagcacctacgccgacacccagcacaagcacaaacacaaacaccatggaagcgtcacgtcattgcccaattcagcaaaaaaacgaatccactcagaaacagatctctgtctggctgcttacctcgtacgcctcggagatctgcttgaacttgttctccgcctccttcttgttgttggggttcttgtcagggtgccacttcatggcgagcttgcggtacgccttcttgaggtcgtcgtcgctggcggccttgtcgacgcccaggatcttgtagtaatccatccccatgggctaaaaccttcttgagctcgatctgttcggcctcttgggtgtggtcgcgtcgcgttcttggctattctcgccggagaggagagcttcgtgttgccgtcgctgcggttgtgtggtttggtacgatgctggggggagagagaggggggaagaaaagaggggagagagaagagtctggagagggaggagagaagaggagtgtggagatgggtgtggaagcttccagaacgtcctggagggcgcgcgcgctatctcggtgcacgtgagacggacggacgcgtagttggttcggttgggtcggaaatattctgcgctcatccgtcgtcagctgccagcctgccacgtttgcagcttgggtccaaacttttcgatgagagaatttacgcaagaatttatacgattaaaatgttatataaaattttccatggagagctttgattttaaggatttggagttttccaaatcctacaaaaattactatgagtctcattggttagcctaataactcaaaataagagctaaaatttgaattttcgaatttggttttgaagttggtgggactatggaatggctcattgcacgtaggttatgcagtaagtttgacaagaggtctaactttttgaaaaaattcctttgaatctatctctctcatctaattcatgtgtttttcctgtggtccaatcaaacgaccattcatatatctgtttttgtgttttacaatcctccattttgtacttgcattcatatcagaatctcgtgtttttttatttctatgattcaaagggcgtttcgtttttggaattcgatttggcatgtggtctttgtttttatctcggattagagtttgagtttctgttcttcaaattttgttcgacattgacaagttttggcaattcttagattgctaccatgtcaattttttataatgtcaaattttagtatggttaatttaacaaaattaacagcccataacccccataacgaaagcgccaccgagaccaattaccggcgatgccttctcatcaagccggatcgactactcggcattgctacatctgcccagcaactcaaccaaaggagagatgaactcggcatgcatgggagtatcaatccggacatctctatcgccttcggcataaagaatagtacgatcatgttaggccaacccgagattagaactcgcagcaaggaatgcaatgcagacagcgggttccatattggatgggattttatcgggcttcccctcttaacttttcctgccgtacgaggtaactttgtacgggaatgatttccgacattgaatatactgtgtatacatcctgctacatgttggtaaattaccaatacacttctacaaaaccgataatcctctactatgtatggataaaccatctgtttgagctagatagaaccagatgtaaaccgtaccatcacttggttgccacgtgaccttcaaaaggccagacttcttaattcattcgttttattcgctatactcggaagaatatgatgtaccgtcttcatcctcgtcaccgttctccgctccaccaccgccaccatcgccatcgtcattgtcctcgacatcatcctcgcccatctcagcatcgtcgttgtcttcgtcaacatgctgttctgcatcgtagtcctctccatcttcctcaccatcttcatccccttcggcatcttcttcattatcgtcactcccatcatccatcatctgaagagggctggacccagaattgtcccttgaataatctgggagcagctcatcgtactcctcgttcatgggttcactattttcctcactcgattcctctgactgagaagctgaattgtcctcatcatccttgacatatgacggccttctctccaagccccactcttctgcaccagaactctgaggagactccatggctgttgtatgctttgcattccttagcatgctaaagctgcccagcaagtttggctttggaattgatctggctccaatatctgatggctgccgaggtctaacagttctaagtccacgcccacgtccacgattacgccctcgacgagcatactttcgaggagctttctcagatgacacggcgctggcactgtaacccctgaactcgatcttgggggagctgctaatacctcttgggaccttgccaccacgactccgggatctgcctcccctgctaccgcctcgactacctcgtccacggccaccccgaccgcctcgtccgttgcttggagttagccatgtttcttgtcgatcaaaacctgttcccataggttcagtttcttgtttggtcttagcaggagtatatcttggcggaagcttctgcatagaagtatcaacacaattacacaaagggacagctagaagggtgtgattcaaaaagaacaaactgctatataaatcacatttaatgaatgaataacagtattttacgctatctatttattttccttgcgtaaaaacctcaatacaatgatcataagaaataagactcaccatgaactctccagctccccgctccttgtttgatcccaccttctgacgaagagtgtatgagatggcagaatctaggtctaacaatcttaagacaacagcagcaacagtgtcaggaacccatggaagtacatcagcagatccagaacgtggaacagtatttcgagaagctgaatcttgcgtgcttaaattaagtaactcagttgttgtctcaaagtcagatgacaagaaatcccgtcttatggcaccttccagaatggttagcatctggcaaagcatgacaaagcacaattcagaggctgataggcatagccaatatatacgaaaaagctgctatcaaattgccaagatttccattttaaaaatcaaagcatttatcttgcagaatcaatttgtcacggcaggttttttaacgacccattcttccaaagagaaccccttgaactaaaaacacttcctaaatagaccaaacaggaccaatatgatttagtcttccagcaacatgtgtatcatggcagctaaaataccagtacagtaaacacagcttatttagtgaaataatttcctataagtatcatgttactcttgccaaagaattatcctcttaataatttcctatagagcaaacacagcttatggggttccaagtgaaaccccaatggaccaatgcaacttatgtctagcatagtaatactcttttagcctgctattgcaaatacagtagaactcagtgtaaaagatgtcctcaaaacggaagtaaggaactgctgggtgtattaaagaaagagaaggaaaagatgcacaaacctcaaagacttcttttgtagacgatgtggaatacaacttcacaccccaagatttccgataaacatctgtccagaatggttcgagagcttcagctggaactgaagcctgtaaaacaaaatgttaacaagttagacacactcactacttgcactcaacaaaatagaaagataaggccacatcagaaatatgttgcttgacctcaacggttgctaaaagcagctttagcaatctcaatcctacaggaacagaatagtctgaaatttgcatcttccaattaggatctgttctccgtttctcttcacactgtgaagagtgttctgagatattgtgaatggatttgaatgtcttgtggcaagaagcacagtgtgtttcttcagctaagtaaatctgatagcagaaatcacaacattgtatcagctcagagcatcgtttctttccatgtttcatggcacatgttggttggtgattgttgcattctttccacatccactttataaacagatcagccctttctgaaattgcagtcttttcaacatcattacgcccaagttctatcctgaaggaatctgaatatgccatagcactatcggttgcaacaccagaaagggtactgcatggacttccaaactcgttactatgattcggacttatgatctcactagttccatttttcaaaacccttccggccgacggttctatgctggcacaccttttcctcccaatagcttccttgaaggttggttcaatgctttgcaacattgaatgaagatgtgactcacggatgccacgagtatcaagagaagatactaatgcatcaaaagtctgcatttaattaggcataacattgaaattatcagagacccagaaagtacttggacaagggactcttaacatcaaaagctggttcttagataaacaaaacaaaggacaatataccctaaatagagcacatatccatttacgatgcaagtattcatatatatataaaccactactgcatgtagcatctaggttttctacaactagtcctgggaattgttcagttgctgttatcaagtacgagcccagaacaccacagaaaaatcttgaatcagcactccgataggtatcaatcatccaagagagaagttagaaaagcctaatctttgattgaatccaagcaaatgcccgtacaatttagtaccactgctccaccagttaaaacactggatcatgacttaatcatttaactgatgtaacccagaagttgtgctcgacatgatatgtccctatccttagataaataaaagcaagctttaaaatagaagcatatgggatagtgagaactactatctaagcaatatggctcatgtcaaccaccaagacggtttacattttcaagaccctctaaaataattccactttactattacaactgtgacatcgtctagtggtatggacaaatctctctttatctaccataagtaaagctgatgtagcgtcctatttcaagggatacataaattacatgaaaaagtgattaatcggcacatcgaaacacaaacctcaccagctgaatttgtgctgttagtataatatgtattgtgaataagctatgggttacaaaagaaataaaaatacctcaattgagtcaatcagcctccagtatccatctctagattcaaaaaagatccttccagaaccagggtcatcgggggatgcagaagttgaaaactgccagtaccggtttcttctccgatcttgcccgaggggtagtgatctgtatacatgaagttgttctgctttgtggcctatatatgatttcaactgagatcttgttttctcagatgtaacatattgttgaccagacaaattttctggattagcactaaattcctgccttacaccgttcctttcatgaaccacgctgcaagcattaggctgactctgctgatcga

SEQ ID NO: 26104 - DNA, 1059 bp, Oryza sativa
ttttctcagatgtaacatattgttgaccagacaaattttctggattagcactaaattcctgccttacaccgttcctttcatgaaccacgctgcaagcattaggctgactctgctgatcgacaggcaactcgttgtttactaagctgccatttccattactgtctttaacaaggttatgcaccggtgtaagattactttcggcgagagtattttgttgatctacatcggtctttaaacccataccagaatcatattgcattttactagaaaattcctccctcgaacgtcttttatcaagttgtgcttctgcccacatttgctttttcaaagcacttgctgcctccagccgttcctgcaaagatccttttggttcagatgatgggaaaatgacaagatatcaagatcatgcaagataattacctcaagaactgcacgtatagaatttccttcagtggcaacaccaatcaatgcaaccaatgcattgaggcgctcctcaacactgagatcacagtagtcaccctccgctagcccctgtacccaggactccccctggttactttcgtcaatctctgcgtcttgagcactgtcggaagcaccttcatgattatccgatgagatttcagctggtagatcacttgtagtacggacttgtacagacttgtccagagtgcgcaatgagctactctcagaagatttagtgtggatgagtggtgtcgttaatgagttaactatgctatttgtttccttctttatgtcaccaactgcagttggcatgccaccatcttgtgccttaaccagggaagtcttgacatctttttcctcaatattcacttcatcaccatcaggatcatcgtcagcatcatcacactcagaatcttcatccctctcagcatcatccacatccttctccacttcttcacactcagaaatagtgttctgaaacacccttattttttcacgtgctgctgccaacacagcctctgaatcagcaggatctttcctgtatggagttttaacacagtatgttgaaggcgcagtcctttcgaaaagctttgaatc

SEQ ID NO: 26105 - DNA, 622 bp, Oryza sativa
atcttaagaaccgaattgaagcctctgtggtcatttggcagaggaaaatggtgcacaaggaaggtaaattgtcatgggggcatggtgtcaaatttgagaagcgggagaaatttgaagcaagagcagagaatgtcctcctcctcatcaagcacagatttcccggcattgctcagtcagctcttgatataagcaaaattcagtacaacagggtataccatgagaatcatctgcttttcatgttgtcttttcggatttgctacagtacgtatgtttactcattgcaaaaattctctgctatttttccccctcaggatattggcttggccattttggagagctactccaggactcttgaaagtttagctttcacggttatgtctcgaatcgaagatgttcttcatgctgactccctcgcgcaagcttctaatactagaacccaagaatcaatgagaatggccagcttatcaagatatgacactgataaggttgtcattgatgctaaggccgaggtagagagactgggaagaatggaaccagtttcagcgacactatttgactttgtcagtcctcgagatcaagatgttgtggcgacgaagatggactcaaaagaaaagggatgtag

SEQ ID NO: 26106 - DNA, 2246 bp, Oryza sativa
gcaaagtggtgtggactgaatttttgtgctctaatagcagcacccaagctatgcttagctaaactattgtctattccatttggacttacaaaaatgttgggcaaattattattctatactaatgatgaatacataagccaatgggaatgtaagaggatgactatagcacaaacctctagttacataacttttgtatttttcctcctaggatttccagctccttttaggatatttagttaatggtgaaaaaggtgtattgtaaagtgcataatttacatgtggatttgatttttctaaactaaagcatatttgctaattcttccatttatacacgggtttttaaatgagcaccaaagttgggcaaatggttaggtccatggagatggagatcacacatgttggtttgaagatttttatatgaaatgaggggtgggaggatggatgtagtgtaaagcactaaagcatcaccaccttcttcaattgaaaattcaatgtaacaatacatgcatatatatttgactacagggcacatgatatatttcgcaattcagcacattttgcaagtaaaacaggccattctagaacaacacaaacacatccacctatggttagtgcaagaattcatgatgtgataagtttcagaatgagcttaagtttaggaacatgctaccatctgtctagattcatagtactaggatgtgtcacatcccgttctaggtttgatttttgtgggacggagggagtacttgattgcttggcttgcttgctctagataatttttcaagtagaactttgttctgtagatattgatgcatagacagccaaccgggataaactgcatagctaatatttaacatgaattttcccacttcctcttgcaattgtcttcttaaaaaaaaaaccaaactacttatcataactcataactagcactatctttcttgccaggttcaaaactctgtacaggtgctgcaggataagcaagagcttgctgaaacccagaaggaactaactaaacttcaaatattacatgaggaatctgcacagaaaagcgaaggtactgctccatcagttcttatgacaaaggaaattgacggcagcatgccagttgcaaaacatgagcttgcccttgtgcctctgcatcaagtaaatgctgcccaatctcctgctatgcaattccaaagttgcaatgggcttgttctgcagcaactggtcccagtctcattgagcactcaacaagaccagcagcacatgaaccaagccaccttgtactgtatgcaaacccaagctcatgttgagcacaggcaggcccaaccatttcaacctgcacctcaacctgtgcagcgacatacccagaatacgccacagactgtagttgaggcacaacaggtgacaagtcaggccccagacttctacattcaacctcagcagcaatgggcacatcaaactggccagcaagttcaccaggcaaggcagccacagccacaggttgtgcaacagcaacattacaacaatattcagcaagttccagcacagatagttcaaatgcaaacttcttctccacaggctcaaagtgcaccacatgtcacactgttgtaccctccttatggatctcaacaacctgcctgtgctaatagtgagccacgctcgcgaagcatggctatgcagccttcctactctacaatttcctcgtcccaaaggaatcatcatgaagtcgctcctgtttatgtgcaaagcaacacaatttcagtcccactggctgagcatagcatccagtctcagcagccaccgcaacttcaatcgtttggtaatggctcatttaaaccaagcaaggtcagcctacatggtgttgcctcatatacagtacaggggaatgcccaggcctataacactgcttatggaaatccgtccaacaatgctgctactgttgttgctgtccttcctcaacaagcccagtctagtgctcccatggtgcttcatcatttaggaccacagtctctgcagaatcatccaatagacatggttgaaaaggttgctcgtatgggttactttaaggatcaagctgagagcatggcacttcgaatggctactgctggacagaatgtagagttcaaacacctcgcttgacaagcagatctctggtggcgatgaggtggcgagtaggagaatgaacaagccagtttggaaccgctgcatgtggtttgttggcttgttcctgtgaaatattatgatatcttactatcatg

SEQ ID NO: 26107 - DNA, 631 bp, Oryza sativa
accccatcgagttctttcgtgctcgtggtgctgattctccaagctgtcgtgatcggttgctcctcactggacgagctacccgttcagcttagcaaccggaggctacttcatgacagaaatcacgctgctctactctacaaagatcatttcccaacagttggaaacatgacgtttccaacatctcatcaactgcaaaatgatccaaattacaagcctctagatagttcatcccaccctgccgaggcttctgcaaataaaggatcaagcaaaggattcaagaagtggctgtatatagttgtgattccagtggctggtttgattatgcttgctggcatggcatggatgttcttgccatgccgcaagaaatccgttgcgactattggcccttggaggactggactcagtggccagctgcagaaggcatttgtgtcaggtaatactgcaatatttgccattttgatttgtaatattttcttatattgttctgttacatcctattcttataacggtaagttcttgactgtgttcaagtctggttttcagatcaaatattcatgttgtgtttctggttttcactgtgttctgatctgaatgtgcttcaggagtgccccaattacagcgtccagacgtg

SEQ ID NO: 26108 - DNA, 668 bp, Oryza sativa
tcgatcaaaacctgttcccataggttcagtttcttgtttggtcttagcaggagtatatcttggcggaagcttctgcatagaagtatcaacacaattacacaaagggacagctagaagggtgtgattcaaaaagaacaaactgctatataaatcacatttaatgaatgaataacagtattttacgctatctatttattttccttgcgtaaaaacctcaatacaatgatcataagaaataagactcaccatgaactctccagctccccgctccttgtttgatcccaccttctgacgaagagtgtatgagatggcagaatctaggtctaacaatcttaagacaacagcagcaacagtgtcaggaacccatggaagtacatcagcagatccagaacgtggaacagtatttcgagaagctgaatcttgcgtgcttaaattaagtaactcagttgttgtctcaaagtcagatgacaagaaatcccgtcttatggcaccttccagaatggttagcatctggcaaagcatgacaaagcacaattcagaagctgataggcatagccaatatatacgaaaaagctgctatcaaattgccaagatttccattttaaaaatcaaagcattaatcttgcagaatcaatttgtcacggcaggttttttaacgacccattctt

SEQ ID NO: 26109 - DNA, 706 bp, Oryza sativa
  unsure (1)..(706): unsure at all n locations
aaacagcacttgtaagaaggttgtgttacctttctaacaaaaggccaaatgcctatctttccatcaaaagtgcagttaccttcatcatcaaacctaggtctcgcaaccgccgacaagaacattaccttctcaattgcattcttgttttggacagtcctatacggctccggctcaagaggatgtaggtagtaagtcttgtcctttttggtggcgttgaaccatttttcatctatgtggataatgttttccatttcaataaacttggggttgtttggcaacgtacgatggtctaacataccaacacaccaccgcagcctttcttttttattggcttccttcaaataaggcttcaatgagttagagtgacgtcgtagatgcccttctttgaacaacctatgcaatgtgctttttgacacacctagcgcttcagcaagtgaccttatagtgcttctttgccgcaatggaattgctgctacaactgacaaatctatttcaaccttcttgcgcccacaattataacgcttccttgagtcaacattgacttgtactccctgtgcaatgcanagttgtgctctcttccaaatacgttggactgtacggatgctcacattgaacacttcagcaactacacgtgtgctgcctttttctaggtatccatccagactttttgtaagcaacaattcataaatgcttcggctttgtgggt

SEQ ID NO: 26110 - DNA, 684 bp, Oryza sativa
gtgcacttctctgcaagagtagagctcaagggatttcgacgacttgatggacagattcgatcggcctcgctgaagcagttgtctatcatcaactgctttatctctgttgcctttttggttgatgctccgaaccttatctcgctctgcttcatcagacctctcagctttgagagaaccaaggaatccatttgctcgtctgataatcgtaggtggccatccccagtatggaaggatgacaacgatggatttgatcatggtgatatctttgcaattgctagtggcgaacactttgatgataagagagagaatgaatctgatcaagactatggttttgatgatggctctgatgataacatagccagtgaatctgatcatgatgatgatggtcccccttccccatattctgtttcctacgatggtgacaatgaatgcgagtcttatgaacccggcaataaggaggagtctgatcgtacagtggcctatggtgagattgcagatgagtactccagtaatggtgatcccggtgatgaatatcggggaaattatgtgaaccatgattctgcgaattacggtagagctaataagtttggaaatttgaacttcccagtgaagtcaattgtggatgcgtcagctcatgaaggagaggtaatatttaatcaccttgctgatactatcgtgttctca

SEQ ID NO: 26111 - DNA, 6062 bp, Oryza sativa
ctaatcaccatttcaacatgctgaagaaacagtttttcttttaccactcacctggtctctgggtgtccagttagcacatctgatacttctgcactgcagtatcaattaacaatagctactagtggaggcattctgggtttcccatcatctgtcttaggcattcaatatactattaaaaccctcaagtttgcagctttgggaaagtattgttcttatcttttgaaatagcttgctgttttttgttgtcacaataatttatcttttgacattagttaagattcccatagaaattcccatctgtacaattttgttcaagaaaatacactttgtaggagtaggtgataatctgctcacaatatatcactaagttattgtttttattctcaatgtattgaatatcacttgtatgcatgatgtgaagttgattcagtatttcaattaccatagttcattgctgaaaaatcacttttgtgcccaatatgaaggtggttctttctagggagttgaaaagctgcccaatttttagcaacttgaagaccttgtcccttggtgaatggtgtatggctgctgaattcgatacattaatcttcttgctacagcgttcacctaatttgcagaggcttttccttaaacttaaattggtaagttacctaacgcttataaagaggtatgaatatgtatgatagtttaataaattccattgttctgcaaaaagaacttcaatactaggaagccgttggagagcggtgctaaacctatgggaagatcatttacttgtaaagacctgcaaatggtgaagatcagatgctctaaggatgatgtaagagtgcacacactggcatgtttgttcagagcgaacggtattcccattgagaagatttatgtccgtcggactgggagttcttgtaagttagatggtttcttcatgtcattttgtatttttttttgcactatcagtgctaaattacccatgtctttgctgtttagttcaagcatgtgctaaattatgctcgtctatgctgttttttttttaaagatgttctatacatattgccatgttcccaataggcttgatatcttaccaggcttttctgttaaaacaccctaaggctatcctgttcaattaaacattgtgtttttgggcatgatcttaatgtgtgtacttacccgctttctgatatttctaccagacctccgtggcgagaagtttatgagagacctaggcaaacatgaactggagttctgggggtcagattcagagttctgtggtccaaattccgagttctgtggttcagattcagagtttgaggattcagatatggagttctgatgcaacattggactagctatcgtttatcatatcttctactcatattattagttattatctttggattgcaaccatctctaattaatgtactacttagaaaatgctctgacggcaagaacccattaagtaccgagttgcagggccgtgacagatgttgttatgtgtcttttgcgtaatagggaactatgtatggctatccaaatactgaaatgctcttatccagtgcaatgagttaacagtgaaaatgttttgaagttttttttttatatatatatactataaacgtgcatgaatgctctttgcttgaatgtctcaatggattacatgcacctttgctgcataatatgcactattttgtgcctgagacccgcttttttgaagatttaccattcatgtctatttcctattggaatggagtcatgtagtaataatgtccagtcgaagccactgtcatctttacctctatttgctcctttgcacccatatcagctttacctgtagcatatactattatttgaattttacagttcagtagacgtcgaacgtggtgcactacaggttaaagcaatgttctggccttctgggtgttgttaactcagaaaattccatttaactaatgtttctgctgtcaccttttattgtaaactgatgagttaatgtttgcctgagattaaataggtgatttcaatgtctattctgaactcgttttgatcttatttcgtgtgtattagaaaacgtattcaattttctaatggattgttagttgttacaacagtagatccaaaaatgcaatatttgttcatcccatgaacaatagcttatactgcaatgggatattatttttagttccaacgaaataaaactctctcctgttataaatttcatatttaactagaaaaaatgcatgtgctttgctacgggaaaaaaaactcatttatgactctgattgtgtattactcacttcatccaaaagtcttacgtgtaacttttttgtcaccaggactaagcagaaattaactcatctctcatgtaacaaagatcaaatgtttaataagaaacactgttttccaagcatgtgggagagcgccaagccaacactgttttccaagcatgtgggagagcgccaagccaccaaccagtaaactgattataaatgtctatactatgaaatgggaatttatgatcagttttataactaggcttataattatgtttatatttgaatatttttaaaaataaaatcttacggtagtttttcagcgattcttatctatgagccgacgtggcattgctgacaattttgtaggcaacggcgtcaatggagtccgtaccaatatggttttcatgtatggaacggtctgttattgcactggacataaacaaaaatcggaaagtgtgtgtatcatttcctatgtattaaagaatatatttctgttggtaaataattttatgaatttgcacatagcatctactgtccactaaaaccacatacattctattgtaatgcaagtaattttaatgcacaaaaataccctttgtgtataaaaaaatagtattcactcatctgaacatgttaattagtctgggctcctcaaggagagataatatggagagataatctcttatatgccactgaaaattagtctaatcccttatatgccactgaaaattggctcttcccttatatgtcataggtccaaacttacacatcctctcatgccactctcgtcagatgactgtgtgttgaccattaactttaaagtaaaaaagacgtattttctgatatataagggatcagactaattttcaatgacatataagggattatcccaaccaaataatgtagacaacgtagagaggctgagaagtgggccaacaaagtgcatttgcaattagtttctttcatataaggttactactataaaagattttgagaaaaataatgattaaaaaaatagcagggctgaaatataagaagtggagggctgaaatgaaaaaaaaaaactatgtgagacggtgagagggttagccttcattgtagtttgtagagctaggatattcaaagtgctcccatcctatttttttccacctaattgggcctttctcttctctgtccccattaactagtcctaattatctgtgtttttttcccacttacagaagaggatgaggcgtcgggatggcgagtcatatccggagtttttccccctttcttctcactccaactgatgagtggacgaagcagacgactctctccctcatcggagacctcatctgctcgcgggagtcggatctgttgtgctggagtcgaagagctcgccagcggtcaaatccatggtgcggattcaggggcagcgtgagcaagccaggctagctccctggtaggcccccgtccctctcgcctcactctctcttcctccgtcctagcctaaattgggcgcaagtgatgcggattgagtgcagccgcacccaacgggcctttcacctcatttgaagaaaacatagcgatttttatcttggttggatcagttcctatttatttttgattccgtgagattatatttgattacgcatcttctatgacttgatttcttttaatcttattcttggattcgatttcagttaccataaacatgtttctaggtccgatttatttacaagataggattattttgagggaatttgggttgcatctgtttgtttttgtgttcatgctttcaagtgacttttgaggtgagacggcattgagacacgtgcggagcatttgagacaggtgtgaagggcaacaacgtgccaacgtgagggaagcggaggctcacaccgtgacggaggaaagcggactatcacggacgaaggcgtaatgtgaagatcagaaacatatgaattttttaattagttaagactagaaaaaaatacccgtgcattgcaacgggtgaaggttattttattcttattatattatacggtttagttaagatgaaattcactttgggaattcgctttaatatataactttttagaaaatcgtgaactacaattaagagtccgatcgtctcaagttagcgtgcgagttttttttataagagatttcttatacgactccttttgtattttcaaaagcgaacgaacttaaaaaccgactcatacacagatgacgtaccaaagtactagcaaaaaatatttttaatttttataatagtagagattagataaagatatttgtaaatttctactctacgggcctatttggttctctaccctacctatttattggtagtgccaaaatctaggcaaattttggcactgccaattttttggtagggaaaagttaattagactacttttggtttaataccaatatggagccaaattttaatagtatggtgaagaatattctagaatatgtccaaattgagtatgggcactatcaattgtttggcttcaaaccaaactagcatatttactatttaaattaccaaaattttggtagggcacagttttggcttcaatccaaaacggtcctacattcggtctcaaaactgacataagtggcgacgtctgggcgtaatttgaatggaaatttgaactaatatggcccatatacttacatggatgggccagaatttcagcccaacccaaacgagacgttgctggcctccgttcagcatggagtagttgccgcctccttatgctcggtttgttgtttaaactttaaatttgaattctgcggaaaccaagaacaccatttcagccatcttcttccttcgagagacgtaagctcgaataattcatcttcctcttttgatttcaccttcacatgcaagttgtttcctcaaagatttcctcgcaattatttgtcttgataggttgaaatcgaagaatggaggttggaggttactgagacctagttcgacgaggaggtgaaggcaacctgttcgacggaatgcgccgggggaaagccgctctctggcggccgcgccatggcgagggcgagacgtcccggcgtggaggcgacggcgatggagaagcggccgaccgcctcagcgccctcccggacggggtgctgcaccacgtgatgtcgttcctcaaggcgtgggaggtggtgcgcacctgcgtgctctcccggcggtggcgcaacctctgggcgtccgcgccctgcgtcgacctccgcatccggtacttccgcctcgacagcgagccgccggaggagccgcgcgatttcgtgaaccgcctcttccgccgccgggaggcgtcggcgccggtggacacgctccgcctgcagttgagcgacccggacaatttgtttgacaacgacgatgccaatgcgtggatccggactgccatcaagcgcaatgctcgattcattcatctcactgggcaccgcaaagagatcggggtgttaaagcacagggccttggtctctacccacctcaagatcttgaagctgtcctatgtcctgatcgatgacaagatcctcaagcagctttcttcagggtgcaaatctttggaagaactggatcttaaggactgcgtgatgaccggccatcagatctcctctgcttctttgaagactttgaagatggataggtgcaagatcaatgtggacctctctatcactgctccaaaccttgtttttctgaacatagtcacaccttacatccgagttccatcgttcaagaacttggagtcgctggtgacatgctctatcatacttgatgaccttttcttgggt

SEQ ID NO: 26112 - DNA, 2484 bp, Oryza sativa
tttcgttcatattcaaacctgtctatttacatggaaacaaaagacacgattagatcattccaaattccaattagacattttgggcaattgatcgtgataaattgggtagccttctcgtttacgtgaattgatttccgcaaccgccgccttctccgtcgctccggcgaacctctcggtaagtccgatccgtctcatctccctccttcccatctctgtactctatccctgacacgcaataatgctgtggaagttcagcgggaggtggagcgcaggccacctgttcgacggaatgcatagccctggagaggcggcgcgcggcggcggcggaggcgaggatgacctcctcagcgccctcccggacgcgctgctgcaccacgtcatgtcgttcctgcgggcgtgggaggtggcgcgcacctgcgtgctcgccgccgctggcgccacctctgggcctccgcgccctgtgtcgacctccgcgtctcgcgcggcggagtccaccgtcctccacccagggagttcgccaagttcgcctaccgcttcttgctcgagcgggaggtgtccgcgccggtggacactctccgagtgctgtccagccccgtgtgctacgacaatggggaacgagaggattactccactcgggatgtcgaggcgtggatccgtgccgccatcaagcggagagcccgggtgatcaagcttaccgaccatcaagacgacgaggtcttctctgacttcgacaatgtccccatcgtcacccgccacctcaaacacctgaagctgtctggttccgttttggaggacaggaaggacactaaggcagctctctttccagtgcccttctttagaaattttagagctcaagggctgccttctagaaggcggtgagatttcatctaccactctgaagtctgaagagcttgagcatggtcgagtgcaagatcgaggaggagctcaccgttgctgctcctaacctcgtgtcactgtgctgcatcaagccattccaccaagctcccttgttcgaggattcggggtccctcgcactggcgacgggcactatcgtgctcgatgattcattcttctgtggtggttttaagaccctatttagatgggactaaaacttttaagttttatcacatcggatatttggacacttattataaatattaaacatagactattaataaaacatatctataatcttggactaattcgcgagacgaatctattgagtctaattaatccatgattagcctatgtgatgctatagtaaacattatctaattatgaattaattaggcttaaaaaatttgtctcacgaattagctttcatttatgtaattagttttgtaagtagtctatatttaatactctaaattagtgtctaaatatagagactaaagttaagtctctggatccaaacaccatctaattctaggtggaaagacatcgatgaggattgtgatgaaattgaaggaagagatacccgatggatgttgctcggatcattctgactatggcagtgatgcaatcacctttgaatatagtgagattgtaaatgactattgcgagcaattctagatttcatttaactttgcaaactccggccgtatagttgttttggtaaaaaaaaaatttaacatatacgaacacacatttgaaataaaacgaatggtcaaacatatgaaaaaaaagtgaacggcaaataaatggagggagtaattgattgcctagtaaaattactctatatatatagttagtgaaacaggagcagctagcacctagcagcgactaaactaaagctcatcgtggtcatcctcgtcgtcgacgttgccatcttccggtgcgccgccgccgccgccgccggacctctggtagaccgccgacatgacggggttgcacacgtcctccagctccctcagcttctcctcgtactcctccttgccggcgtccgggttgccgtccagccactcgtacgcctccctcaccgcctcctccaccttgtccttctcctcgccctccatggcgtccgccatcttgccgccgagcgtgttcttgatgttgtagacgtacgcctccaggctgttccgggcgtccacctgctccctgtgccggcggtcctcctcggcgaactcctccgcctcgcgcaccatccggtcgatctcctcctggctgatcttgcggtcgtcgccggagatggtgatcttctccgacctgccggtggccttgtcggcggccagcacgctgaggatgccgttcgcgtccacctcgaacgtcacctcgatctgcggcgcccccctcggcgccggcgcgatgccggcgaggtcgaacctgccgagcagccggttgtccctcgtcatgctccgctcgccctcgaacacctggatggtcaccgtcgtctgcttgtccttgtacgtggtgaacacctgcgtcttcttcgtcggcaccaccgtgttgcgcgggatcagcttggccatcacgccgccggccgtc

SEQ ID NO: 26113 - DNA, 4240 bp, Oryza sativa
cctggtgctgccgccgacgaggacgatctcgtcgatgtcgcccttgctcagccgggcgtccgccatggccttcctcaccggcaccatcgtcttcttgaagaggtcgctgttgagctcctcgaaccgcgcccgggagagcggctccgacaagtcgacgccgtcgaacagggactcgacctcgacgcgcacctggtgctggttgctgagcgcgcgcttggcgcgctcgcactcgcggcggagcttgcccagcgcgcgcgcgtcgccggtgatgtcgcggccgtgcttccggcggatgaccttgacgaagtggtccatgaggcgttggtcgaagtcctcgccgccgaggtgggtgtcgccgttggtggcaaggacctcgaacacgccgttgtcgatggcgaggatgctgacgtcgaacgtgccgccgccgaggtcgaagacgaggacgttcttctcggcgcccttcttgtcgatgccgtaggcgatggcggcggcggtgggctcgttgatgatgcggtcgacggtgagcccggcgatgacgccggcgtccttggtggcctgccgctgcgcgtcgttgaagtaggccgggacggtgacgacggcgcgggtgaccttctcgccgaggtaggcctcggccgtctccttcatccgcgtgagcaccatggcgctcacctcctccgggctgaacacgcgcacgtcgccgtccttcacctcgacgcgcacgtgcggcttgccgttccggtcgacgacggcgaacggcagcagcttcatgtcgcgctgcacctcggcgtcggagaactgccggccgatgagccgcttggcgtcgtagatggtccgctccgggttggccgccgcctggttcttggcggcctcaccgatgagccgctcgccgccgtcggtgaaggcgacccacgagggcgtgatccggttcccctggtcgttggcgatgatctcgacatggccgttccggtagactccgacgcacgagtacgtcgtgccgaggtcgatcccgatcacggtgccgccgccgccgctcttggcaccgccacccttggccgccgccacagagccggcaggcgacggcgtgaggaggagaagcgcggcgaggaacagccccagctgcatcgtcgacgcgcgccgcggccgcgccatgatcgtcgtcttcgcttttggttttgtgtcgatacgagcgtcgcgatatatatacagcgtgcggcggccgaggccgagcccgactccgatctgatgtgtgccgctgccgaccaatcggagggagtacacgtcagcggcgtgatctgggccgttggttgatctgatcggacggtcagggtagagtgtgagacgtgttaatgacagtgtgccggtggccgtgcgcgcgtagcgtatcggtgccgactcggtttcatcttcgtacatggaccggtacggactctcaacggtttacagagttggatcgagtcattgagctactcctaaacgcagtctcatatagcttcaactttatactccctccgtccctaaatatttaacgttattgacttttttaaacatgtttgaccgtttgtcttgttcaaaaacttttatgaaatatgtaaaactatatgtatacataaaaatatatttaacaatgaatcaaatgataggaaaagaattaatacttacttaattttttaaataaaacgaatggtcaaacatttttaaaaaagtcaacgtcgtaaatatttaggaatggagggagtacttacttaataggtgtggattgattctcgaaattgctacgttttaaatactaactagaaaaaatgcatgtgcgttgcaacagaacaaactaaaattttgataaacaatagatccgtactttgaacttttccagaaattcctcaaactcaattcgaaattttgaaagtgaatatgatttttccttttgaattatttatttctttatctgcctccccttgttctaaatttattcgggttcttatacatcaaaatccatccaaagataaaaaaaatccttatagtcccatgttttgattgatgatgaacgaaaaaaaaattgaatggtaaatgagaacgctaagattttcctttaaatactttgcgatcttcctagactatctttcataatttgatatagtttcaataattattaataatattttttgaattaaaaatttgattatacaattaatcctacaccgatcccctgttgatcaagcacaagcacaaatataccgataacgttctcctcctagctcctggataagtaccggtacagaataaacagaaatcactggtttaaaactggacagataaacggtgttgtaattaatcctaggactacgtgctcttgcagtcttgctgatggactcatagtgtgtattcgtgggttgcggcggcaagcgcaaaaaccaattgagttagagacggacgtatatgacccaagaaaacaaacgcaccatcaattcagtcacagatgacgtaccaaagtactggtggaaacaccttcactttttacaatagtagagataagtagagaataattctcttatttgaataagccaccgtcaggcgtcaacatgggtcatcaaatgcccaatcagaaatattgacgacgatttcttctaagctccaaaaaattaaacaattagaaaattatcaataaaaatttcttctcaactccaaaaatttacatcctgttgcaatgcacgtgaatttttgctagtataattgtaatggaaaaattagaactatttgtacattagtttttactaacatggatcatcacgtgtgtatgcatgtctccaagttcttccgtgcatcagtgcatgcctcatcacttaaaaactaattatgtgtcaggacaggtgaatccacaaagacactgacaccaattcggagacaaccaaccgcattggccgggggcagcaggcatgcaggaggcccagctggcccacgaaaatccaacgctcctgccttgctcgttcgctcgtgtacgcgatgaggcgcagagcggaataccaaaccaatttaataagggtgatgtacgaaatatttttgacaaaaacatcttaaatttttataatagactagaaaaaatgtccgtgcgttgcaacggtttaaaaaattttaatcttacatattacttaagtccgcaggatatcctactctagaaaggaagctcaaggttgatcaacatgagctggccattatttgctcaataaaaatagaagcccttttatgatttttgcattcatgcacaacctatacgcatgaatgcatttaaaacagccagttagacagttaatactttcttgagatgaaaatagataaatgacggatacacaaattttacaagaaaaatccttatgggaaaaaaatcatagatgtcgattgacaatggaatagaggaattggatttaaatgtaggggatacattgaatttgtcgcacccttccatgtggcatacaagagatatatcaagcgaaaaatctaggagtcctaatatgaaaagacttaaagtactattaggaaactaattttgtaatacgaagtcgtattacctaactaacccgaaaatactgtatgttgaaatttggatcacatatttaataatctccgccttgagacgaatttcctcttgtagcataaaaatcttcattctcctaacaacatcatgatgtgacaaaatcattgtgcatcaaatagtcacttggactatatataaaaccgtaagacccttaattcagaagaggtacaccatacttcaaactgtcattggaaataaatcatgaatctgttggtataagtctgtgtgaatttagcagaaatgcgatatactctgcatgcaaaaacgaagtattttgatctttataaaaacctcctagtaaactgacatgtgagcttagaaaaactgaacctagagttgatttacccaaacagaaccaaagcattaatgcagatgaattgtttccctggtatgaaagagtgtgcatgaagcgataatctggaaacctcctcctagtgcaaaagctggagtggtaggagcagcgaataattttacttgtccttctcggaaaccgtgcgagtagatggattggtctgtgcttgcttgcttttcctgtgcccattgcgtcgacctgcccaggcatgcaaacggatagtccctccgttccaaaaaaaaaaaaaaaaaacaaaaaaaaagacaaaccctagtttccatgccaaatgtttgaccgttcgt

SEQ ID NO: 26114 - DNA, 2135 bp, Oryza sativa
cttaccggttggtcatcttcaatgcagattaaattcgacaaattaaagctaaatcaaaagggaaaatcataggaaaaatgatgaggaaggagtgaggaatctttttttgcaatcaattagaggaggaaatacatgggagaagcagatcgacgtcgcgacaacgctagggtttggcacgggcggggcggaggcgcgctgcacacatgggatcgcgtgggaagagatatatggaaaaatattaggtatagatagatttagttatacataataactataactatttattacctaataacttactctatggcctatcacatttggaagattatggctagtcattacacaagttacttttctagtaaaagaaattatacattacttgggccggggccatgcaagcctcgatgatttcagcccgctcgttgtccgttatatgttaatctatccgatacttgtaatacttttatttcttctcggtaattaaccgaataagcaaactggaacagaatcggatcgggagacaagaaaaattgacgacgtacgaatattttaagaataacatcattaatttttataatagtagagataaagataaagaaaaataaaaaataaaaaaaaatcttgcaaccggtgggatcaggaccccctgcagttgtaatagggactgcaactttagcagtcgttgcctcaccgttagatcaaataagaaaagctcagattcggccagggtactgtagcacgcacataaagtcctgttgcgcactgtagcatgttctgtagcttatgccgttcatcagcttgatccaacggttgtaaatggatatgactgcttaacttgcagtcactgtactaactacacttgatcttgattccaaccggggcccactcgcagtttcggtatttagggttttccttttatttttttaatcttttagcggctcatagtcatcttctccaaccgccgtcggccgccttcccccgtgccggcaaccgccgccggctctgaaacggcaagaactcaccgtcgatcggacgaaattttccggtgagttcaattcccatctcctcccctgcaacgcaatattctcgagggactcatcttcttgcaaattcctggcgcaagatgagcgggaggccccgcgcaggacatgtgttcgacgaaatgcctccgaagaaagccaagctgtccgccggcgccggcgccggcgaccgcctcagcgccctcccggacgcgctgctgcaccacgtcatgtcgttcctgcgggcgtaggaggtggcgcgcacctgcgtgctcgcccgccgctggcgccacctctgggcctccgcgccctgcgtcgacctccgcgtctggcgcggcggaggccacctcccacacccggaggagttcgccaagttcgcctaccgcttcttgctcgagcgggacgtgtccgcgccggtggacactctccgggtgctgtccagccccgtgtgcgaccccgaggtggaggattactccacttgcgatgtcgatgcgtggatccgtgctgccatcgagcggagagcccaggtgatccatatttctcaccatccgaaggacgaggcatttagtaacttcgaccatgtccccatcatctcctgccacctcaaacacctgaagctgtctggctacttgtttcgacaaaggacactaatgcagctctcttctcagtgcccttcattggaagttctagagctcaaaggctgctatctggatggccatcagatatcatctgcctctctcaagatcttgaccattgtcgagtgcaggatcatggagggcttcaccatcgctgctccgaacctcgtatcgctgtgctgcgtcacgccataccaccgtgctcccttgtttgagaatgtggggtcactcacactggatgcagccactatcgtgcttgatgattcgtttctatatgctggttatgaatacgagtatgaagacatcgatgaggatgcgatcgaaggaaacggtagcgaagacggtgaaggttccttgaatgattctgactacgacagtgatgctgtcagtgatgcaagtacctgtgaatacagtgagattgcaaacaactatgatgatgaaaaacagcttgtagagcatgatgaggtacataatcgaagca

SEQ ID NO: 26115 - DNA, 3033 bp, Oryza sativa
gttttttaaagggattaatggtaaggagaagatgaaatgaggtggagatgttagcccaaacactcacttgcacacacacagctctctctctctctctctctctttcactcgatgaaacacacacatacagaggaggcaatgacagaggaagaagatgaacagcacgcaatgaaacaaagagacgcaaggaaatttcttgtcactacacaccagtgaaccaccacacacttcactttctattctccacacattaatcacacactgattacatgcttaaatagcacacacgcgcagcagcacactagccacgttttttccacactaaccggccaccagtcacatgacttagccactaattaaccactaatcacgtctctatgcatgcaggccatatctccttgcatgcaaatgcactaacacacatgcaacacagctaactgatccacaatccatgccactactcaagctacttgacttggccactactcccagccgatatccacctatagcttcctacatgcaagcacttacatgcagatcatggattttcttgatcaagctaactcatgcacgcactaatcacaactcacacaataaacaacaagattaagtctaacaggagattgctgacatgtgggtcccgctggatgacttagcaagtcaactaccacctaagcaagtcaattgccacgtaggaataaaccacttccaaaatcgtccggggagttgatttgcaacggttttcagagttagggaagggttatactcggttttacggttgagggaagctattcatacacggccatgagttgagggacgaaaagtgtacttattcgtaataaaaatcggagggatttaaagctatacgtactcctgtgaatgcccagacatttaagccgtgtggtgaagaacggcctggttaagcatttgggcctagaatagagggcccatattggctcgcttatctatttcgttagttttcattttttagagcccaggagcggctcatcggccatcgccaacacatttgatcttctcttctcctgccccggcgaggcggcgaccgccgggattgaagcggcgagaactcgccatcttttccgacgagtcaaacctagtaagctcaatttccttcccctcccctcccttccccagccaccgcaaccttcttctccagagattgatttcgtttcaaattcccgacgcaaagaaagtgaccaaaaagatgagcgggaggcggcgcgcgggacatgtgttcgacgaaatgcccccgaagaaagccaagccgtcccgcgggggcggcgctgcggaagaccggctcagcgccctccccgacgcggtcctgcaccacgtcatgtcgttcctgcgggcgtgggaggtggcgcgcacctgcgtgctctcccgccgctggcgccacctctgggcctccgcgccctgcgtcgacctccggcgtctggggcggcggaggccaccttccgccgccggagcggctcgccaggttcgcctaccggttgctgttcgagcgggaggtgtcagcgccggtggacattctccgggtgatgtccagccccgacggcgaaggggaggaggattacaccacttcagatgtccagacgtggatccgtgccgccatcaagcggagagctcgggtgatccagcttaccgaccatccaatggatgaggcgttctttaacctgggcttcgtccccatcatctcctgccacctcaaacacctgaagctgtctggttctttactgtggaacacgacgctaatgcagctctcttctcagtgccctgcttggaaattctagagctcaagaaatgttctctgcacggccatgagatttcatccacctctctcaagagcttgaccatggtgaagtgcaggatcatggcagatgtcaccattgctgctccgaacctcgtgtctctgcggctctgcgctgcatcaagccataccaccgagctcccttgttcgaggatatagggtcactcatgttgagtattatgtgtttaggggtatattagtaatttcctatctctattgtactcatatatgccctttgggctaacacaatagtaactgttcattctccaatttcccctaaattgtgacatggtatcagagcaagagcaagggatcaaaccctaacgtcgatccggagtccacgccggcacgccggtggcagctcgccaccggcgagcccatccaatccgtgcacatcctcgtcagcttcgtcgtccaccaccgtcgagccgtcaatcgtggcagccaatcgttcgtcgttcgtccacaagcagcaagcagatccagtcagcacaagcaacaagcagcatcaagcaatcaaatccacaagcaagcagcggatgcatgaacaagcattcagatccagttcttcgtcaccacgtcagtcgtagccaggccgtactcgtcgcggatcttgtcgtcgcgtctcgccgtggctcgtcgttgtcgccgcattcccattgccggtcgcggcgctctcttcatcgccgccagcgcggtctcctcccatgtcagtcgtccagctttccgtccgccgcctgcgcgcgtgaccatctgcatcgtcgccgcacaggtcaaggtcctggtcctcttggtctagcctgctctgttctctctgcttctccacatagatgcttggagactggttactggacttaacagcaacaagccatcgtcttccctaatatcaagtagcagcgacagcaatttgcaagtgtcatgcagatccaccttgttccatattcaaacatcaacaaatagcagtagagaagcccatatcgagttatgcttccctcatcatgcagccggcctctgctcttgccggatttgtgaagccatccatagtctcaactatcttgattgttgaattgttccatcaacagatctattttgtgtttgctatgcttgcttactgctgccatcaacaagtcaattaatatcctttggtcttgcaaacatatcattgtgcttcagtttgagataggcaacagaaaaccaaggcacag

SEQ ID NO: 26116 - DNA, 1542 bp, Oryza sativa
ggttcgtcgaagtcatgcttgtcaatcattatcactatctcgctcgctccatgtcgaagttagccttctatcatcaccagaagctccacgtcggagctgatctttgtcatatcaccagctccccatcggagttgacatcatcatcaatcattgaagggccgaagaacagtttgtgaaggtccttcatctcgtcatcatcaccgtctctgaatcagtgaagagccaaagaacagtttgtgaaggcttttggtactaagggctgaagaacagtttgtgaaggctcaggtctacttcattgaggataggatggttttctcttcttctaattcattcaagagcaatgcttcgacaacatcttcaaacatggactttgtattaatagtagggggtcatttatcttgtgtttagtttcaaatgcaatgctattgtatacacattgcatttgagcaggggtgttgagtattatgtgtttaggggtatattagtaatttcctatctctattgtactcatatatgccctttgggctaacacaatagcaactgttcattctccaatttcccccaaattgtgacaactcacactggccacaggcactattgtgcttgatgattcacttttatgtgctggttttgattaccagtacaaagacttcgatgaggatgcaattgatggaatcaatagcgatgatggtgaaggttgcacgagtgattctgactacgatgatagtgacgcgaatacctgtgaatacagtgagattgcagatgactatgatgatgaaaaacaacgtcaagagcattgtgaggggcataatccgattgatgattatgatgatgaaaatcaacatgaagagcatggtgaggaacataatcaaattggacttgatgaagttcttggtggccataatgttcttcacatcctatcaaatgctgaaattttggagctattagctgatggtggagaggtatagctatgaatcttcttctgctccctgttacataacattttcccttaatgcggatacattaattattttcatcattacataagaaaaaagctttctcaatttctatgcactgaacaaattacttgtatgttctatatgaaggtgattcttaatagagcgctgaaaacttgcccaacttttagaaacctgaagacgttgtcccttggtgaatggtgtatgggtgctgactttgatccactagttacattcttgcagcattcacctaatctggagaggcttttccttgaacttaaattggtgcgtgtatttatattataatatatcggttgcttgatgcttcacatttttcatattttgacacgtgagttttagcacatgtccattgataatttatcttcttctgcaaacaaaaacaaaaaggattactacagcatacaggcaatgaaaggagttaccaaagcagtgggaagatcatttgtttgcacacaccttaaaatggtgaagatcaaatgttctatgaatgatgctagggtccattggttggcacagttgttcaggactaatggcttacctattg

SEQ ID NO: 26117 - DNA, 1681 bp, Oryza sativa
atggtaattgaaatactgaatcaacttcacatcatgcatacaagtgatattcaatacattgagaataaaaacaataacttagtgatatattgtgagcagattatcacctactcctacaaagtgtattttcttgaacaaaattgtacagatgggaatttctatgggaatcttaactaatgtcaaaagataaattattgtgacaacaaaaaacagcaagctatttcaaaagataagaacaatactttcccaaagctgcaaacttgagggttttaatagtatattgaatgcctaagacagatgatgggaaacccagaatgcctccactagtagctattgttaattgatactgcagtgcagaagtatcagatgtgctaactggacacccagagaccaggtgagtggtaaaagaaaaactgtttcttcagcatgttgaaatggtgattgcatacctctccagcaccagctaacagctccaaacttctagcatttgaaaggccgtgaagaaaattatggccaccagaaatagttttagtctgctgacttgtcccaactccctgaacaatggtactggaattctgggcatactgctgatctccatactcttttgcaatctcactatattcataggtattgtcatcactctcaatatcactaccatagccataatcatccttgttaccagcaagcccatatcctttttgagggaaaccaaatccataccctgtcttgtaagtcttcttctgatcatcaatatcatcttcatcagtggtttcatcaatatcatcttcatcactactgtgttcataagcatcacccaagaaaaagtcatcaagtatgacagagcatgacaccagcgactccaagttcttgaacgatggaacttggatgtaaggtgtgatcagattcagcaatacgaggtttggagcagtgattgataagtccacattaatcttgcacttatccatcttcaaaatcttcaaagaagcagatgagatctcatggccggtcatcgcgcagtccttaagatccagttcttccaaagatttgcaccctgaagaaagctgcttgaggatcttgtcatcgatcaggacataggacagcttcaagatcttgaggtgggtagagaccaaggccctgtgctttaacaccccgatctctgtacggtgtccagtgagatgaatgaatcgagcattgcggttgatggcagtccggatccacgcgttggcatcgtcgttgtcaaacaactcgtccgggtcgctggactgcaggcggagcgtgtccaccggcgctgacgcctccctacggcggaagaggcggttcacgaaatcgcgcagctcctccggcggctcgctgtcaacgtcattgtaccggacgcggaggtcgatgcagggcgcggacgcccaggtgtggcgccagcgacgcgagagcacgcaggtgcgcaccacctcccaggccttgaggaacgacatgatgtggtgcagcaccccgtccgagagggcgctgagccggtcaaccgcgtcgccctcgccattgccgtcgccttcgcttccctctccacgccgggacgtctccccctcgccacggcgcggcggcccgagcatggcgtttctcccgagcattccgccgaacaggctgcgcgcgccttctcgtcgaactggttctcagtaacctccaacctccg

SEQ ID NO: 26118 - DNA, 4524 bp, Oryza sativa
tattttaataagataaaagatgagaaggaagagcagcgggctacagatctataggcagctgacaggtaggaccatatattaatagtatagtaagcaactattgtataaattggctattagattgactatagatgaatcggagctagtagtgagcagtactattaaacttgctctcataatccatttaatcccaaagcaaaaagtaacgagtttagaacaatatgcccagaacatttgctttaaaccgtagcacacgacgtctgctgtaactgtaaattcgaactatactggtagcaaggtaaactaagatgacagtggcttcaactggacatgaataactccaattcaaatggacatgaatggtaaatattctgaaggggtatatcaaaagccctgaacaattttcgccagcatatggattattgagtctcttacatcatccttagagcatcgatcttgaatattttgaaggtctgggtttcacagcgaccagtcacgacatccgccacgggcaatttaattctctgttaagtttggagttgcgaaggcctagcacaaacatcgtaaagttataaggtggaaagtgtacagaacaatattcaagccaaagcaacagagaaaatattgctggcaaaagttttagtgtaaaagaagttaacactacctccgttgtcttttagatgaatgaactaaccaacatcaaatataaaaaacaggagtagttcaaaaaaaaaaagaagttaaatagttgaactttttccatttgattgttcatgtttctatcacgtgatagcatgcctcttgatcagcatatcttttgatgaaatgttataacatttgtacaacaaaaagaattaaaaaaaggaagcaaatatatgaacaataatacttacggaagctcccacttcgacggacgaaaatcttctctaaggacaagccattagaattgaacaactgtgccagcatatggactctaagatcatccttggtgcatctgatcttcaccgtactaaggcgtttacaggcaaacgatcctccttttggtttgatacctttttccaattccttttggatgttgtaactcttttagcaggcaaaaaaaagccaaattagttaactactaccaaatgctgaaacttacatattgaattgcaaatcattgagaaacattagttgatcttgtaccatttcaagttgaagaaaaagcttctccaaattaggtgaattctggaggaagagaatcaatatgtcgaagtcagcgaccatactgatacaccactcaccaagggacaaagtcttcaggttgctaaaagttggacaacttcttgattccctgctcagaaccacctacattgtacgtgacagtgaataacgagttgcaggataaaagtatattcaggtatgcagtgccattttttccttttttgctaatgaaattgcatatattcctaggactggtcttaggattataggatacatataaacaaattgtttgctcaacatagggagttgtttgtatgcaactaaatgtttgcagcgtccataagtttcaatgctggagggaactcctttttagtgaaaagtgcgaactttttgaagatatctaaaagaaatcattagcagaatcattccactagtaaggggggaaaaaggaaaagccccccatctaccatgacagcaagaacctaaagcatgccattctagtcaatagtagtaaagcagatcaatcttcctaaatttgaacacactgcatataattgaaagaagtgcacactataaccaaccaaaaaaaaatgcattccaatgctatattttgcaccatgagtgatgagtccctgctgcacattagtgaaagcgaaagtatggattatacaagaatattagtagaagttaagggaggtacctctcctgaatgagctacagctccaaacttctagcatttgaaaggctgtgaagaacattttgtccacccaaagttttatcatcattgaacccattgttagaactggagccatgatatttaccacccatactgcaatcacctccatcatcatggtctttatactgctcaaatttatattcattcacaatctcattgtactcatatgtatcagcatcactattgatatcattttcatagttatagtcatagtcatcactgatgtcactggaaaggtcatcaaaataatcttcagaagagccaccataagaataatcagaagagaaaccatccacctcatgtccttttttagaatcaccaataagtagcgagtcatcaatcatgatacttcctgtgaccagcgacccagagtccttgagcacgggaacccatttcattggtgtgatgcattgtaaaaacacgaggtttggagcaccaacagagagattcatagtgaacttgcattcaaccatgatcaaactcttcagagtgactgatgaaatctcacgggcacttaccacgcatttcttgagctccagttcttccaaagaagggcatcgagaggagaatcccctgaaaacatcgtcatccagctcggcgtacgacagtttcaagattttgagatggttggaagcgaagacctggtgagcaaatacaacgaacatcccataatgatcttcaagctgaatcacccgagcttttctcttgatagcttcactaatccacttctcgacatcgacattcttaaacttgtccccgaaaccatccacgtgagcagagcgcagccggagcgtgtccaccggcgcgagctcgtcgcgagcgagcagcagccggttcacgaacctgcgcgtgtcactcggcgcattgcggtcgcgcgtccagaggacgtcggcgcaggggcagggcgcggaggcccggtggtggcgcatgcgcctgttcatcggcggcggctggcggtcgctcgtcaggaggatgtcgacgcagggcgcggaggcccagaggtggcgccaccgccgcgagagcacgcaggtgcgcgccgcctcccacgccttgaggaacgacatgacgtggtgcagcaccatgtccggcatctcgctgaggcggtcttcgcccgaagcgacggcgtcctcctccgcgatgccgggctccccctcctcctccgccgccgccggcgggtcggtttcgttcagcggcatttcgtcgaacacctggacttcaccgtaagcgacggcatcctcctccgcgctgccgggcttcccttcctcctcctccaccaccgccgggttggtttcttccagcgacatttcgtcgaacacctggcctgcacgggacacgacagccatggaaacgcaactcgagatcagaacaaaaaaagaaaaagaagaagaaaagttcgcgacgaatccttgcaagaagcaaccaaacctggagaaggggaatggaaacttacggagagatcagctgcgatggcgaggaatctcgtgatccttcagagcaacgggaggttgaagacgaaggcgtagtggttgatcctttttttccccctttttgagaggagaaaatagaaatagttgaataccgaaatgggactctctagtctctactctctacccacccaaggaatttcctccagattccgatgttttactcccacgataaaacaaacagatttattatgagactagctaaaaagctaaaaaactgtgagtgttttttcagagaaaactttcaaatctaacttatagtatatagtttcactagaactatactataataataataacttgtatatatgtattaaaataatatatgcaactttatatctaatttatatagagataataatgtagttatagtgtagttacactatagctacaatgtaattatagcgtaactacaatgtaactagcatgtaactagagtgtaactatgtaacttgaacaaatctgccataaacatgcgatgatgggattagcttgtgaaaatagggtttagatccggtagcaaaatatctaagcacaaatcttagcgcagaatcaacggccaaaaaatttgacagttttctgtcgatagttagctagcagaaccgtttacgggtatcacatgaacttttcttttcaagatttatacttcggccatcttctccggtgacagcaacaataatttggtagcgatggtcaccagaataagttactaaacgctcaggcctagagatagtacgcgatgtgtctaggcggttgcggtaaaaccaagtagccttaggaagtactagcgtatctagcagcatgagccactagagatgggcatgaggtagcaaggtctttttcgagaggaagaaatggaggatggcagggaggaagtgtggcggtgataggtggaaggaggggaaggggagacaaaagactagggtttatggactagggtttttaaccgaaggtgtgaaacggtccgaacaacttgatgtagagcatgaaaaaaatgccagacaatttttacgagagaattgacttaactctaaatagaaactctagtaagattgattttccttttttgtatggtgatgtgttgggccaatcggggatcct

SEQ ID NO: 26119 - DNA, 1751 bp, Oryza sativa
ccgtgccgtgccagcccacgtgccgcgctcacggcccaggcacagcccaacacacctcgggccgtgccgggccggcccgaaagaatgacggcccatcgtgctttttctcagagtaagtctaatttttctccctcttactgggctgtgatatatgtatagctcaaaaaagtctattttacctccctcttctttgggctgtgatataaatagctaaaattaagtatatttaaggtccctattctttggacagcgacatttatatgtctatttttagtccctaaactttgtgtgtcgggcctagcctgccagcccatcgtgccgggccagcccgaccgtgccgggccagcccagcgtgccgggggaggcccaggcacggcccggcggtcgggcctgtgcctgggcctgatctgtggcgatgcgtggacatgttgcaccatgaggatgtaaacagattgatcttgagagatttcctgtacgcaatggcaatggtggccgtggaccgttcggatgggcggccggcttgaggagtttgatgggaagatctttgttgatgataagctgctcgagtatataggggtcaggtagttatatatactaatgatacttctattgcatcagtgtttctccgactctgaattgattaggtttgaaatttccagagtgaagttctatcgccctaattcgcctgaatttttttaaaataaaaactagtgaatttagcaaaagttattcattttttgttcaaatttttcgtaccgaaatatcaaaatttcggtgatatattaattaaatcctgctctgaaatggtctaatcatttgaaaaatcttgcgcactaatctgtcattcgttttgcttgcattgctgcaggtcgccctctctgaagcggctgtcccttgcatgttttctgctcctgtatctccaaggaagcattaacccagttaatgagaaagtgtccactgctagaggatctctccctcgttggttgtggaagtgtcgtctttcacatgctttatgagatcaccggcgaaacgtgcccgcggctgaactgcctccagctgagcacatgtacacaagctcatccgcggcttgcgtgtttcgggtacggttatgggccgctggggatggcgacgttgcaccagctgcgacacctgtttagttcaacgcgtagtttggattttggttgaaattggagatgatgtgactgaaaagttgtgtgtgtatgacatgttaatgtgatggaaaaagactgaaatttagatccaaattttggatctaaacacaaccctaattctggactggacggtatcaacattgatgacgacgagctgacagccatcgatgatagctgccctcaccttgagccactggcatgcccacatacaatttaccggtgtcactggacaccaggtaaaattgttaaattctaactaatttatgctattttgattagtatactagtgaataattagataactactatgtagtggatcccgggtaatttttattctagattcgccgctgccttgagctatttgacgtaagcaactgctacgatcttgcgatgtcgaggacgccctggtagcaaagtgcgccgcgatcaaagactgtcaagcttccttccgcccttgaaggttatgacgagtatgatgattactactgttatgacagatgcgacggctacgatcagtctgatgattgatgacctcgcccatatgcaccttgcattgtgatgatgatctgtttgtttgat

SEQ ID NO: 26120 - DNA, 3531 bp, Oryza sativa
cctaccatataggtatagcatgccacctaaaattaaaaaaaaatgctttttggacatgtgcagaaaactgcatgtctatctgttcctttctcacagcactagcagttagtaaaacaggaaattacgggaaccaaatcatttcacttttgcctattttgataagttctagttcttagtcctctcttttcactgccatcgaaccttggtagcgacaagaccgacggtagcgacagtgacaaactatgaatataaacagcggtggaggtgaaattctagaagacaacagtttgcggatgtacaaatgcatttctttcaatgctatgtggcatgtcatgtgtataaagtattctcacatgaatagttacatgggcaaatgacacagttaactcacattagtgacctgcagatatgcattttaaaaataaagtgacctatatgatacacctaaacaagttgaatgaccttcatacattttacttttgtcttttttgttgcatcttataaaatttgcatttaatttgcagtgatatattacatattaatttatcatctcatgttttttgaattttttaaataattttggatggcgcacaagaaataagggacttcctctcgagggattaaaagagtttcccttttttaaatgtgacaaaaaaaaggacccaaaacctccagtcacaaatggttgctacgtttttaggacagcgtttcctcttgtgaactttgctgtagaggcaaaataaggagattgggaatatgtagccactgtacgaatagaaatatagaaccatgtaaataaataataaaatttctaatgcaattaattcaacagaactgaggcactaaacattaaatcaagagcacaatcgaacgcctcacacgcgattgcatatcgaggggcggtccctatcaaaataattcaaatccgtaccggctatacggccaatttcaaccaaattaaagcaaacacgaatattcagtataaagaagaatccaaaaaatcagagtgcgtgggggaatcaaattcaaaaaatctcacgtctcgccaaggaagaggaggaagccgtcgtccacggcgtgctggctccggaatgcctcgcactgccccttgctccggctgacggcagcctgcgccatcccgcggaggccggcgccggcgtggccgtggccgcggccgcgcatgtcgatgcggcgccacaggtcgggctcgtcgcgcgcggcgcggcgccaggagcggcacacctggccggcccccgcgaggatctcggcgtggtcgcactactaagtgatttttctgcacgagacctatgattttttgcaaacggaccataactagtagcgtatgtaaaattcgagtggcattttcacagacggctccttaagacgtccgtttgaaaaaatcgattttcccatacgggtctcttaagcggtccgcatgtcatttttgcatgtgactcacttaagcacccgcatggaaaaatcgatttttccatacgggcgtcttagggagcggtctgcgaaactagttagtctatctgactcatatgaacttcaaattgaatgattctttttcctaaatatttctaaaatcatgctctatcatgttattgtgttcttactcctattattttggccattttttcatttatttttgttttatcaattaaaaatttgaatttcaaatcttcgaataatatgttaaagcagtaaatgatttcaactgaaaaagttatcaacaacaaagttgtataactatcaaaatctataacttctattttggtcatttttttcatccgacaaagcgataggaacattttcacaaaatttacatatctctcttatagtttatacaactatataagagaaatgtacattttgtgaataaggttacaaattattttgtcggatgaagaaatgacccaaataaaagttatagatcttgatgagttataccactttgttattgatgaatttttcagttgaattcatttagtacttgtaaatgttgtttgaaattatcataatttgaaattcaaattcaaattgttcaaacaaagtcatctagaaaaatgacgaaaacaaaagttgtagatcctgataagttatacaactttgttgttgacaacttttccatttgacatcatttactacccaaaaatttatttgaatttcttatattttaaaattcaagttttatatagttcaattaaactcggatggagaaatcaccaaaataaaattggtagatctcaatgagttctacaactttgtttttgacaactttttcacacgagttcatttagatagataaaattcaattcaaaattttattaatttaaaattaattttttccctcctcctcctttcaaattttttcatctcctcttctctctcccctcctatccagatattttaactccctatccttatccttttcctatctctcctctcagcctctcactctttcctcctctcctctctctctctcaccgacgcacggagcgggagcggcggcggctgcacggcgcggcgggcaggagcggcgcggcagcggcaggctcggcaccgacggcggcggccttccccgacctgccatccggcgcggcagcgcgcggcgggctcggcaacggcggcggcggccttccccgacctcccatgcgcggcgctcccttcctcgatagcaacaggcacgacgacgacgacgatggcggcgggtggcgggtctggacggcgggcgcgcagcgggctcggcaccggcggcggcggcctcccttccctgacctcccatccggcgcagcagcggcaggctcggcaacagcagcggcctcctttcctcggcgcggcgcttccccccctctcaacgccgcggcagcgggggtggctcggccgcctcaggcggcactgccctgcgccgattcggtgccgccgccgacggatcaggcgacggcgggcggcgggggtgacagatcctgcgacggcgtgcggcgggggcgacggatccggcggcgggctagggtttagggttttttggattttttttttgtttgccgaatttattttacggcggcgatggcgtccagcgccagctccacccagtccctcgcctcctccatctccatctccaccgctgagccacggccgccgcgacggcctccgcggcggcgagcggaggagggcattatgcggttggtggtgagattgagaggaggaaaagctacacgcacgggattggtgtccggctccgatggagtagtagaagtagcttcttgcagaagccaagctaaaaactggactagccaaactgtatagtcgactgtccagtttgatctagagcagtcaaaactgacgttagagcaaaggttaataaatgggcgcgcccacagtcaacactatagctaagccaatactagtgctccctcacggttttataattctcgaagttttggataatgacacagtttttaaaatatatctttgatcttattttttatatatataataaataaatgaatgtttacttttatcatagaa

SEQ ID NO: 26121 - DNA, 922 bp, Oryza sativa
aattcgagctcggtacccaacttgtagctgggtagtttatgtattcagacagtttttatcagcatatgttctgatgcgattggattgctggtagttataaaatccctgtgctatctttgtagggcctcctgtttgaagagccttcggctcatctcatgcttgggtgtctcaaatgaaggaattgaggaggcaacaaaggaattccctcttcttgaggagcttgagctctcattctgctacaatgttactcatgaggcgtatgcggctatcggcgcggcatgcccacagctcaagcgcttcaggcttagcaaacgatccttctatgattcaggaggtatccgctggaaaaacaacgatgatgctggtggaatttcaaagatgcacgggctacgctccctgcagctcttcgccaataacctcacaaatgaaggtctctcaaccatcttggataactgccccaacctggagtctcttgacattcgccattgcttcaacatcgacatgggcgccgactccctgcgagcaaaatgtagcaggatcaagatgctgaggccacctgatgactcaactgatgactatgacttcgatgtgtacactcccaggaggctccccatctcccccggttttgtgcggtattattcggtgtattctgatccggaatattccatgtactcggatgaatggacgtctgaggaatttgatgatgatgatgatgattattccggtccttcccgctacgaggaagatcttgacaagtatgataacgcgcttcccaggtgcatgaggacgtttctgaaatgaagaactgcatgatttgatcaatgcgagtggaatttatgttggagttcaactatttttttctgggaatattttctccctttagattcatgtaagttcgttctgcactcatgttagttgatga

SEQ ID NO: 26122 - DNA, 9587 bp, Oryza sativa
cggttcggtggagcaaggccgggtgcagctcgaggccgacgaggaagaggaagaacgtcgccgctgtgctcgtgtgctcggtgctgccgcttgccgtcgccccgtgcgccgggtggccgctgcatctcatcgtcattggcggtgggtccccggcggtgcaccgccgcttccttggccgcgcgtcgagccgtcccggttcgagccgttgcgccgaccgtgtgttgtgccgctgctcacctgcggcgggaggaagaagaagaaaggagaaagaaaagaaaaggaggaagagagatggagagctgacatgtgggcccaagggcatttttagcatttcacgcgatttctctctccttctcaactgaaaatcattattttaatcggcacagtgtccattggcaaattaccacgttatggagtgtttttccctaaaagtgagtttaggcagtgtcccacggctaaaaccacacaatagcagtgtcctatagcaaaatttgccttattgatatgattcgacgaaattgatcctccaaagcaaactaagtcataatatatttttcttcaaggtccttttctctccctatttctcagggatcattctgtaatttctctatggctgtgtttggaaaatgggttaggagaggtaggattggaaatgcaaatgaatgaagggataggataaaatagggtccctttgaagggtgggaaatcatatcccaaacccattttccaaacataatctatgtgaggaggtcttttctgtaagatacctcatattccaaactgacggcgtcatcgctgtcaaacggagaccgtcaatttcgaaccgggcgggatcgagaagattccagaaccagaagcacatccgcctcaaacacgacaaaccccccctaccctgttcatcttcgagagattcctcccaatcccgagcagaatcccccgccccggcgaatccgcgcggcgctcgaggtaatccaatccctcctcttcctccgccctccccctccctcgccgcgtcggctcgccggacggacggtgggttctccatggtgtcggctttctttgtgggctctgccgatttccgcgttcctgaggccgcgtagaatctgcataggagttgtttgggtagatttagttggcggaatcccccgcggtgtgtggaatggaggtggattagcttggctcggttcggtcccatgcgtggatatgctgggccgcctttggagcatttctttgtggtgtggctacccagctgtataataaacatggcgagtaggattacttcctgtgtagtcaatttagccattccatttagggatttctgattctgttgcaggtgtccgtggcactggtggtaccttgatagagactagagtgaatgcctttttctttgttctgtttcattgtttgctgcatcctgatgcaaattagctcggcctgtaaactgtaaaggttgcttgtttgtgtcgtcgagatgggatttagtgcgccgcggcagtttgatgatgaattagggccttagcaggttctttggttaggagaatgttaatccagggtgaagagcgaagaagaacaagtagctcattaagctgcaattcatggtattcatgaaaagttgaaacgatatgtatttcgtttgtaattcatttccacagcttttctgttaaaaaagacattgaggtgtgtttgttattcaagtagtggaaccacgtatggagttttctggaatgggaaaaaatcctaatggagcaatactgtgtggaggtcgagtctttaccgatacttgtcacaaaataatttagttattagctctcttttatgaaaggtagaagaatggttgtgaataactgggaatggttgaggaggatctgtttgtctattgtgtacttttgtgcactttggggctgactatagttttgtttgtagctttgcacaagatattagatgtgatgcctttgtcacttgctgaaatactgaattattttccctttgctgacagtgaatttgactagctagtagccacgcatgaagccagatggtgaaactcagcttcgtcctacagctgctggacatccagatcctggtttgggcacatcatctgcagaatacgtggcctctctaggaccagctacagtatgatctgttctctttcttgtctttagaaacatgacagtacaggtagtgcaacgactacctaggatccttttctgctcgaagttctgatggtaaaatttgactacaatttgatcaagaaataaaagatacattattatatgactaatttcttaccagttacatcgatacttagttcttttaccaaccttctcttatactgctcaggttcagccctaataaataaattatttctttttcaggctccagtatcttatccatatatcagtacctattatggaggcacttatggtgcttatagtggacaacctctggtaatttacgttaccgatatagtcagatatcagatttactatagcagctgatttttgttatctactttctttaggttaacgctgctttaatggcaatgcctccgcattctgtgcccttggtgaccgatgctgttgtagagcccatatatgtcaatgcaaggcagtatcatggtatattaaggcggcgccaatctcgtgcaaaagctgaatcagaaaataaggccaacaaaatccgcaaggtatttcctaaatattatacttgcttgagccatattttcaagctatttatcagacagggtgaaactgctttgccacctcttcaagattgttgttgaagattgacccatgccatcaaaacaggccttatcaaaatttcaagaaatttatgggaaaatgaaaattaatctgtttgctccaagttcagcatggttgtgacaacttattgggtttttacagtttcccttttgtttgtgaattgttcttttttttctgattgatacatccattgatctcatagatgaatatatgtgttcatatgtgtttggaatttcatttcttgctttcctcctttttcactgttgcagttatggatttgcaacgccttaggccccgttcgatctcccgtgttggagatggattttgttgcacgcaaaacgagaaacctaattagcacatgattaattaagtattaactattataaatttgaaaattggatttttttttcaaacaacttttatataaaaactaaaaaaaagtaccagttaacagtttgaaaaatgtgctaacggaaaacgaggaagttgaagtttgaagttgaagaatagaacagggccttagtctagaatcccacatatcagtcaattaaggggaaaattcctcactttggcatccttaatttgatcttctatagttattttgactgcaaaacttagattgtaccagattttagcaaggtttaaggggggcaatatatctaccctgttatttccatcttcctgagaatatctttcatctctattcaagtttctatcaaaactgactgtgctaactaatttaaacagaacaccattaaatgatattgtgagtttgtgacaatcttaatttagacgatatggctaatccaatagctttgtcgtaagtcacttttttcctttatattgataactacagaccgatagaagcaatttatggttaatttttttactaaggtgctcaagtaatgttctcctcactaaatttaatatagtttcacacttgaacacgtagaggaccaagcaaaaaaaaggatatgctccttgttctaaatgctttatcatgtttaatgggcactagtttctgttcatattgaaactcagttgtgttctttgtttctcatttctttggtaccatttggtttgttccttcttcagccttacctacatgagtcccgccatctgcatgctttgaaaagggcaagggggtccggtggtcgatttctcaactctaaggctgtggaggggaagcaagacactaaatctgtagataaaaaggatggagctgtgccatctgaggagaagagagacaagaagttggcaaatagcattatcaaattggagaactcgagcccaacaacacaaccaggtgcagatgcgtccgatgttgtatgatgcaaatttagccaatccctccctaatccaaccaaattgccagaatcgatcgaattgtgtgcttgctttctgttcgtgacagtttaagtctgacatagctgttagttttgatgattggataaatccatgatagtatagtgaacatgttgtgggagcagttcagtgctagggtttgttgctgagtgtagattatgaaccttgtgtcactgttgtgttttgcttctgttaatgaatggtagcttacaatgggaacttttgtgaatttcaggttgaacaatagttccttggaaataccatgagaataacttgtttacagaacggtttgttcattcccaaattcgctgaggacttgcttggataaaaatgtgtcactgttgttcggtgtgattgctaaccgtatatgataaaaatttcatgcgcttaaaagaagcaagaaagcgtctggagcaattcagcaatatctgtgtgcttagctgacctacgtgagcatacttggtgcacgttatgaactttttactcttcgccttggcaaaatctactcctgaaagcaatggcaaatacagaacagaaataggtagtgtgtgtggattgggggcaagtgtatggagattgtggctgaccacattgggaagggtggcagttgccttggaaggagagaggcaacaccggctagatgaagggtatggaactaatgaatgaaccctactcgttagtggtaaagtgtggttgggctgtcgaatgagtacgtacgaaggagaggagaggtgggccttgattcagactaatagagaagaggacttatatgtccttttcttttagcaaataatcataaatgttctatagtctattgtgctacggaaatttaaggaaatactaagttatttaaagcattgagagattttattaaaaatatatccaacacaacttcttgataaaattgtattccatggttctattttcttgtagaattgtctttaactgtattttaaacttcttaagaaaaagcctggcacgaatgctagaaactgcattttagaatgatttattaaatctcaaaagtttcaaataaccatggcacgaaagctgcaaaatgaaccaaattttgcttgactgggagtgtcagatcaaagacgatggatgattgctaaagttgaagaactcaatttcaactcagtgagctagaactactcccctccacccaccaccctccctccttccctaggtccactcgtggatggtgagttgaatgtttgtagagaggctcaatgtaattttttgcctattaaggaaaaactcatcatgtcattttttccacatgggggtagtgaagtggttgcaaatggcaagaaaggaggctaatgatgttgtcttccctaaatagggtgtgaagtcatgctgcataacgcaatacataggagaagaggagggaggagacgaggggtaatatgtctggtttgaatgcattgggagtaagatgtcctggtttgtagttgaaaaatagactcaattaagagctccatagataaaatcagactcctcttattttttttatttatcatatataatcctcgctttagcttcaaattccgtgtgtcatagatgttggattacaaatgccataaaactactttatatagtttcttttttgtcgatgttctagaagctaccgcagatgttgtaagcgagccaatgttgtcatgtgggccatacctttctccacgatagcatttactctttttgcgggtcccatgactcacaccaacaactaaagccaaaaaggttcaattttgcttatatcattcacctcttcttgttcttctccatctctaagcacttctacctaacgaaaccaaagaggagaagacttgtgttagtcggtgccatggacgagttagggatcatcgagcaaggcgtcgactggaggactcgccttggccaagacattcgcgattgcatgataaatgatatgtgagtgcactctctctctctctctctctctcacccaattcttacttttttttgccatgagaaattgattgcagtgttttgaatcgatgataatttatgaatattggataccctgctcgatgctatagtacttgtttagtgatctaattgaatcatgatatgtatcagtagtcagatctaatttgacgttttctagatccaagagttgtgataattctgtggcttgctatctaaccgtcacgataacctaaaaattggcatcagttttggtataaaaagttgttggtgaggttcaaacctttgtgtattgatcatacccatgtttagaaaatgatcccaattaatgaactaaggttgcatgtcgatagttctttaccaagttacttggccagttctttgcatgactctaagctttatggactagtattttagtactgaaacttcagctgtctgtcgattttttgttatattatttaactagtattttacttcagcgcctattctttccctgttcccaccatgaggaggaggaagagggagagacctggagaaaggataggtgattgtttatatgtatgggtatatgtaattgcttttaatgcaggtgataaaactcacaagaaagatgatcccatatgcatgctcccacatcattttctctttttctttttgcattatatatagtttctccttattattggttatgaatgctctcttgtagactcttagcatgtataacgaattgctaaaatcttgctcacttctggttggacaaattatatttcattatttatgagaatgtatttacaattttgaacatgttactttgccacatgcattgcccaaatagtgaacagtttgcatatgtatttcttgtacgaaacaacccctaaatcctcagttgcctgtttcttttattgcttgttatattagaaccacatttttgaactatttaggttggaagtaccatattgaaacaataaatctctcatgttaccattcaacattctgtctgcagattgttcagcctgcaaacgaaattgcaaagtactactacagcattgattgatctccagaaggttgctgtcagaatagaggagaggatccatacgatagctagtgactatgtatgatagtttcttcttactagattttttttgtaatataatttccttatatattaattatacaatactttatttatctttgatgtgcgcatgatagagtattaatcttaatatagcaacacttctgctgatctgctagttattgcaatgtctcatagctttttgagtaagtacaacttcttgctagaaatcctgaactagttaactagagctataacaattgtgtgaaaccatgggtacgattgtcttgcttcatattatgtaacataatacaatataatgtattggttgcaagatgctctacaccaattttatcgatctaattaaaaatgtttattactccttcatttggtatcgtgcacaagacactaggactgaggctgtattcaattaaagtttttcattttacatagttccaaatatttatgtccccttttcaatttattggcttcaagatgtaaatctctagattaattctagaatatattgattttatcgtgtgcactgattttattgtcatgcaattacttgttttggtggtgttcatatactccctccgtttcacaatgtaagccattctagtatttcccacattcatattaatgttaatgaatctagatatatatatatatatatatatatatatatatatatatatatttgtctagattcattaacattaatatgaatgtgggaaatgttataatgacttacattgtgaaacggaggaagtcccatttaataatatatgcacttattcttgacttgctagattgttgacatgttccttttgctatatatctttgtataatctttttgaaactcatatggttatggttcatcaataggatgttcagttttaaacggaagttctcataatttttttgtcttacacttagggtgattatctacggaggatttgtctgacaagaggtgatttggactcatatgatgtatttttgaatgattgtcaacgtcagcaagcttcaatccgttcatccatcttgctccatcaggagaataagcaaggtgatcaaattgtccaggcaaaaagaaatattaaggggacatcatctagcagtatgttcttgagaatttgaacaccagtgtactcagcagatatattgttttgatctgtttttatggtgcctgtatgacaaaagaattgtttgcttagtaaatattcgagaaaagtggttttttttttacccgagtctacacatgaatctaatgttctgcactagtttatacatgacaatacatcatacatgcaaagacaattttcaacgtctacaacctgatcccgtttgattaaacaagcattgtaatgtttttcttctttagacattggaaatttgggtgcaaaacgatgaatattagttattcttatgcaacggatgattcaagtgtgtacattgcctcctaattatgtgccccctttttttttcaaaagataaattggagctagcccaccgtactgacttatatcatctatgtaaaatgaattacagatggcaatctctctgtgaaactagagttaagcaaagcataaaaactacaaatttgttgtaagttgtttaggtggttctccaagatcaagtatcaacactaaggagcatgtgttagagtcaatgccagtaattgttctccactaaaataatgtaacacaatatccacttttatattgcaggtgtgctatctaatcaagtagccctaaatgaccacaaggagcactcacacccctacgagaaggatatgatcagcaaactccctaacgatttggtccaacatattatgtcattcttgtcaatgcgagaggctgtgcgcaccagtgttttgtcccattggtgggtcaaccagtggaccttcttgaagtccattcagcttaatatatattggtttcatatggacagagaaaaattcagtagtttccttgacaaactattgctaagccgtgtccaagctgatgctcccatggacacattcgagctaaaatcttttgcaattgaccgcgccaattattggattaatcatgcaatcaagcacaatgctaaagtgcttaaatttgctgaatatggaaaatgggaacctttctacttggatccaaatcttgtggagttaagttctcggtatctagaaactttggagctgactaatgttgctctagatgcgacgatattcaatcagttggccaatgcatgcccagcattgcaaaatatgctgctgacagactgcttactggaggtagaagaaatttcatcaagctcattgaagaatctggatataattgactgctatattctcaaggacctgagcatttgtactcctagtttggtttcattgtgcatcaagaatgaaagaacagacaattcttcgttcagaaactcttacctaatattcg

SEQ ID NO: 26123 - DNA, 4163 bp, Oryza sativa
ctaatgttgctctagatgcgacgatattcaatcagttggccaatgcatgcccagcattgcaaaatatgctgctgacagactgcttactggaggtagaagaaatttcatcaagctcattgaagaatctggatataattgactgctatattctcaaggacctgagcatttgtactcctagtttggtttcattgtgcatcaagaatgaaagaacagacaattcttcgttcagaaactcttacctaatattcgcaacggccattatcattgatgcttcaaatgtcagtagcatggagttgttagctatggatagacaggtactgtactgcttgccctgtagcactgatcctttctcccaaacactctgtacattactatttgtttcatagttttactatttgtttagtatatgcatttgtacattactatcatacattttcatgtgaatatatttatgcaaatgaattttctttcataacaaggacacaacataaaacattcattttgcacggtatgtatatacccgatttcaaatcgacacatacttctctgaccaccttttttaccacaattgttttggatttcatagcattaacagtatttaagacttaagacatgtttttttcctgtgtacatatgaagttcacattcgtggagaaagacgggggcgagccaatgttcaagaatctcagaaacttgagcctaggtctatggtgcattaacaacatgttttcgcctctacgtcgattcgtccggcattcgcctatgctgaggatggtgactctgaggatcagtccggtcagtgccatccattgcattgcatcatccccatgcttcctgtgtccagcttctttttcttttttttttggttactatcattgttgaaagcctagagctctaatgatgctgcaaacctttcaacttcagctggattggaagtcccatctcacgaaggaacatcaggagatgctgatcagcattcgtgatcgtcgtggcctgattctttatatcgattggtattgaaggccaagggcttctgcggtgctccaatggtgaataaaattgctgccaaattaagctggttgctgaaacattgagaccaatttaagtttcttttcgttttaatcgcagtggatcaaacttgttgcagtaataattacctgttacttgactgcatgtgtcagcctggagtctggatgttgtctttgatgtggtgtcattgttacttatactgtttcattatatggatgaaccaatgagtctttaagaacctcatatcataattcacctgttagaattcatgcttgcttagtattcaggtaatgtcataaatctgcccagtttctagctttgcggcatcaaacattttttttttcaaacataatgatcctatttcacattctggaacttttacttctggtaactgtttgttagttctggccaactgacagccgacgctgtcaacttggcgcggatactggtaacattttgtggtcttgttttgatatgtactcatatttcagaatgttttgtgttttgatttgtcctaagttaaacttcatcaaagtttgaccaaggttataggagaacgttttttaacaccaaaaaagtatattataaaaatatattcaatggtggatttagagagattaaattgtgttgtaaatgttttataattttttttataaacttgaagtaatttgacttaggataaaaccaacaccttacattctgaaaggaagggagtagcgattagagttgattccgctgaactaatattttcacaattccaaagagattaagcctaatcatggtctatattttcaggcgagttatgaaattagtttttcattcgtgtctgaaaactctttccgacatccggtcaaacctccgatgtgacacccaaaaattttcttttcgtgaactaaacagacccttagatgaaagagacacacacactactacactcaaacacatccatagaaccttcctcctcttagtcaattgttccaagctatttattagatttattgtacataatatttaatatttagtattcatccctataaataacactatcatccatcaaccttttaactgcattccttccataaagaaaagaccccagcatgactttttaccccctccgtcctagccaaaaatgcatgtcttgaaattagaacactgtctatatagccaaatccccaataatagaatgagaagtttcattatatgccacctttgctgctgaggatactaattcttgttctgtaccactccgtcaattctagcgcgctgtccgccaacgtttttctgcttcctctgtcatgttgctgggcaccaccaccgtcgttgccgctcagtactgccaaaatcgatagcgtcaacctccccctctcatcaccctcctttctccgatgtcccctccaattttgcattctcttccccttgctgcaacctactccttgacccccaaacggagcccaagccggagctccaatgaccaaaatcaacctcgcagctccaccaggtatagctcctcgtgaaaaacccaccctgcatcgaatcagcgacactactagtcatcactattagcagccactataacgatattcacctgcaagctccacaacctccacctctttcaccgacaagctgaccagcaagttccgcggattatgttgtgctgacttcctcagccttgacaaggccgcatcaaccagctaccgcactccacgggtgcccttcgatgggatggcgataggagggagcgattgggagagggaaggggacgagggtgtttggaaaagggtggtgagaggggggctcgatgatgcagcaacaacaggggcaacagatggacattgatggactagcgtgcttggattgatggattgactcgaaacgaaagaattcgcatactcggcgataaatgataaaagacatgcaaattgagtggcaaaaaatttcgagagatttgcaatttgagtggcgtgtaataaaatttcttaagtagaacttgaagcctctcgtttgctactttttgtcatgcagattttcatcaaatttggatgaaagctttacaaatagtattgaataagatgttttccctttttttttcttcggtatctataatatctgatgaagtttaggccgtattattttttatctttaaaaaaaaaacctgaaacccgtcctggtgcttcgaagcaggcccgtcctcgattcgccaaaaaagcaagtccccaatctctccgtgagttctcttctcccacctcgtccccctcgatcgcctgctccggtgagaattctcgcgatagaattctttcttcttggttgatttcctccttgcgcgcgtgatgctgtcctcgtagctagcagaatcgcgctttggtggttgatgcggtggatcgctgtttccattgcaggcaacctgttcgacggaatgcagcagggagcggcggggcaggctgggccgtcgggtggtggtggaggcggtggcggtggcggtggcggtggcgcggaccgcctcagcgcgctcccggacgcggtgctcttccggatcgtgtcgcacctgggggcgcggcaggcggtgcgcacgagcgtgctatccaagcggtggcgccacgtgtgggcgtccgcgccgcgcgtcgacgtccgccacccctgcgcctgcgacgagagcgccgaccaggagaggttccacggcttcgtcaccaccatgctcctcaggcgccgcccgttcgcccccatcaaggcgctccggctgtgctggagccacgacggcgacgccaacaactggatcgctcatgctgtcaggcgtggggccgaagaaatcgatttctccgcgaggcatcaccaagatgatccgaaaccggagctagagtacacgagcttcatttctcacaagatcaagatcttgaagctgacgcgtgtccggatgggcatcaagtttatcacgcagatctgctataggtgcacttttttggaagaattagagctcaagaatgttaattcactgaagggcagattcaatcgacctcgctgaagcgcttgtctatcatcaactgccttatctctgatggatttttggttgatgctccgaaccttatctcgctctgcttcttcagacctctcagcggtaagagcacggagggagccaatca

SEQ ID NO: 26124 - DNA, 12861 bp, Oryza sativa
acgcagatctgctataggcgcacttttttggaagaattagagctcaagaatgttaattcacttgaagggcagattcaatcgacctcgctgaagcgcttgtctatcatcaactgccttatctctgatggatttttggttgatgctccgaaccttatctcgctctgcttcttcagacctctcagcggtaagagcacggagggagccaatcactcgtctgataataggagttggccattctcagcgtcagtgtgggagtttgatgacgatggatctgatcatgatgatgatttctttgcaattgctagtggtggtgaacactttgatgataagagagacaatgaatctgatcaagacaatggttctagtgatgaagactcagatgataagagagaccaagaatctgatcatgatgaagatgttccctcttccccatattctgattctaaggactcctgtgatggcagtgacagtgaatgcgagtcttatgaatccagtgataaggagggtgatgatcttgaagattgcgacagcaatgatatgttggaaaacttgatcaaggtagctaggggcttgacagcttatcatggagaggtaagtttaatcgccttgctgatactatttcgttattttatttgtatgcttttttccctgcagtactgcacgcattgctttttctcaattctttgcaagaagatttccattgtatgggaaacgaactaattgccagtgtaataacagaattgtcttcataaactaaatgtgtagaaggaagttttgtcagttctgctggtgatgagattcccaaattagtatagctatctcagttaatagtgctagtattgctgatgttagagtactgccactcaaacaaatgaaaatactactgttgtagcttgctgagggcaacattaagaagttccttactaattgatcagccaaatgaatggcaacattaggtactacggcaagttcttatgtccgtacctgatctactagtgtgcaagtattcaataacttttctctatggtgttgaactttgattatatcttatagttgacttcttgttgtgccttaattagaactctcaattagcatcttttttttatttgtcgaattctccatttgccttggccagaagaaattatttattttgtcatataagaccaagctagcacattagtttctcttttttagataatggaagtacaactcagcacatagttactacagcattacaataccaatatctcacaaatatttcacaattgacttgagagaaaccttgggttcttctcataccaggagaacaattaggtttccattctagaacatttgttggtagtgcgacatgtgtactaactgattgctaaaagtgccagtaactttctaggcataggttggtattcccctgatgattgcaaacctgtgatttttttcctctaatctggtcttcatgtaccacttctgattttatggcacatattgtagattcgtagtagtgctctggtaggagaaatgttttgggccactgaatcacttgatatgtatggaaatgtgcaggtgcttctgaggaggcaattggaaaatttccccatgttcaataacctgaaaactctgtcccttggtgaatggtgtatggttcctgacttcagtgctttgtcaaccatacttaagaaatcacctaaggtagaaaggctttatcttcaccttgacatggtacgtgtactcatatgcttgttaaatgtttgcttagagtgtttaagcatgttattaatcccttaaaccattgttttacaaaagatccacagaggaagaggggacatcgatccaagtggaggatcatttgcttgcaacaacctgaggaaggttaagatcacatgttgtaaagatgatgaaatggtccatatgctgaaacaattcctccaacgtaacggcatatcacttgagaagattgttcatcacacttctagcactcataatggcgaagaagacggaggcggggactccagtgcgaaacggaaggcgcaaggcgaagttgcgaggctagcagtgaaacagaggagggcgcgaaacagtagaagcccggagtgaggggaacatgtttaaaatgctgaggaatccagtgctgagtttacattgcagttagcagtagaattcttcacaggatgtgtatatgcatcaaatctagtacaggtactttggggacatgaaaaattatgcatccgttggtgttgcatgaaaatagatcgttggtcaatgttcagtgacttggaatcctgtgaattgctatatgcctatatcatgtttgatgtattgagtagtaattggcagcggctacatttggatttgtgattccacgattgtctggccttaatctcgtcatggtgtcgatgtttgcaactatgttcatactcccctaaaaaaagagagaaaatatgcccttactctagccaaattaccatgtcttttcaagcatgtctatgggaacattatagcatagctggtgtttgagtgatcgtgtaattcgcacgtaattaccgaagaaaggagtacgcacagtatatatttctatccaggacagtattcgaaagtaagagccccattggttgtcctaataaaccaaaaccaaagtcaaaatttgaattttcaaatttaaatttgaagttgattttaagatattttcaacgtggtagtttcttttttaggattggcttttaagtcgctaaaacacatatataaagttttatgtataaattattttttatttactaataaaccgttttgacttaataggaaatatggtcaaccgatgaggacctaaccactgttggaattgtattggctgatagatacataccatttctaactgaaaaaaaaatacattttactcctactaactatttcgtcatcgcacgaaaccccctaaattatttttcagcttattttacaccctcaactattaaaaacggttcactgaattcactttagttcataaatggtatttatcttttcttctctctatatataagttgtatttcacactaaaatacaaatatatactctcttactgctattactattatatttgtgtaatgaataatcgaaattagttgccacaaaaaatttacccctgtaaaatccaaaacaaatttttttcagactataaacatgtttaaaggtaaatactgtagtagtagtagtacaaaaaatgaaatcggaaatttccagaatcgacattcttttttttccactggaggaaaattaaacaaacaaatacgtatcccctatatatattgggcatttttggtagttccttccccctcgtctcccgaagcgcgaagccgttctatcggaactcgaaagcagcgagagctcttggcgcggcccatcgatttcgccaagaaatccccaatctctccgtgagttcttctcctcctcccctcgatcgcgtgctccgatgtgtttcttgcgattctcggtggttttccgctcgtcgtagctgagcagaaacgttcgttgtgggttcttttgattcggggagtcgacgtgtccattgcaggcaacctgttcgacggaatgcatcagggagcggcgcggcaggcggggcagtccggcggtggcggtggcggtggcggtggcgcggaccgcctgagcgcgctcccggacgcggcgctcttccggatcgtgtcgcacctgacggcgcggcaggcggtgcgcacgagcgtgctctccaagcggtggcgccacgtgtgggcttccgtgccgcgcgtcgacatccgccacccctgcgcctgcgacgagcgcgccgaccaggagaggttcggcgacttcgtcaccaccatgctcctcaaccgccgcccatttgcgcccatcaaggcgctccggctgtggtggagccacgatggcgacgccgagacgtggatcgctcatgctgtcaggcgtggggccgaagaaatcgatttctccgcgaggcatcaccaagatgatccgaagccggagctagagtacacaagcttcatttctcccaagatcaagatcttgaagctgacgactttcgggatggacatcaaggccatcacgcatatctgttctaggtgcacttctctggaagagttagagctcaaggattttcgacgacttgatggacagattcgatcggcctcgctgaagcagttgtctatcatcaactgctttatctctgttgcctttttggttgatgctccgaaccttatctcgctctgcttcatcagacctctcagctttgagagaaccaaggaatccatttgctcgtctgataatcgtaggtggccatccccagtatggaaggatgacaacgatggatttgatcatggtgatatctttgcaattgctagtggcgaacactttgatgataagagagagaatgaatctgatcaagactatggttttgatgatggctctgatgataacatagccagtgaatctgatcatgatgatgatggtcccccttccccatattctgtttcctacgatggtgacaatgaatgcgagtcttatgaacccggcaataaggaggagtctgatcgtacagtggcctatggtgagattgcagatgagtactccagtaatggtgatcccggtgatgaatatcggggaaattatgtgaaccatgattctgcgaattacggtagagctaataagtttggaaatttgaacttcccagtgaagtcaattgtggatgcgtcagctcatgaaggagaggtaatatttaatcaccttgctgatactatcgtgttctcaattttgtatgctttttctaaacttctttgcaacaaaatttgcagtatggaagaggaactagttaccggtgtaataacagaaatgtcttcataaacttaatgtgtagaagagtgttttgtcagttctgttgatgacattctcaaatcagtatggctagctcagttacaaagagtactagtattgctgaagttatagtattgccactcaaagaaatgaaaatgctaccgttgtagcttgctgatgacaatattaagaagttccttactaattgagcagccaaatgaattggtgtcacccagatgacattgtatatctgttaggtactaccgcaagttatcatgttcctacctgatctactagtgtgcaagtattcaatcaccttctctttatggtgttgaactttgaatattatcttatggtcgacttgttactgtgccttaactagaactctcaattagcattttttttttacttttacctgtcgatttttctgtttgccttggccagaagaagtttcttttatcatataagaccatgctagcacattagttactcgtttctagataatggaagtacaactcagcacttcagcgtagtcactaccaatatctcacaaatatttcacattgacttgagagaaaccttggattcatttcataagtcataacaggagaaatttaggttgccgttctagaacatttgttgctagtgcaacatgtttactaactgactgctaaaagtggcagtaactttcaatgtataggttggtattcccgtgatgattgcaaacctgtgatttctttttacctgctcatctaccacttttgattttatcaatgcacatttcgttgttctctggtaggagaaatgtttttggtcactgaatcattttgatatctatggaaatgtgtacttgtgcagctgcttctgaggaggctattggaaaatttccccatgtttaataacctggatactctgtcccttggtgaatggtgtatggttcctgacttcagtgctttgtcaaccatacttacgaaatcaccaaatgtaaaaaggctttatcttcaccttgacgtggtacgtgtactcgtatgcttgttacatgtttgcttaaagtgtttaagcatgttattaatcccttgaaccatcgttttacaaaagattcacagaagaagaaggtgcatcgatcccagtggaggatcattttcttgcaacaacctggagaaggttaagatcacatgttgtaaagatgatgtaatggtccatatgctggctccattcctccaagataacggtgtatcgcctgagaagatttttgttcgtcgcacttccagcccacataatggcaaggaaggcagaggtagtaactccagtgcgaaacggaaggcgcaaggcgaagttgcgaggctagcagtgaaacagaggagggcgcgaaacagtagaagcccggagtgaggggaacatgtttaaaatgctgaggaatccagtgctgagtttacattgcagttagcagtagaattcttcactggatgtgtatatgcatcaattctagtacaggtaactttggttacatgcagaattaggcatccgttggtgttgcatgaaaatagatgattggtcaatgttcagtgacttggaatcctgtgaattgctatgtcatgtttgatgtattgagtaattggcagtggctacatttgtctttgtgatttcacggtctgatcatctggcctaattagttttgtcatggtgtcatgtttgcaactatgtttatactccccgtaaaagaagaaacatgttcgtactgtagccacattatgctcccctaaaaaagagaaaatatgttcgtactctagccacattagcatgtcgtatgctctagtacagtgcaggatagaaataaaaacatctattttactcccccgaattattttacttgatcacttaacccctaaactattttctttctcgttttaactctaaactgttgaaatggttcactttaccatgctagaatttatacatagtagaatcaccaccaattcactagtactcccactacttctacattctttcttcttgctattactattatatttttgtcatgagtaatcgaaactactacctgtaaaatccaaaccaaatattctgagactatagtctatatcttactaaccgatttcagggtaccatccctggcacttgattggcccacgtggtatcctgaaaatttagcgtacatcgtctgaaattttgccacgtggtagaggatggagcatcattccattaatcagtgcatgagcagaaacatttcctaaaacccagattgccgtgtgaactttccagatcactccacacatagagaaggcaaagatgtaaaagagctgcggctgccccttcaatattcatagaattaaggctactatttaatactccctctataaatttttattgtgagtatttgttttgggtagcaataccaagaagagtgtcgaatttgattaattaaggctgtgttcgaatgttgatgttggaaactaatctctagcacacgcaaaacgaaacaactcattatggcacccacaatggttatctataggctctctataagagatctatgtcagcatattttcctacatggaagatattaaatgaagagagagagcaaagctatctactaatttagagatagtctatagagaaaaacgagacaatgcatgagagagctatagatacccatgtagacatactattgaggcggtttattattaatctagtctattgctgagatgtatatgttttatagatagcaccttactttaccattgcaggtgctcttagcatatgatttattaataaatactcattagcaactcattagtttcaaaatactggtttaagtacctacatgagcgattttcctttcattgaagcatcaaaaccccgaagcaaatctggcatacgtacaaacgcttttgatcaacaagattgcaacggactttactttaatttggtaagcttaattatgttacccggttacccccatacagctctacagaatatccgaacctttggaatcattcaaatgttagatgcttatatatattgctcatttcagggcattgctgcagaaattgtacttttgaaatttggaaagcaagaatccaacttcaggcgagcctagctagacgcatcgaaggcatagtacggagtatgccagaagaataggttgcaaggtatctcctatgacgtattctcgtatgaaaatcatactacattcttttcaaaatgtatgatgtcattgacttttcacgtaacgtttgaccatttatcttatttataaatttaatataaatataaaagagtataagttaatattatagtttctttgataataaaataaatgatatttgtataattattttgaataagacggatagtcaaatgttatgtcaaaaattaacggcattatacattttaaaatagagggagtattattctattcgatttctttgaaccacaaactaaaagttccgccgagttatgctactgtctaacaatttagtacaccatatgccaatctctgtatttgccgcgcagttttctagtacatgtttaaattcaaatactacaaaaaaaatgacatgggaagtttccagaattgacatttctttttcaccggaggaaatttgaacaaagaaatatcccccagatatagtgaggactagtatatatattgggcatttctggtaattcctcccccatcgtctctcgaagcgcgaagccgttctatcgaaactcgaaagcagcgagagctcttggcgcgacccatcgatttcgccaagaaatcccccaatctctccgtgagttctcctcctcctccccttcaatcacctactccgatgtgtttcttgcgatcgaattcctttttcttggttgactttctctttgaacgcgtcacgatgtgttcattgtccatgtgcaggcgaactgttcgacggaatgcaccagggagcggcgggacctggcccatccggcggtggcggcgaccgtctcagcgccctcccggacgcggtgctgttccggatcgtgtcgcacctgaaggcgcgggaggcggtgcgcacgagcgggctctccaggcggtggcgccacgtgtgggcgtccgcgccgcgcgtcgacgtccgctacccgtgcgcctgcgacggccgcgccgtcgaccagaagagcttccgcgacttcgtcaccatcctgctcctcaggcgccgcccgctcgcccccttcaaggcgctccggctgagctggagccacgacgaggacgacgtgagcgcgtggatcgctcacgccgtcaggcgcggggccgaagaaatcgatctctccgcgaggcgtcaccatggctacccggtgccggattacaaacacttcatttctcccaagatcaagatcttgaagctgacgcatctcgggacgacgaggttcacggccgacaacaccctcgacctgctctgctctggctgcacttctttggaagaactggagctcaaggatatcaaatcactctgggggggaattcaatcagactcgctgaagcgcttgtcgatcatcaactgccatgtgacatccgatggcttcctggttgaagctcccaatcttatatcgctctgctgcatcagacctgcccgagctgttccttggttcagccacatggtgtcgctggtggaagccactgtcgtgcttgatgattctcgcttgagtgatgactatcagcagccagtgttggaggatgacaacgatgggtctgattatgatgataatttctttgcacctaaagctgagggccctgatgataagagagacaatgaagctgataatgactctggtgataagagaaatagggacggtagtaaatctgatcttgatgatcatgatggtgaatatgatcatgaggatggttctgagtctggtgataaagaggttgatgatcttgaaggtggcgatgatcgaactgtgacctatggtgagattgcagatgagtcttccagttatggtattcccattcccagtgatgaatatggcggaaactatgggaaccatgattatactattttcggtggtgatcatatgcttgaccacttgtcagatgttagaactttgggtctgttaggccatcaaggagaggtaatgttgtcaccttatcgatactactgccttctcttactagtatgctttttctaaagtgtgcacgctaattatgctcatttctttgcaagcaaatatggcaatgttggcaatgtgttgtatgggaaaggtactactattgagataacagaactcccttcaaaagtttaatgtagaagaaagtttggttatctctgttggtaatgagattctcaaatcagtatggctcagtttaaaaatacagagtactagcattgctgacgttacattacttgccttaagtagcatcctttcgaaatgcttccatcatagtttgttggtgaaaatattaagaagtaccttatactaattgatcagacaaatgaattggcgtcacccaggtgacattgtattgtagataggtactactgcaagttcaaatgttcctacctgatctactagtgcactagtattttcaatgccataataaagtctaagttacttctctccgtattgtactgagttttgaatctaacttccagtttgacgagttatgatatcttaaaagaactccctagaatcagcatttatgtttttttttatttgtcgaattttctgtttgcttttggccagaagaagttatccattttatcaaacaacaagcaagcatattagttacctcagcactagaataccaacatatcacaaatacctcagtttatattaattaggagaagttttaggttggtattctggaacattcgtcgggagccaatacgtgtactaactactaatcggggaactgaaaatgccagtaactgtccatggacatatcttattactctggtaggaccaatgttttgaatcattgaatcttttcaatagaataaacgatgcatttctgtgtaaatgtgcagatgcttctgaggaggcaactggaaaattgccccattttcaataacctgaacactctaacccttggtgaatggtgtatggctcctgacttcagtgctttgtcaaccatacttgagaactcacctcatgtagaaaggctttatcttaaccttgacatggtacgtttactcacacgtgcttgtaaattgttttcttagcatttaagcatgtggttaactacttaaatcatcattttacaggacatccacagaagcagagggggcatcaacccaacgggaggatcatttgcttgcaacaacctgaagaaggttaagatcacatgccgtaaagatgatgtaatggtccatatgctggcaaaattcctccaacgtaacggcatatcgcttcagaagatttttgttcgtcgcacttccagcactcataatggcgaggaaggcacgggcaaggactccagtgcaaaacggaaggcgcaagacgaagctgcgaggcgagcagtgaaacagctgaggagggcacgaaacagtagaagcccagagtgagggaaaggtgtttaaaatgctgaaaaccggtatggatgttgaggaatccagtgctgagtttacattgcagttaacagtaggattgtctactgaatgtgtaactatatgcacagtgttagtacagttacctggatatatgaaaaattttgcattcgttggtgttgcatgaaaaaaagatggttggtcacaatgttcagtgacttggagaatcttgtgaactgctgcatcatgtttgagttgcaatgtttgtatggagtaactcgctctgactgggcaaaatgtcgtcttagcgaaaattgaggagtgagctctgggttcgattctgattttattttgatggaatcgcactgcgtgaaatggcttcaggaataaattgagttttaggttgtgaagagcagcatcatacaatatgttttgttttctttttggttctcgaaactatgagatggacgaaagacatgcaattctgcatttttatttaagtaggttagtatatatctttcaaaaaaaagtagattagtatatacggtgagattgttcataattaaaaagaaattgatctggggaatttctagaatcggcaaaaaaaattcattccaatggagaaacattaatacacaaacaagagcaaatttcagcaaacaccatgtattatatgattgaagttgcataaaacccaggtattatggcttgtcacataaccccaactattgtggttctaaaatttttcaaaaccctacccctctacatatttggtatatatttacttaaaattgtaaaacatagaatgtgtatgaatctttttagttattgattgattgaggttgttggtttaaatcttcactactttaaaagatattgtctcaaatatgttgaaatcaattgaattttaaaacataaaatgtgtagttatatgccaccagtaatatatacatggtttactggaacttttgaccataaaacgtgtggttttacaaaatttactcaataaacaaaaaggtttggattaccccataaactactgcgatggtacaaattaccccctcgaataacaataccagacatcattcaccctcaaaattccttacaggatgaattaccccccactccattggctttggagcggttttcatcttacgtgacgcacaagtggtagtccattcagcataaaaaaattttaaatggtagggtccacatgtcagttttgcttcttcctctatatattggtctcttctttcctgactcatctcggtcgccgtggatctctgcccattcactcgcgaacaaataggtggagggagagaggaggtgaggtggagcgcatcaggagctcaatgagatggtggtggtggcgatggaggcaagaagcggggagtagacaagtacctctctcaaacacctcatggaattcgccaccgaactgagctctaggtggatctgtcaccaccccgatctccacgtggaacagacaccacct

SEQ ID NO: 26125 - DNA, 1299 bp, Oryza sativa
ggctctaatttacatccatgtcattcaaagcatcttgacaggaccattcttaggaaactattctaatccctcgaggggatgttccctcgtttgctcaaaaaccatttaaacggttatgaaaaattctgcaaaaatttgacaacattcatacaacacatatatacaacttcacaaaatcttaagtccaaactcaactcacacgtcgagatataaaaaagacaaattcagcgtatgaatagtagcgtactgtttatatctaaatttgtcttttttgtttctcgatgtgtagatcgaatttgaacatgaattttggtggactagtaggtatcattatactctacattgtcatttttttcagattttttcacaactatttgcattgaatttggaagaaaaagatatacgaggggatatcccctcgagggattagaatacactccccattttcttatgtatgtgtgggaccaccaggtttgctccctttgggccatattggaatactgacatgcagcagttaacatattggggcattggcctatgcgcttgtgcttggccggctctcatgcaagcgtccgcttccctctctctccaacactttctcacttccacgtaggcgaaggttagctaagggcaagctcagtatatcctacccaactcggtaggagggtggacccaaacagtacatagcaatagtatatcacaggaagccacaaagcttatgtgcaatagggaggaataaggtggacccctcttgaaaaaggcaaattttgctacaggacacttgttatgtgtgcttttagcccaaggacactgcccaaactcacttttgggggaaaacactctataaatatggtaatttgccagtggacaccgtgccgattaaaataatactttctggttggggaggagatagaaatcgcgtgaaatgtcaaaaatgcccttgggcccacatgtcagttctatctcctatctctctcctcatctctctcttttctctctcttttctctctcagatggcgaggacagcggccggcggggtggagcggggcagcggcagcggtggacgagtgcgcagccggcggagccacccctcgccgctggcgccgtgcccatgcccgctccgccaggcgtggggcagcctcgacgtgctcgtcggccacctccgcgccgccttcgaggagcacggcggccaccccgaggccaacccattcagcgcccgcgccgtccgcctctacctccatgaggtccgcgacagctaggccaaggcgcgcggcatcgccgtccggcgtccgcccacct

SEQ ID NO: 26126 - DNA, 6253 bp, Oryza sativa
ctgccgcgcgctcctcagcgccgctagctgttgcctaccgcgcgctcgctcgccgccgctgccactccgctcggccgacgctacctctccgcctgtcgcgcgctcgtccaccgccgccgccgccccgctacactccgccgcccgccatcctcgccatctccgccgctgtcgacgccaccccgtgcgagcacgctctgagagagaaaagagagaggggtgaggagagatataggagatagagctgacatgtgggcccaagggcatttttgatatttcacatgatttatctctcctccccaaccggaaagtattattttaatcggcgcggtgtccactgataaattaccacgtttatgaagtgttttcccccaaaagttagtttggacagtgttctagggctaaaaccacacataacaagtctcttgtagcaaaatttgcccttgaaaaaacatcatcgatgactcaattgtacacctgcacgtggcagccagttgctttcatttcattttttactccatgtgtcaggcatacagtgcttcttaccgggtattacctatatgaccagatagtagttatttatcaccctcacaatgcttcttatcaggtagtaaggatacattgaatgcctaatacttgatttctagcaacattatggatgcccttagccagttattgtacccactctgacaaactctccaggcacttttggcgttatcaaattgtttttaaatctgagttaaaaattttttaaatctaagttgaaagtttttaaatcttgacttaaaaatttgcaaagctaaccagaaagttttcacatataagtctaaacttttaaatctatacttgaaagttttcgaatctaaattgaaaagatttcaattcttgatttcaaaattttcaaatctaagttaaaagtatcttttagtcaaaaaaaaaaagaaaaaacacgcacgggaggaatgctttttaggaaaaaagaaaaggaaagaaaacagaaaactcgcacgggaggattttttttcttgatgcggaacgaaaaacttaacagaaaagagaactcaccgcttcctttgcatctggtgcacgctatgttgaatcctatatttttacaaatgctatattgtttataagttgcatgcgatatcgcaaaatgtgagattttggtagaactcttatttggtgcacttatcctccgtgactattgattaccttactgttggcacatctaggatgcgttgtgatactgtccaagtgccaacttgggtatattcgcgctactaatatagctattgcttagccatgcttagagtttcgtatgttacaaatgatggatcattcactcttcaaaatttgggctatttaaaaatattggacagaggtgttgcccctgatatttgtgaagttgaaaactaaaaagtggtgattttagacttgggcggcaaatgttgtgcatatggtggtagttacataccgatagggggagtgttcacccgagtcgattaaggaccaagctatgtgtcaccaactaaaatatatcgtgcaaccacatgtgttatttatggggtaaccttagcctactatattgcttattacttaaccttgcattggaaggtcaaagtagtagggactagtctgagcgatggttcataggagctaccattgtgcctctatggaaatggagtttgttccccatatgccttgggcgtctgagcatgtccaatataacgaatggtgcctcgttaagggaacggatgtgtttgcctcgcgatgttgggattaggatggggtccacctttcgtagcaacattggttcatggccaatgtggagaaacactctccgtgctcatgcaagttaatctttgagtaatgtagtggtttcgtcataggctagcaaaaacgggtaccggttggtatcgcatggcatggttaacatgattgctagtatatgtcatgtgggtatagtgtacaaactctgtagagtttaaactaatcgattagccgtgctcacggtcatgagcgacttggtgaaataatacaagtttagtgttggtcatttaatacatgttttgtgaaattggcatggtgggaaattggtgatgattttgttcggtgtgggttgagaataaaatggttacttgctgccatggagggcacaaggatgatattaatatggtgcttatgttactattactattttttatttattgctttataaatttcgttgcaatatattattacttactattgtgaatcaaaatttgctttatgctgaaatttggtccacaaacatagcctactttgatctcaacttgcaaaagacataggcttgccaatacgtttgtattaacccacctcttgttgttgtttttagacattgatgcaggaaatgatatgtctagtgacgcgtactttgcaccgggtatcggaggtttcgaggatggttatttctaggtcggttgcctgtggtggtttgatagatgggcataccgaagaacttatatattttgttactgttcccgctgcgtctaaactcttccatttggccggtcagccctatctatattgtatgacttgtgcactcgctaaattatgtgaaccatgctatctatttgtatgtgtattatgtgtggatgtgatgataaggttgtggatgcatgtactagccactgattctgggagtagtacgttgtacgctccgagtattcgggaattgcatccccgggtgccgacaatcaatatgactcacttaattagaatatactagtacgcgatgtgaagttggtacataaaggaggggggtgatgcatattatttcttgattttgtggatcgagagaagacaagaaggtagaaatgaacgaactctatcaaggagaaggtttgagaggttggttttgtccatctgtgtatcgatccatacattttttttatcagtcgatccttgcagattatctcccctacccattatcttcaggataattatctccaggattgggaggagataatctttagctaccatatcccaaacccaccagaaaagaaaagaaaagctatcacatcaatgaaggtatcgaccagggaactgaaaattaatactgaccaatataagtacctgaatattgtcttttaagccttaacgaaactaatatgagcttgaatatcgtcctcaagcaatatgaaaactactaccgagtaaaagactgccggtactttctgagaactggagtaccataggttcaaactatcaattgacagacatgggacatgcaacgcgagcttcagagagttgagcgaaaaaggcgagcatctaagcacttcacttcctggctccacacttggatggaattcacatcaggagcgcacgcaggccattgagcatcatcctggcttcatcatccagctcgtcctcgttgatatcatcatcaaagcattcattctcctccgagaacacgacgcagtgaaggccgggaaccatgtaaccgtcatccatgtcatcagaggaattgcctgaatctgcaaaaacagggctgaaaacctgcaagtcatagtcatcgattgagtcatcggggagcctcagtgctttgattctggcgcacttcgctcgcagggtgtcatccatgaagacattgaagcagtggcgtatgtcgagggattcaagatgggggcagttgtcaaggatggcttccaatccttcattggtgatggtattgccgaaaatctgaagggagcgtagctgagtcatagttgctatccccagggcttcatcatcatcgtgcgagtcttcgaaactgtgaaagccatgttgactcagtctgaagcgcttaagctgtggacatgattttccaacagtcctgaacacatctgtcccaaaaacatttggactgagtgaaagctccagctcctcaagcagagggaacttctttattgcttttccaaaccctttgttagagacatcataacaagagatgaggcgaaggctcttcagacctggtgctctgcaatggtagcagaagttggatattaattaacaacaaatgaatcagcgaatcaaataaccaacaagaattctgcaaaaaataaccagcatttatttagctgcacaaatgcaggcatcgtagagaagcggtgtacagaaaaaaattggcctgtcaatgattaaatttataaaactatcagattttgtccaaacatatttaagtggcaagaattggctggacgctggagcctgcagttgactggagagagtagcataaatactgaaatttggcatacattcaactgaattcattctgtttcaggattaaaatattttaatatcatctccaatatgtcgtttcaactggtaatgcttcaaatcccagaaatttactcacatctgcattctacttcgaatagaggaagagacatttcctttgtctctaagctaaaatgtcaggagcctattatcaatgcaatacataaatacaagtgtgccagtaagtttaagagacaacgatgcttttgtttttcagtgtggatgacttggcaagtggaacatattagaaagacaatcaaagatctgtattatctaattgcggtgtgaagggaaattcagcagcaaattttgaagaatgttacagtgatgggttattcctattgatttacccacatatttgtagaatacttcttttttttcttgaagtttctgggcctaggatctaatgaaagtgctcaatctggtgcaaccatgagaagccatcaccttctaactagtagtaaaacattgctaaaatttcgatgaatgcgcacaaaaaaacagccatatacaccaatggttaggacagcattgaaagatgtaacggtaccatgaggggattcggaataatcaatctactatagtatccatgtaaataaacaacatgctcctaatgacgaaaacatgtctaaatgtagtcaaatataatacaccaaaaatgaaggcgctaattaagcgtctaaatgtagtccaatagaatacaccaaaaatgaaggcgctaattaagcattagaccaggagcagaaatgcagatttgaacacggggtcttccggctagctccacaaggtggtgggctagacgacctgggttcgaagcctcaccccttctaattatttgatattaggtccttccctaatattcgtggttttttttcagatttgaacacataacacgcgtttgcataacgaatataaagcatgtaattaaaggcccgaaaatcaggggatccccccgcgacgcgaacacaatagcccaccaaataattcaaaccaaagcatcgcaatctgacgaaacgcaagcaatcacggaggacgaatcatgtaaatgccctaacaaaacaaaaaattaggggattgaggggatcgaggtctcacgcgcggccgaggaagaggaggaagcggtcgcttccggccgactcgccccagaacgcctcgcaccgccccgcgctgcgcttgacggcggcctgcgccatcccgtggaggttcaccccccgcttggcgtcggcgttggcgtggccgcgcatgtcgacgcggcgccacaggcccggatcgtcgcgggccgcgcggcgccaggagcggcacacctggccggcgcccgtgaggatgtcgacgtggtcgagccccccgaggacggccgagatcgcggccggcggcagctccgcccagttcctcgccgcctacgccttcggtgcccccgagccgcggccccggcggcgattgccgtgatggcctcggcggcggcgggaggaggacggcatcgcgtcgcgcgccgcggcggggattgggattgttagggtttggaggaggaatggaaggcgggaggggaggcggttttctgggcgagtgtggggtggagtgctgcgtttagtgttgagagataatatagcaactagcaaggcggtttctatatttccggtagtgtagaattagaaatggatattttaaatatagaatttcatgcactgttcctttctatatataattgaacttttgactttgggtattattgttcctttttcataaaggatcaaaatatccttccacaatttcacgtgcgcggatgacatgaaaaaaaggttggataataaataagggcatattgagaaaaaaatctacacaaatacagagggcaagtacgttttaaaagaaagaacgggattgctgtatggcattcgaatgaaatttggggaagaaatcttacggattttggaccattggatccatgccttctcgtgcatcg

SEQ ID NO: 26127 - DNA, 1893 bp, Oryza sativa
ccgaggtggaggattactccacgtgcgatgtcgatgcgtggatccgtgctgccatcgagcggagagcccaggtgatccatatttctcaccatccgaaggacgaggcatttagtaacttcgaccatgtccccatcatctcctgccacctcaaacacctgaagctgtctggctacttgtttcgacaaaggacactaatgcagctctcttctcagtgcccttcattggaagttctagagctcaaaggctgctatctggatggccatcagatatcatctgcctctctcaagatcttgaccattgtcgagtgcaggatcatggagggcttcaccatcgctgctccgaacctcgtatcgctgtgctgcgtcacgccataccaccgtgctcccttgtttgagaatgtggggtcactcacactggatgcagccactatcgtgcttgatgattcgtttctatatgctggttatgaatacgagtatgaagacatcgatgaggatgcgatcgaaggaaacggtagcgaagacggtgaaggttccttgaatgattctgactacgacagtgatgctgtcagtgatgcaagtacctgtgaatacagtgagattgcaaacaactatgatgatgaaaaacagcttgtagagcatgatgaggtacataatcgaagcaaaggcaactatcatggctatgatcacaggtataaagccagaccatataggggctatcgcaagaagaaattcaatggtggtaaagttctaggtggtgataatgttcttcacagcctatcgaatgctagaagtttggagctattagctgatgctggagaggtatagttacgaatcttctgctatgtggcaataccccttaatatggattcatcagttatttgcattgcagacacaaatacctttctcaacttcgtcaaacctccgtaggagtattgcacttgagtgtaatcaaattttacgaagtaaagttattgtataataaaaatgtgtaggctgctgacagtttttttttttgtcattttctttagaacgtatctactaactactaaagagttactaagttttaattttgcataatcacatatttaagcacaggtgttgttctgtgaaattcgtattagaaaggtggttttttttttcattgctgtgagctgaacttttgtgattgcaacagttggatacacatggaatttacatatgtgtatcttcacactattcctacacatttttataccagaaataaatttgcatttttactgaacggtgctggtccttggtagtatagcaccaagctattctttaccttttctaaacgctgaactaattcatctgtgtgtgccatatgaaggtgattctgaatagggagctgaaaacatgcccaacttttagtaacctgaagacattgtcccttggtgaatggtgtatgggtgctgacttcggtccattaatttccttcctgcagcattcaccaaatctggagaagcttttccttgaacttaaattggtacatatatttatatctgtcgaatttgcttgatgctttacacttttcatatttcgacaaatcaattatagcacatattcactaataattatcttcttctgcaatccaaaaaaaaggattatgacaacacacaggcaatgaaagaaggtaccaaaccaaagggatgctcatttgcttgcacacaccttaaaatggtaaagatcaaatgctctattgatgatgtgagagtccattggttggcacagttgttcaggactaacggcgtacccattgagaatatctttgtgcgtcagactagcagcacttgtgagtgatacttctcttgtaactctcatctctgatgaagttgcagtaccgtcatacattattactgtttttgttagatggaaa

SEQ ID NO: 26128 - DNA, 852 bp, Oryza sativa
cgaaacaagaaaggggaacgaacagaacacgagcaaacagcaaacaagctagcggagttcttctagcgtgcgcgcgacgcggagagggtgtccgccatgcgcagctgcgggcaacgccgccgtcgtccccgtgccggagcctctccgtcctcatgctgcactgctgcagcacaacccagcgctcggcgacaaccccagtggcttccttctcggacggccggcgagcttcttctgcgcgcggacggccggcgagctcctcccctgcgcgcggccagccggcgagctcctcccccgcgcgctgccggtcgacgagatcctcctcgcgtgaggacggccggcgagatcatccccacgtgcggacggccggcgagctcctcccccgtgcgcggcccccgacttggaggggctacctcgtcctccacgaccccttctcagacaatgccctggcgccctccggcctcctctgcgtgctcgagccgagccgctccccccgcgcgcgcggcgcggctagccgacgagctcgtcccccgtgcgccgtcgttgccgccctgctgatagaaggtgagaagaggaagatatgaaagagaaagaggggaagagatgagggagaagatgagatgaggtggagactgctgacatgtgggtcccgctggatgacttagcaagtcaactaccacataagcaagtcaattgccacgtaggacaaaaccgcttctaaaaccgccggggagttgatttgcaacggttttcagagttgggggatatacccggttttgcggttgagggatgctattcatgtacggccatgagttgagggaaggaaagtggacttattcctttttaatatgacgg

SEQ ID NO: 26129 - DNA, 3040 bp, Oryza sativa
tagtcaacaattttcttttaagaaaatatgggacccacctttcagattctatctactgatctgtatctttttcccctctcacctctctctctatctctctatccctggctgaggagtcgcgacggctacgagcctactcttgcgcatgctagcggaggcccagtaggagcggcgatgactacggggctcctcgcgcaagtgccggcagagactgagaaggagaagtgtgagtcctcgcgcatgcgccggaggaggctgagaaggagtggcacaggctacggggcatcttgcgcacgcgctggcagaggccaaggaggagcggaggtggctacaagcatcctcacacacgacagtgtcggtgtgcgtggtggtggagatgacgtggccaaagcagctctagtcatgaagctcggcgagacgtgctacggcatcactactggggaggatgcgacggagagggtcgcattggtgcaagttcgctgctcccatgtcgacaagcagtcgtccgtccccgtgccgcccgccacccttttccttgctgcctgcttccttggagataggggaaccagaggtgtggcgggagacctggggcgcaaggtagtccaccagggaatcccactagggctgtaagtgggtcagccgcgaacccacttatagatcaaaataagcgggttcacggcttattttagcctataagtgggtttcgcgggttagccacttacacccctaaatcccaccacctattgcccttcccatccgctgcctgtagaccttctcgtgtcctccctcctgccttccgttgcgtcttctcttcgaatcaattcgttctttcccccgctgacctttctagtccttcacctgccaccgccgacggccagctcttgtcccggcagttgccttggtaattgcaatgtcaaatactccctccttccaaaaatatgagacctatttcttgttgcatcaatactaagaagcaattaactcacttgtcatatggcaaaaccaatgaacatgcaaccaataagtagtacttatggctacttggtttccgatccacaatttaatttagtatatagcgactacaaataggacttagatttttggaaaacccaaataatgaaatagatctcagactttaaagagaacatttattaattactttgaagagaatattccatgtactacatagtactagttcataaaattcatcaactaacatgagtgcagaacgaacttacatgaatctaaagggagaaaatattcccagaaaaaaatagttgaactccaacataaattccactcgcattgatcaaatcatgcagttcttcatttcagaaacgtcctcatgcacctgggaagcgcgttatcatacttgtcaagatcttcctcgtagcgggaaggaccggaataatcatcatcatcatcatcaaattcctcagacgtccattcatccgagtacatggaatattccggatcagaatacaccgaataataccgcacaaaaccgggggagatggggagcctcctgggagtgtacacatcgaagtcatagtcatcagttgagtcatcaggtggcctcagcatcttgatcctgctacattttgctcgcagggagtcggcgcccatgtcgatgttgaagcaatggcgaatgtcaagagactccaggttggggcagttatccaagatggttgagagaccttcatttgtgaggttattggcgaagagctgcagggagcgtagcccgtgcatctttgaaattccaccagcatcatcgttgtttttccagcggatacctcctgaatcatagaaggatcgtttgctaagcctgaagcgcttgagctgtgggcatgccgcgccgatagccgcatacgcctcatgagtaacattgtagcagaatgagagctcaagctcctcaagaagagggaattcctttgttgcctcctcaattccttcatttgagacacccaagcatgagatgagccgaaggctcttcaaacaggaggccctacaaagatagcacagggattttataactaccagcaatccaatcgcatcagaaaatatgctgataaaaactgtctgaataaataaactacccagctacaagttcacagttagataaataattggaagaggcgacaatgctcaatgtagaagagaacggattatgatgaaccaacttctcatatatcagttatttggacaatgactactgaagtactgatacggtaaatattcactttattgtcatttcatttctgtcctgtggaagatagcaggaataagaaatggccatacttgcaaaagaatgccagtgcaatattggcaacaaaagttcatcaataatatttttagatatgtgtatgaacacaaaacccagtccagtccagtccatgtcatgattaagaattattcaaacttcaaagcatagtctgatgaacagtttgtctgttagtttgagtgtatgaagtctgcacattcttctctggaataatttctgaactcctaatccttgtcagctaaaagtatcattcttttccttgtcagcaaagcataactgcataatctgacacagaaatttgttgtgactgctaatcctccgaatagattcaggtaccacttttcattctgtatgtcaataccctactagctaggtaggatttttcactatgtttatccaagatagagatatattcaatttctttcaacgaaccatccttatgatcttatcagttatcacccttttttttccaaggacatgatctgatcacattgttttcctgctaacaccttacaagtatatcctcctattccaaatattgattgttgcggtgtttgtcgttaactactcagaatgactggcggaagaacacattacatacgaattcatcatcgaaatttgatgcaactttgcaacgatataagctgacaaattatttgatctacaacttcaagcggtattaatttctacatagcatcaatgttcttctcttcagattaaattaaatatggcaaacttattgagagtgcctaagcaaat

SEQ ID NO: 26130 - DNA, 3326 bp, Oryza sativa
tagttggcacattaattaattaactaatcacgattgaccatcgtgaactatcattaagccatcattaaataatagtgagtcataagttgtcccgaatgtgtactaatgtgtcacgtcccaaaacgactctaaaatgcatcctcgaaattatgcaaagaataagtaaaatccatgtgaaagcctccaacaattaaaatgtgcaaagttaaaagtcgaataaggcttggaggatttttgtatatttcctaaaagcttaaaatgcgtaaataaattttagtggaattttcagagcacaaataataattaagaagaaataaacaaagttaaagtggttttgtaaaaagaaaaaccctaaaagtctttttccccccccccttccccctcttgggccggctcggcccacctccctccctctctctcctctcccccgcggcccatcggcctcctccccgcgcgcgcgccgctgacgggcgggcccgcccgccaccctcgctgacgggtggggcccacccgtcatcccatacctcgcgccgcacccgccgcctcgcccgtgccctagcgccgccgccgccgcggattccgccgcatcccgccgtccccgcgcgcaataaagagggggaaatcattccccgtgattccctctccctttcccccctacttttccctctctctctccctcggattcgtttggaaactctcccgcaaacttcgccggcgcatcaatggcggccggatcttccgcgaccgattccccctcatccggccgctctctcctcctcccaacactacataaacactccccgtgcctccctccttcgtttccgccactcgccgctctctctccccgtcggaatcgagctcgcgccgtcgtcctctctctccgccgtcgccgccgagctccggtccgccgccgtcgtcgccccgggcctcctcccgtttcggcgtcgccttcttcgggttcgccgcgtcctcgccgatctcgtccaccccttcgtttcgcccgccgaccgccggaacgccgccgtcctcgtcgacccgagccgcgccgccgccttcctccgcttcggtcgccgttcccgtcgtcgccgtcgacccggggtgagccatggaccgcccatttcgtttcccccttccctctcctctctcgggcgccgctccgtcgcgccggaggtcgccgccggcgaccatcggggcgcgggtgcgccgcctcccgtcggctgtgccggcgaggccgccttcgggcgcgccccgcggctgccatgtggggcccggccgtcagccgcccgtgtcctcgggtgcggctgacgcgtgggacccacggcgccgggccggcgtaagccgcgtgcacccggtccaccgtggaccgtgaggctgccgtgtgggccccactcccgtggacccagtccgcgcgccattccctcggctgacgcaataaatccgattttaaattaaaatttaaatgaagaaattcgcaaatattcatttaaagagcatataaacttcaaatggccataacttgaccatttgaactcggaattggaccgttcaagtctctaatttttccttaagaagtcaagaacccatttttgtgctttgtttctgcttgttatatggagtttattagagtaaaagccttttcttttccgttggtcgtgtagacgctgcagcttcggaagacccgctcttcgtggaagttgaagccgacgtttgggaaagcgagcaaggcaagtcacatcatctttgaacatattgaatcccagtttgtaaaattatgttgatttaaattattgcattatcgctttatttaaattcccgcgttatcactgttttatctagccatgcctatttacctttgttatgaccttattattattgttattgttagtatttccttgttcaccctagattaaacaaaaccccaactagtggacactctactcatggtaccactagcatgattttaggtagatgcttcgctgtttaattaggtaacattaggtggttttacaactctagactttgggaatattcatatcacctggacactttggaactgttggattattgtggaattggattcacaccgccccctctattcaaaatccccaaaaatggttttaggctgggctcggggtgcatggttttgatagtagcacctcggccatataaggaccggtcttcgggcctctgttgcaaagcactaccgtacttccacatgtctagtgggtaaggcttagtttgtggctcagtctggttataaacaaaagtacacggatggaggtggatgaagtcgggggtcgatggacattctccagggcaaatgaaggctacacgagctgcggcccggtagtcgagatgtcatggcacagggccggtgtcctgctgctaggggctcagtcctgcctgcctgtcccgggtgttccggccgtaggtgggattgggtcggtactcttgtctatggctaggatgggttggaaactatgtcacgtcttccgtctgtataccgtggtggtatgtggcacgtggttacacgtgaggaagatgtgtcttgtgggtaaagatgtacacctctgatcagagtaaaatctattcgaatagccgcgccctcggttatgggcaagccgagcaatgtacccaagttagtgttttaattcttaaaacctgcttaacaactaaaatgtggaatggttggcctgggttggcttgggacgagctgggacccagggtcgggttgccagttcggtctgaatcatcgtaggccttgggttaaggcaggttcgtgtgggttcacggccttgataaataatattgtatagttctagaatcgtgtttacaaaatagctttgagcaactaaatatctttaaatgctgtttactgcaaccctaacccctttatagtataactcctttgtactcccttgcatttattctgcacttgtgggtgtgtcttgttgagtacggtggttgtactcagtcttgctcaatttttcccaaacccagaagaggagttcctgcaggatgaaggctttggtgtctagctcgtgcctgccgtcaagtgcctgtggtcgtcgccctagtcttccgctgtttctcgtttgtctttgtgtgtgctgggccttcgctgcccatgtaataaattatctatttacgcttccgcttgttaaactctgaattgtatcaacttttggtgtaccttgcctcctgggacaaggattaatgcacgcacgcaaggaacacccgttgggtcagttccggtcgtgacaagttggtatcagagcccccttgaccctaggacgagccttagatcccgagccttagcaatattt

SEQ ID NO: 26131 - DNA, 3141 bp, Oryza sativa
gacactatagaatactcaagcttggagatcactttttgtgaaagaaattcttctacatatgtcccttaaaacaaattgtttctgattggttaaaaactttatagtctttgtgtggtttctttcctctgtaattttgaaaacattttttgagttctataaaactacactgctgggcaaagtcctggcagtatttctagtcaaaaaaaaagttgtcttacctagcataataaagtctaacctatttttttggtattttctattttgcaatttttatgttgtttttagtttataagatgcaatgaaaataaaacatgcatttggaaagggaaacatgcaatgtgatacaagttacctcagcggggggagagacgtctcccaccaagcttgcctttcgctcagggtccttgataaggattgaacccctggaagcgaaagtacgcttgaaggtcgtcatgctgttgctgcatcaggttgcgttgttggtgttggtgaactgagcatcaacattcggttgtcattcttgcgtctgtgttaagtgttcatcgagtggggggtacacggtacccgggtacccaatgacaacccttgggccacactgcatggggtgggccaagtgtcctaggccccatgcgtcatacttgtaaataaagaaagagagattcccgggataagatataaatcccgaggatcctgcatatcttttatagatagaataggttgatctagttgcaatcaactagatactttccttgtaaccctccccctcatcctatataagagggggaaggggtccctagaggaggtcgaatcatctccacgactcttctgtctagcttctccgaccatttttccactatacacaagaaagaacacactggacgtacggtatttcctctctcagagggcttgaaccaggataatccctgcgtcaccatctctccttgatctagcgcacctcttaaaatatattgccgatcctagaaatcgacatcgaggttgtattggatctctcccgtttgcatgtcaattttatccatcctccttgtaatttctcccaagtcctaacgagaggaacttgagcaccattcaccattcattgggggatgaaggcatactgcttgatctgagggaatgaatgttcatgttccccagtgtatgtcatgagatgctctctgtcggctctcgctggcactcttccagaccgagcctctgaggctatggtgtagagcttgggtccatccgggtgcatccccagttggttcctaaccggcttcgtacatttgcacggatgttgaaccttcttgttcatttctcgccatgttgcgtgtgtccctatatgatccacctgcacaagattcttctatggtctatacgggaatggttagttcatgacagttgtacaaatgatatcccgagttaggtaatgggattttttttgtacaaccggggaaaaagaatatcaaagatccatctactccatgcttaagaatatgaccttgcactaaataattctcgtcaacacacggatgaggggttgaaatataagcaatctgatcattagaaataaccccaagtctgtatgctatgctagtaattagggaagtgcactcaacaggagcagtaaactttatactctctaaccattgcacatttcacaggagcaactttaatcttcctaactgtgacaaacatgataatcaatttatcctctcttataggcctaagatcacctctaggaaacaaagtcataacaatccatttgtgcataagcctaagtgtaggattatggatgtcattcgttctaggtttcttgcaaattggaccaccagaaatattttcccaaaatctgtttttctcgaacccagaaattccgaagaacggttttatagtcatcgtgaaaacaaagaagtgtacttaatcatttccatgtaagtgtaaattctttacggaaaaagcgaaaggaaattccatcttctatttctttcaaagtgtaccgaaattgtaaagtaagcaaacgagaaccaggctcatctgccaccgcaaatctctgccatccaacaactttccaaatggtatgagaattaacatccatacctatcttttttagtagctccggatcgtatgcccgcgtgtgagcaaatatctgatcctttagcatgtagtaggcttgcatctcctgatcaccgacaagatcgaggtcagcatcgttcaagaggcatggcgggatgccagttgttggtatttcttacgatcacagatagaatccgcaagcgcatggatataccgatgtaggactttccctacggagtatttcaagggtatcgaatccaagggaacgtgtgtgattatctcttcctccggttcatcaaggacataagataaatatgggcacagggcagagaggatttcttagtgagaaaaagtgtccaaggaaagcttaattttaatcctaacgcgatacttcaggcactagcaactcgctgttcctagatgtcgctctactatgtacccgcacagggaggacttaagtgctcttgagggctatcaccacctctacacccacgtctaacgtattgtgggatacgcagcaagtactggaaattaattatccagacaccgtgtctacgcaattaataactactctagtgctagctaaagactaaagcaatcactatataattaatggactatagtgaacaataatcccatatgctaattaggaactaacgaagaataattctcgctaagcaaatcttaattactcagaatgatatttctattgaaccagagtaattaacaaagtacaagaataaagagaggattatcgacaactctgggattcctccgacttcttctactttactctatccctattctaagtgtactatagaacatataatgaacctaaagtatacttagagcctcttgtaattcagctctacgtcttggtgtgtgttggaatgagggagaggagctctatttataggcttcatatgatagttacattatgggaaatgtcccaaacaccatccaaccatcattagggagcaatcctggacgcccacatggaaggctgggatgaattgggcttcatggcggttcagccgaaccatgggctggcccaactgcctccggccttct

SEQ ID NO: 26132 - DNA, 3503 bp, Oryza sativa
ccctaccactatggttgatgttttacatttatggttttatgcaggtattgacggcatatattttgtatttaacagccatcaacaaaacctcccacacttagctctttactcgttccgagtaatggttaaggatgaatgtggaataaaactttccaagatataatacaggtatacaatttattctaagccatacaagtacttgtgaactttccagtgtctaactatccatcttgggtaattgatgaatggaactgtcgtggctcaagtccttcttgttcctcctgtcaatctcttgggttttcatatattttttcaaagtagatatactcctcgaatgactttctctcaagtctctcgtgtggtttgatttgtggattctcaccaaggcatattttgctgaattgtcccaattctacaaggttgtatatgtggagcttggtagggatcaatcggggcatacctgcatcacatatttcaccaagccaaaagaccagacctaaggagatcgcaagtcatactctctgatcaagaatgtgcatgtgtgtgatatgtgtatggttgttttgtgggtggaaaaaggaaaaataaatgataacaactcctttgatatacctcctcctccaattttctctcattgtccaatttgagagagtgcatggctatccgtttttttcttcttttttttttcattccccatactttatatgagcaagattttctctctcttttttttcttttcaatgctccatttttctatgagcaaaaatttatttttctttattttgcgtagccatgcctctctctctcttttttttttgaaagaattttggaggatgaggcataaatgacatggagtatttattttgtggataatggataaaataaatgatggacaatggatgctagcttccagtgtagaaatttagcttacgtgcttgtaagtttagtgtacgtgatcttgataatgaaagtatcaaaaagcatctcacatgggtcacaataatttgagaaagctcaatgtaatgtcagtcagcctatacatgtaatgttttgcaatgagaatcatatatggccttggtagttaataatatagtcgctgaggagtattgccttgcaatgagaatcatatatgactgctgaattttgtgcgcggccataggctggtgttcatcacagtgtcatgttgagtcgatgctgttgcgcgtcgagagttcgaaaagactcccccacacttgtgttgtggcttgtctttattcaacaaaaaggatggaaagcaaaataggcttctaccggggtaaaatatcggtgagccaaattttatttaagtaactctaggcgcatgaagtgcctaaatttacttttattttatttcacttttattttgtttttatttttattttcattttataatttttatagttttatttttatttttattatggcatcaattgaggtgatgggtaacttagcagggtggacatatgtgaggcgaggatgcacgaggtgtttcgaattattaccagataggtcttaccaagctttgatttggatgcaagaatacagcacaactttgcatttgttctgcttggtttcctaagcatctgtcttctcatagactaaggagcgtggtatgaatgttggagttattttacactactcctctattgtcttttttatttcctgcaaaaggttagtggataacaaatacccgagggacaacaaaaaattgaaaagattttatcatagcctgaagattaattgttcacatccatgctaacaaggaattgaattcttaataagcatggatcccacaattttgccataattttattttgtcatcatctttttttctttttactccagagacacatttttttaatcgagagacgcttcttttattctttgaaaacaaaattttcttttttttctctttctttctttcaattttttttattgttcaccaaattttcatttaagcaaaactcatacagggctaaggtaaatttgcatgaacatgctaaaggagcaattagaaatatgcgcaccgtacaccttgataggtgatatgtttctcctttttatgttagcaactgatttttctcctagctctgtcttacctccagtgtgactcgtgcttgaggactcgctcgtcaatttgaaaaattccctgcaggggttagttcacgaaggatatacatccgaagtccatgaaagtactggacctacggttcatttaagcaaacttgacaccacgtcaactttaattaaagaaggctatttatcctaagcatcatgcttaattttaaaaagcctatgaatgtcgacgaccacccaaaccatagcatacgaaaatggactgaggacgcataaccaggtatgatcaagccaaactcatctaaagacaagtatgtgtaaaagaaatggtgaatcatttgctgtcttttgtataccttaccgccggcatgatgcatatgttgaaatctctggagcggtagcatgatcacatgtgattgtcgatctctcctccgtcttgatgcgggttgtggtggaggaaggcactttgatcacgccaactcaagcgagtgcttcggttatgcacacatctcaggtgcaagaaccctttaccttgtgttggacgagattttgtgcattttttttaagtaaaactaaaaatcatgaatgtgccaatcgaaggaacaaacaaacaagctgtgtgcatttcccacaagttttcactatatgcgtaaattccatgattagttaaacacggtaattagtcttaactgaagtgattactgacaaggacgcacaaatgcaccagaaagtaataggggttgcttgtctgacatctttatcagtgccatatgcatctatacttgatcacctgggttcacaggtcagcctgatgatgaatggcaatatatatgggacaatcgatcggcagctatgcatgctctctgctggtcaatacaatgtgtatataaagcaaaatggaaacacacacgatcccattccatgctagaaaattttggaatggaagcattccatcacaatatcctctttgaaaagctgaaattgagctatctagcctgaaaattaattttcacaaaagtgaattattttgttttggtcacgcaaaggattattatgatcagtattataatatcttcggttgtaagttaggtaacttccctgtcaaatatctcggtattccaatgcattttaaaaagcttagtaacaaggattggaaagttattgcacaaagaattgaaaagaaacttagtagttggaaaggtaaacatatgtctgtcggaggtagattggttttgattaattatgtactttcaagtttagctatgtttatgatatccttttttgagataccaaaaggggttcttaaaaaaatgattattatagatcacgcttctttttgcaaggggatgatcataagaaaaagtaaaggcttggtagatgggatattatatgccaggccaaagatcagg

SEQ ID NO: 26133 - DNA, 7305 bp, Oryza sativa
cttgagacgacggttatacaactttttaccaactatggatggagattcacaaataggcttcaataaatgtgtactccttatcctattttggttattttacttcttaaattggtgtcctatttttttttttgaactttacttgttttagagtgttagtttgtaataattggttgtagctcttttgagcaaaggccgggatgatctattccattatctaaaaaaaatcctctttagttggatagttatcgggctctaactcatttggaatcaacagtagatttcgaatatgcatttgcatggaattaaaataaatacggtggataatattgttttggccaaagatccttgctatatatgtccgcgcggctgggacgcgcgtgtgcatacaaatacaaggaaatgctctctttgcgccacagtcgattggaaagtgatcgcacatcaatggatctctgatacggccggatcgccactataaaacaggccatttccttcacggcggggggaggcagcagagagagtacagaggcacgagccgagggcctgcagttcacgccgccgctgccgccatgcccagccttggcagtagtccctagagagacatacacagagacacaggagagaaacacagaaacacaaggacaaggagagcggacacaggctgctcatcggcaaccatcacgcacgtcgtcttggccggagtatctcggcgtcctgcgggaacgagcgtgctctgcggccggcgacatcggctgccgtacctcggcgtccggcaaggaggcgcgtgcgctgagccgctgaggaagcgcgctaaggaggagacgatcaccagggagacgatgccgctccagttcactgccatgggtaactagcctattttcttatcatccctttgctccatttcagcgcatgcacgccggtatgaagctcctcagcagagaagatgccggatgcaccgccatcgtcagagtcgccagagttgacgtcgtctgcaagtctccgtcaaggtgaagacgatgtttctatatggcgcggcgatgttgaagacgatgtttctatatggcgaggagatgtcgccgagatgctcggacgtcgtcaccttgctggtcggcctcttctctgcaacgccgtcgacgtccgctccccctcatcaacgctgctatcttcttcacattcattgccttgctgcctgaagagaacgccggccggagcaccactacttggtgcctgcaaggctattggattgtaatcttagagcatttatattctcttttgtttcgttgcatgtagagttcggttggagtctgaattctagccggtagaatagcatttttctgttttagcatatttgcttccttctttagctgcgttgactcggctcggatcgtgggatggcgcggtcagtagttgatccgagattgtcgtgatttgattcttttatgcatgtaacaaactccgtctggagatgaataaatagaagagaaaaccgaaaaagctgcactgtattacgcagtgccaactctgttcgtcagttgttctgttcgactctgttttttcggaacttcttcagttagctgtagctgcacctacaagcgtcagagtgtgtgtttcagagagactgagagccagttcgcatgagttttttctgacatttggtatcagagctttgctgagacgatccggtaatgtcatacacaccgcctggccgtcgtggtggcggtggcggcgggggaagcgacaacggctgcggcatcactcccgctagtcgatgcagggcacactgcccgtctcttgatcctgtcgaggacaaattatatagactgagcgctgttgatgcgcgtcaacctgcaggcgcaggggctctggacggccatcgatccctgctatgcggagtaccgcgaggatcgtgcagcgctctcggcgattctccaagctgtgccccgcgagatgttgcgcggcttggcaaagcacgacacggcgaaggcggcgtgggatgccattaaaaccatgcgggtcggtgtcgaccgcgtgagcgaggcgagggagcagggattccgccgtcagttcgaggcgatgcgcttcaaggacggtgagacaccggaggaatttgcgatgcggctcactgccatcgttgcggacatgcgcaacatgggcggagtcatggaagacgaacacatcaacaagaagctgctgcgtgttgtccccaagaagtacaagccggtggcaatttccctcgagcagctcctcgacgtgaagaccatggccctggaggagctcatcgagtggctgtcgacggtcgactcctacagtgatgatgaggaggcaagtgacggtggcaaattgtacctcactaaggagcagtggcaggccggtgtcaagcagcgggagtaggagggatctggcagcagcaacaagggccgggcgggctctggcaaccagaaccgtcgaggcaaggccggcgattcaccgaagggaaaggagatggccaccagcggccatggctgtcgtgacatctctaaggtgaagtgtttcaattgtgatgaatacggtcattactcgaagcagtgccgtatgccgcgtcgccaatgtcggggagaggcaaatgcaaatctggtccaggctgaggaagagccgactctgctcatggcacacgtgatgggggtgtcgctcgccggcgaagcggccgttggtcgaacaccttgtgtgcaggaagtgcatctcacagagaagaaggttgtgctggaccatgaggatgggcgtaaggaggagaagactggagagtggttcctggacaccggggccacgaatcacttgacgggcgcacgctcagcgttcgcggagcttgacactggtgttgtgggcacggttaaattcagcgatggctcagtggttgacatctaggggcgcggaactgtggtgtttcagagcaagaatggtgatcaccgctcactagaggcagtgtactacatccccaagctgagaaaaaacattgttagtgttggtcgcctcgatgcgcgcggctacgacgcacacatttggcatggtgttttcacgttgcgtgacccggaagggatgcagctagctaaggtaaatcgtgattcaagttacctgtatgttctcaagttgaaccttgcgacactaatctgtatggcagcgagcggctccgagctagcatggcgatggcatgcacgatttggccatctgaatttcctggcacttcggaggttggcaaaaggaggcgtggtccgcaggatcccgcaaattgatcacattgatcagttgtgtgacgggtacctcgcgggcaaacaacatcgcacaccgttcccagaggaggcgcagtacagggcgcagacggcgctcgagctggtgcacggtgacctctgcggaccaatcacgccggcgacgacagggggcaagaagtatttcttgctcctagtcgatgacatgagtcatcacatgtggatacgactcctctctgccaaacacgaagcatcggcagcgattaagccggcgtggagaaggatagcaatcggaagctcatggcgctgcgcactgatcgcgggggtgaattcacctctatagagttcatggagtactacgcggacacaggggtgaaacgttaaatcactgcaccctactcacggcagcagaacagtgtcgtggagcggcgcaatcagactgtggtggcagcagctaggtccatgctgaaggcggcaaacatgctggcatatttctggggagaggcggtggttgcagccgtctatgtcttgagcaaatcaccaatgaagagtcttgatggggtgacgccgtatgaagcgtggtatggtcgccgacccactgtcgaacacctgcgtgtgtttgagtgtgtgggctatgttaagacagccaagccaaacttgagaaagcttgatgatcgtagcacgaggatggtcttcatcggctacgagcaaggatcaaaagcctacaagatgtatgattttgtggggcgacgcgtgtgtgtgtcacgcgacgtcgtttttttatgagacgacgttctgggactggggcagcaacactgatgaagaaggagatcaggacgcgtatgtggagtttacggtggagaatttcacaatcccagtccaagggagtgagacacatgcccaggatgcagcagccactccaaccatgctagcaacatcaccaacatcaagcaccggaactgcaacaactctgccatctggtgttgaattctgttcccctccaactgatgctagtgaagggactgatgaagggcccaggagctacagaacagtggtgaacacgcttgccaccttgaccccaatcctagattttaattacagtgatcaatgccttatggcagcagaggaaccagcaagtttcttggaggctgagcaggagagctgctggaggaaggccatgcttgaagagatggaatcaattgaaggtaacaacacctggactctctatgatttgccctctagccacagagcaacaggactgaaatgggtttacaaaatcaaacgtgatgccaaagatgtcattgtgaagtacaaagctcgattggtggcaaagggatatgtccatcaacaaggagttgattttgatgaagtatttgccccagtgacgaggatggagactgtgcgattgctgattgcaacggctgctcatcagggatgggaagttcatcagatggatgtgaaattagctttcttgaatagggaattggaagaagatgcttaggtggttcaaccacctggttttgttgttgatggaaaagaagacaaggtgttgaaattgaagaaggccctatatggactgaaacaagcaccacgtgcatgttatgcgaagttggattctagtcttgtgagcctgaattttgtcaagagtggtgtcaaaagtgctgtgtatactcgaggagagaagaactcatgacttgtggttggtgtatatgtggatgatctcattactacaggagcaagtctgatggaaataaacaagtttaaggagcagatgcaggctctttttaaaatgagtgatctcggtctgctctcttattatctcgggatggaggtgaaacatgcaaaggaagggatcacagtgtctcaaggtgcatatgcagcaaagatacttgacaaagctgggatgagggattgtaatccatgtcagactcccatggatgctcggttgaagttgagaaaggagggaggagaatgtatggaggaaactcaattcagaagcataattgggagcttgaggtacttggtgaacacaagacctcatctaagttattcggttggttatgttagcaggtttatggagaaaccgacctctgaacattgggctgccatgaaacatatctattattatattattaaaacagccttgaaaggaggcaccacgttcgctgtgggggctagaaattcccacattaatcgaagaaaaagaaaaaaagaaaaaggagagtccaagtagaagtctaatttaaaaatacttgaaattcggaattaaaaataagaaatattgaaagaagtttccatataagaacccaatatgagattaaccaaaatttaaaataaaaaaaataaaatctaaaattagaaaaggaaaggagagtccaagtagaagtccaatttaaaaatagctgaaattcgaaattaaaaataagaaatattaaaagaagagtccatataagaacccaatacgagattaattaaaattcggaataaaaataaaaaaaatccgaaattagaaatggaaaggagagcccaagtagaaatacaatttaaaaatagctgaaattcggaattaaaactaagcaatattaaaagaagtgtccatataagaacccaatccgagattaaccaaaattcgaaataaaattaaaataaaatccaaaattagaaaaggaaagaagagttcaagttggaatacaatttaaaaatagctgaaattcggaattaaaaataaggaatattaaaagaagagtccatataagaacccaatacgagattaattaaaattcagaataaaaataaaaataaattcaaaattagcaaaagaaaataaaagaagagttcaagtagaaattcaatttaaaattagctgaaattcggaattaaaaataagcaatgttgaaagaagaatccgtataagaacccaatacgagattaattaaaatttcaaataaaaaataaaataatatctaaaatttgaaaaactaaaagagagtttaagtaggaatacaattttgaaacaactgaaattaaaaataaaaaaaataaaaacatttaaagaacacaatacggtattaactaatttttttaaaaaaataagttctgaaattagaaatgttaataaaacaacaaatagaatcctaatgacgattaaaaggagggacgtcaggcaggctgtgaagcaaacaagtaaggcggttgccgggacttctagaaagtaaaaaaataaaccccattgataatcatattcgatttttaaaatttcaatgacataaaaggagaagcagcgggcgggcgtataagagttatagaaaataaaaaatgaatttcaacaatagttatgttcgatctttagaatcacaatgacaataaagagtaggcgacagacgggctgtagaggggcatagtggcatcgttcaaattttaaaggatcggaacttccaaaaagtaaaaaaacctaatgataatcatgttcgattttaaaatctcaacgacaataaagaaaggaggcagcgggcgagccgtagaagagtacaatagcaaagccgctgacggtttgacgggacttaaagtaaaaatgaacccaaacgataattatgtttgatttttaaaatcttgtcacgaccggaaataacccaacgggcgttccttacgtgcgtgtattattccttgtccgaggaggcaaggtacaccaaaagttgatacatttcagagtttatcaagcggaagcgtaaatagttaatttattacatgggcagcgaaggcccagcacacaagaagacaaacaaaaaacagcgaaagactagggcgacgaccacaggcgcttgacggcaggcacgagctagacaccaaagccttcatcttccaggaactcctcttctgggtttgggaaaaattgagcaagactgagtacaaccaccggactcaacaagacacacccataagtgcagaataaatggaagggagtacaagggagccataatataggggttagggtttgcagtaaacagcattaaaagacacttaggtgctcacagctattttgtaaatatgtctctagagctatgcaata

SEQ ID NO: 26134 - DNA, 4960 bp, Oryza sativa
  unsure (1)..(4960): unsure at all n locations
tagtgttgattttactggaggtaggtgtatgtacctagtttccattttctttggttgcactcaaaaattatggatagattactcacagaaattagaggaatatgggttctttggaaactagttcgaatttttaggagccctaaacagagaagataaattctgaaaaaattatttttattaatgataaatgacctagtatttgaataaattattttacttatacacttctatgcagttaaatgcacttttagataaagtatggttttagccgattaagaactacagttaatctagtttttattagtttgactgatttatttgaggtgcaaatttagttattaaatcataccaaaattacagtgagttgtatgtgttgagtagagcctacatgaattttcccatgattttatcttgcacgaattattttagataattctcaagatttatgtcttatatgtgtttccctttcctaaatgcatgtaaatgtttataaaagttatatttggactctcattaacctgaggtgataatgatatgttagaatttcagtttaccttacacaggtcataagctccttacctattatgcacaagtttactttagtattaaattaagagaatgcttatagagatgattaagatagaatatatcctatatgatataatttatttggtcacttccatgttcatgactagtcttcagatggatgaccaaaatagttttgtggggcttggcattggccttgttgatatattttaaggtgtatggttcctattttaacttcctctagctagcactaggccctaatggttcagttgtttatctagatcttagttaatattcatgagacctattatgatatgcaaatcgaaaatccgaatgcaatccaaatccaaatgcatatgaaggactcaagtcaaacatgtctatgagagtatgcatgcttacacataaatttatatttttgtcctaggttagagatgcaaaggtttttaatttgttctaaaattttatcatgcaagagttagatcaacttcacctaggtttaaaatggaaatttttggtttacaaaatagaagaacttccctttcaactagttttgatggaaattccttaatcctagaattcaggtatgttacagtattccggggatcatcaaattcctatccatccggaggaccaaagtaagactacgttcacaagtccgtacggtacctatgcttattgtaggatgtccttcggactatgcaacactcttgcatcttttcaaaggtgtatgatgtctattttctcggacatgatcgaggacattatggaggtcttcatggatgacttctctgtctatggaaagaccttcggtcattgtctgcagaatttagacaaagtcttacaacgatgccaagagaaggacctggtactcaattgggaaaagtaacatttcatggttctgtgaagggattgttcttggtcatcgagtgtcccaatgaggaatcgaagttgatcatgctaaaattaacttaatagttcagcttcctcctcctgtgaacatcaaggggatccgcagtttcttgggacatgccggcttttatagaaagttagtggaaatggaaggttcgggttgtgtctcgattgttgaaggtttctctatcttggacacggatgcctctggatagggctaatcagattgtgtcatgaaggaagtattttctagaatgcgatctagaattacttttccttccgacggtgttttgtgcatgaatgatcctccgacggttatgtccagatagaatgccgattccttatccagactcgtatgaaaatgttgcaaaagcacatactcaggaaaggaaaaggttggtccggactgcactaaatcagtgaatatggaccaggctgcaccgatcgattcgtttttgatctgctggaaactgaggatctctactcgaagggcaatgatacgagtaactgggaagaaggcaaggcagaatcggtcacgcaaatatacaccaacacttgtggattatgtgagattaaacacctattactatgttcgatgttttattatctagactttatgcagatgttggcgatatagaatcagcatttaataaccgccaacatggacgtccaggattgctccataatgacagttggagggcgtttaggacatttcccatacaataaccgtcatctgaagcctataaatagagctcctctccctcattccaacacacaccaagatgtagagctgaattacaagaggctctaagtatactttagcttctttatatgttctatagtatacttagaatagggagagagtaaagtaaaagaagtcggaggactcccggagttgtcggtaatccactccttattcttgtacttttttaattactttggttcaatagaaatatcattctgagtaattaagattttcttagtgagaattattctttgttagttcctaataagcatatgtgatcattgttcactatagtccattaattatatatttattgctttagtgtttagctagcacaagagtagttattaattgcgtagacgtgttgtctgggcaattgatttccagtggttgctgcgtatcccacggtacgttagaggttggtgtagaggtggtgacagcgcataagagcacttaagtcctccctgtccaggtacgtagtcgagcgacatctgggaatagcgggttgctagtgcctgaagtatcgtgttaggattaaaattaagctttacttagacactgtttctcactaggaaatcttctctacctttatccatatttatcttgtgtcattgatgaaccggaggaagagataatcacacatgtttccttggattcgatacccttgaaatactccataggggaagtgctacatcggtatatccgtgcgcttgcggattctatctgtgatcgtaagaaacaccaacaagcatttctggcgcctgtccatatttttctattcttctacgttcaccctgctctatccgaagaagtttcctggaatacacttcttcctcttctatggagcaacctatctttgaattatctgctcatagggatgaattttatgagtgtcacgaccggaattaacccaacgggcgttccttacgtgtgtgtattattccttgtgctaggaggcaaggtacaccaaaagttgatacatttcagagtttatccagcggaagcataaatagttaatttattacatgggcggcgaaggcccagcacacacaaagacaaacgggaaacagcggaagactagggcgacgaccacaggcgcttgacggcaggcacgagctagacaccaaagccttcatcttccaggggctcctcttctgggtttgggaaaaattgagcaagactgagtacaaccaccgtactcaacaagacacacctacaagtgcaggttaaatgcaagggagtacaagggggttataatataaagggttagggtttgcagtaaacagcattaaaagacacttagttgctcaaagctattttgtaaacacgattccagagctatacaatattattaaccaaggccgtgaacccacacgaacctgccttaacccaaggcctacaatgattcagaccgaactggcaacccgaccctgggtcccagcttgtcccaagccaacccagggcaaccattccacattttagttgttaagcaggttttaagaattaaaacactaacttcggtacattgctcggcttgcccataaccgagggcgcggctattcgaataggttatactctgatcagaggtgtagatctttacccacaagacacatcttcctcacatgtaaccacgtgccacataccaccatggtatacagacggaagacatgacatagtttccaacccatcctagccatagacaagagtaccgacccaaccctacctacggccggaacctccgggacaggtaggcaggactgagcccctagcagcaggacaccggccctgtgccatgacatctcgactaccgggccgcagctcgtgtagccttcatttgccctagagatgtccatcgacccccgacttcgtccatctccatccgggtacttttgtttataatcaaactgagccacaaactaagccttacccactagacatgtggaagtacggtagtgctttgcaacagaggcccgaagaccggtccttatatggccgaggtgctactatcaaaaccatgcaccccgagcccagcctaaaaccattttgaggattttgaatagagggggaggtgtgaatccaattccacaataattgaaccattccataatgtccaggtgatatgaatattcccaaagtctagagttgtaaaaccacctaatgttgcctaattaagcggcgaagcatctacctaaattcatactagtggtaccatgagtagagtgtccactagttggggtttggtttattctagggtgaacaaggtaataataacaatagcaataataataaggtcataacaaaggtaaataggcatggctaaataaaacaatgataacgcgggaatttaaataaagcgataatgcaataatttaaatcaaaataattttataaattgggattcaatatgttcaaggatgatgtgactttccttgctccctttcccaaacgtcggcttcaacctccacgaagagcggatcttccgaagctgcagcgtctacacgaccaacagaaaagaaaaggcttttactctaataaactccatataacaagcagaaacaaagcacaaaaatgggttcttgacttcttaaggaaaaattagagacttgaatggtccaattccgagttcaaatggccaagttatggccatttgaagtttatatgctatttaaatgaatatttgcgaatttctttatttaaattntaattttaaaaaggtttattgcgtcagcccggggggaaggggtgcgccgacccggt

SEQ ID NO: 26135 - DNA, 7108 bp, Oryza sativa
agggagatgggccgacccggcccaaaggagggaagggggacttttagggtttttctttttttataaaacctttttaactttatttatttcttaattatttttttgtgctccgaaaattccactaaaatttatttacacatttcaggcttttaggaaatatacaaaaatcctctaagccttgtttgacttttactttgcacattttaatttttggaggctttcacacggattttaattattctaggcataatttaaaggatatattttagggtcgttttgggacgtgacaaatctcaatgacaataaagagaagagacagtggacgggtcgtagaggagtataatcgcaacgtttgacgggacatctggaaattataaaaacgaaaccctatatgacaataaactctaaaactataaaatccaaattttaaaggttccagaaagaatgaatagaaatagtgatagatcgagtaagcaaataaagaaagagatgacataggaggtagcaactggtgtgacttttaaaaactatataattagaaacacgaggatgatactggtgtaacttttaaaaactatataattagaaacacgaggatgataaggtttggtctttcaaagtcttaagacaatgagatagctatttaataaattttaagtagaataatactaaaaaatatatgattttgtttgggtgctagccgcgcaattgcgcaggccacccaggtagttttgaggtatgtggcaggtactctgaatctcggggtggaattcagaaagaagcaacaacaggttcctcagctgaatggctatagtgacagtgatatggctggggatattgatgatagaaagagtacaaccggagttctatttaaattgggagacagtttgatcagttggcagtcacaaaaacaaaaggtggtagcaatatcttcgtgtgaggctgaatatatagctgctgcaactgctgctgtacaaggagtgtggctggctcgaccaataggtgagttggaaggccaagaacctggttgtgcactgatcaaggttgataacaagtctgctataagtctcttgaagaatcctgtgcttcatgatcgcagtaaacatattgatacaaagttttatttcatctgggattgtgttgatcagaaacgggtggaggtggaatacataaggttagaggagcaacatgcagatattttaacaaagcctcttggtaagattcgatttttggagttgagaggcaagctgggattagttccagtctgatgcttcaagattagggggtgaattgttggattgtaatcttgagcatttatattctcttttgtttcgttgcatgtagagttctgttggagtctgaattctagccagtagaatagcatttttctgttttagcatatttgcttccttctttagctgcaatgactcggctcggatcgtgggatggcgcggtcagtagttgatccgagattgtcatgatttgattctattatacatgtaacaaaatctgtgtggagatgaataaatagaagagaaaaccgaaaaagctgcactgtattacgcagcgccaactctgttcgtcagttgttctgtacgactctgtattttcggaacttcttcagttagctgtagctgcacctacaagcgtcagagtgtgtgttttagagagactgagagccagttcgcgtgagtttttttctgacaaaggcgtcattagctctggttgcgtcttgagccatctcgttggagttgccgttgtcccgtggacgccgctaagccgcccaaatccatagacgatgaggcgttgccaactaacgcttgtccccatcaccatccgatgcccaccggagaaggccattctcaggttgccaaggggttggttgccgatacccggaggtcgttaacatatcatccacaagccgcgatggtattgtcagactatatgtgccggcacctgtcatgatgcagccttgctgggcagagatgccccacaaagactactaatcggtgacgccctctgtcccccacgctcatcgtagcctctgcgggttgccgccgatgtctactaaatcatcctcgccaatgctatgatcttcctcatgttataattgtcgagccacctgagaagaatgccggagcgccattgcttggtgcttgcacgatcgtcgccaagtccagccatgatcccttcgctttagctggctgaggtcgtcgtgccatccttccacgacgctttcgcttcggcacgtcgggatcatcctcatacccacaaatacggtgtcatgctcgccggtcttgaccgctcgatgacaaaatctttatatgtacaccgccatcgacgatgattgccgaatcgttgccgtcgccgatcatactctcagacccgcaccgccgaggcgtcttcatgattgtcatcgatgccggtgatgcgatctcgtccacaaacaggacgtatcctcgtcatcttcaacgatcattggcatacatttatccttgcggctatcaccgatggcgaacctgtttctggtcatcatcgcccgcactgattgtttctccgccaatgacaagcccgttcttgtcgtcgttgccggtaccaatcgtgcattcgtcgccaacgtgcaagtttggagccactagctgttttcacgaacattcttggcatcaccgcgggctggtaatgacctcgcgtccgtctcacgctgtcgtcacgctcgacgaccccggctgtccaatgacgaaattcttggatatatatacatatatctatgcatatgcaccaccgtctctgctcgactgctgccggcgaagatcttcaacttgtcgctgccactggcgtcatcatcacatgaatcctcacctcgccatctagtgatcacgagttcggcatccccaccgatgtctctcactccacaacgcccatacacatgacgtattatttcgtcgtggccgtcgtcggtgcactcccgagttaagccactacgatcgtaggcgacccaacaaaatttgggttcggctccgattgtcaggcacatatacaagagggccacccagttcctagaacgtatctcatcgttgccgggttaggctacgcccctaacatcccctaaaatcacttaatcttgagtgtgcagtgcaatgatcggaaggcatactcctgtaccacaatgatcttcagccattgtgctagaaaccagaaaagcagcgctatcccgagtgtcacggtgattggtcgactgaaggccataccaacatgtacctctacaccgagccagagacctaccgcgacgataatcgagcaaaacgattggtcaatgttctctcccaattattctcccactattgacatggcaccaagacggtcaagaagagttgtaccagcctcctagtgcttacaaccaaaaaacctatgccaactacatacgctttttaagactgatgaggctaaatggcacggacaagtggagtctatatgaagtcgatgtcacctacaccggcgcacggaccgacgaggccgtgaaccgctactagcgcccacacacatcgacaccatcaccaccatcacaatcatgcatgggagaatgtgaagcgaagaccgacgacgacgaccagcgtagcttaatttgaggtgtctcgcggtctaacccgcgagagtaattaaccgggtgttttccgagaccccgggaaccatgagaacacagtcgccaagtcagatccacctcgtcaatgagctgtggagcgcatttgaccaaggatttttgtatttttgtaattcttcaagaattataataaaatgcattttccttcttctattttattttgtgtacttagtacactggcacgcccacacatcttattttatttatttcgctgggtgaagagattggaagttaaattctctccgttggtacaatgttgtagagacgtaggatgcatctctttttgagcaaatatgcaagtaccaactggagtggagcagaaaacacctagaaaagaagagtgcatctcctcttgcttgtgtgcgagtaggtgatgcaagagtgaggagttgtgcacagctaggagtggatgaaggctaagccaaggcaacacatgagctcaagagagaggctgggtgtagccaggcatcatgatcgctaccagcaaggtgtatagccattttttaaagactcacacataatgcattctttgatctaaatgtagcccgtcagctctcttgctctcttcctcttctcccatctttttttttcatttttttgttgtctctcctttttttttctcttttttttccttttttcagcaaggtaagactaacaccaactgtaaaccaagatggtcttggttgatggaattcttcatgcaagctcgtagacctccctcccccacacttggtcttttgtgtcatgagacgtcaaaaaccaagtatgtgatactggggcctcttataaagcgtatcgcattaccaaggatcaccatggtgtacggttgatgtggctcccgtgttcttaggcatcgtatgaccctcgctcttaatctcaacgtgaaatggttagcgaccaagaatacccgaatgtgtacactatcttaaacacagtttcttgcttttattggaaagaaaacttacaaagataatccgggtatctcccggcagtgctttgtttatggtcttaatgtcacaccctgaaaattcaaaatttataaattgttgtttaattggaatttttagaaataattttaaaagtcttgaagaaaagatctaattttaattaataaattccaatataaaatggggccagataaaatttcattaaatactttgcttaattctataattcctagattttttctgggatttatttgagctaaggaagtatttttaataaatggaattgcatttaagaaataatttaaattgaaaaaggttttaaaaagtctcttttggctttgggccgaaagtcggcccaaaaccgctctctctctcctcggcccagtccggcccagtccgcagccgccgcgcgcgcgcgccctcgctgtcgctgacaggtgggtcccacctgtcaggcccgtcgtcttcctcgggccgaaaccctagtttcgcgccgccgccgccgctttccaatccggccgtccctttccttctccggccgaattgatagaggggaaatgatctccgggatctcctctaccttttctcctttggaatctttggctaaatcgttttggaaagcgttggattcgagtttgtctcggattcattcttcccgatctttccttcctcgccgccggccgccgtgggcctttgccgtcgcctccgagcccctttaaaaggacccccggtgtctcctctacccgtcgccaccctcgccttcgcctctcgtcgtcggaatcgctctagcgccgtgtgccctagctttgccgtcgccgccgccgctccagccgtgcgccgccgtcgtttcagccgtcgccgtcgctcgggaagaccaccgtcgtgctcgccaagtcgtcgccgtcctcgtccgcctcttcgccgtcgccggagatcaccggagcagcatcgccgtcgtcaacccgaaggttcccgccgcttcctcctcgtcgccgtcgccgtccgttggtcttcccccgccgtttaggtcaccggtgagttcgccgcgttgtcctctccgtcttggtgccctctgtttgcgtcctagcatcgccgttcgccgacgagcgtgcgccgttcgagccgtctcctccgccgagccgccgccgctgtcggtgatgtcaccgctgacgtcatcggggtcgtccgccgtgagccgccgtggacccgatcgatctcggccgtccgttttggatcaagttgatctcggccgtccgttcgtgtgaaccgccgcccgtgcgcccggtccaccgaaaccctagcccgctgacgcaataaaccttcttttccttttcaaaaataattcattattgcgtcataattcaatttaagccgatataagtgttttaatccgatttaatctttaaaaattcataactaattcatcttagctccgatttagttggttcaagtctctaaatttttctaaaattgagatctacacattaaaaatatccacatgtactgttcatgcttgtttatgtgctgttttggtgattttgttcttttctgcttagattccgtcgtttccggagagtccgttttcgcagaagaagagtttgaagagttccaaggccagcaaggcaagtcacacagatcccaaacaaccctttgagcatgttgatcctatttaaagctattgtttctattcaactattgcatttattttcgaatgtcattgggtggaattaacctattctttgttatggcccttttgtacttgattacttcattccttcataccttgggttattacaatttgactagttgagctttatttatattggttcaactagatattagatataattgcttagcctgcttagaaacattatgtcacgaccggaactgacccaacgggcgttccttgtgtgcgtgcattaatccttgtcccaggaggcaaggtacaccaaaagttgatacaattcagagtttaacaagcggaagcgtaaatagataatttattacatgggcagcgaaggcccagcacacacaaagacacacgagaaacagcggaagactagggcgacgaccacaggcacttgacggcaggcacgagctagacaccaaagccttcatcctccaggaactcctcttctgggtttgggaaaaattgagcaagactgagtacaaccaccgtactcaacaagacacacccacaagtgctgaataaatgcaagggagtacaaaggagttatactataaaggggttagggttgcagtaaacagcatttaaagatatttagttgctcagggctattttgcaaacacgaatctagtactatacaatattatttatcaaggccgtgaacccacacgaacctgccttaacccaaggcctacgatgatttcagaccgaactggcaacccgaccctgggtcccagctcgtccaagccaacccaggccaaccattccacattttagttgttaagcaggttttaagaattaaaacactaacttggg

SEQ ID NO: 26136 - DNA, 6632 bp, Oryza sativa
tcacacacatgtaagcgtttggaattttggatagaaattccgggcgtgacaagttggtatcagagcctccttgaccctaggttatgccaaatggttacccatagaagccctctaaaaatattggaaaagtagaactgttctcctccctttctcttttaattaaaccaaactaatggcacatacacttcataatcccttttaatggttctcattcaaaatttattccagtgttattagtaccgtacatctattactgtactaatggcttatttatcagcaaaagttttacaatattgttttatttaatcttgctgcaataaaataaagttagcatgttgattttataactttcttttatttcttttgaaacctgttattcaaaagtacaaaatttgtgaccttgtttccaactgttttaacttatcttgcaagtttggtttactttatttacttacctttttactctgatttttctaaactttattcaaattaatccaaaaacttgtgctgttaattggatagatgtcttaactccctcctttcacttgtctttagatgccgcgctacaagcctgagtacctgtttggtgttgagggttttgtccaggagttgcgtacgatgtcctttgtcataggatttgggactgcccctttttatgctcagattcctcatgatcgtcatgaagagaagtgccgagtcaaagtcaccttgaatagtaatagtgaagatgtcccctcagtgatgttcgaagctggaggaagaaactacatccatgcatgtcaggaagtggcaaggatcgccataggagagctccgtgatcgctacagtgatcggttggctgacactgagtatcgctaccatcctcgtcaaccacagggaagtgaccgtggcagctaccttgagactgaaggaattgagaatgatgctaccacaaggcatttagttgagatgctgtgggctatggatgaaagccgtgcagagactgtgttagcggctcaagatcgtgaagattggaatcgtggtaagatttgcaagttagaagacaaggtggatcgtttggagaaggaactagccgcgttgaagggagaagcaccaccgcagaaggccaggattcgtcttaccgcaaggaagagagctctatttgtccctcgctatcaattggcgccaaaagttcgtgtggtggagaaagaagttgccccagcagatcctccggtcatcatcataagtgatgatgaagaagaagaatccaagcgcacccattccaagattgagtgggtagcaactcaagatgatgaagacgagccgaacgagcctacaatcgacctccgatgctcggaagaactagagtgacttgttaagtccgtgtcttagatcggtgtgttagttgcttgctttaagtttgcttgtgtgtgtctcgcatgtgatttacatcagtggtgggatgtaagtgcatgcgtttgtttgcttttgagtgttaggaaagtggtgagtttagtggtgtgagagtcttcagtttgtaataatgaaactcagttaagatcaataaaagttaaagtatttctctatcctaagtagtttcccccggtttctttttttgtgccctggccagatggtgctcactcgcagcaacgggaatggccccaacagcaacaataacaacaacaatggagagaacccaacacttgctcaagttcttgctctgcagactcagttaatgaacatgatgatgcaccaacttcagaatcagcaaaaccaaggaaataaccatgcacctccccagaacaagttagcagaatttcttcgtgtgaggccgcctattttctctagtaccactaatcctgttgaagctggtgattggttgcatgccatagagaagaagatggatttgcttcagtgcactgatcaggagaaggtctcatttgcatcacatcagttgcttggccctgcctctgaatggtgggatcacttccgcctgaataggattactgctgaacctattacttggcttgaattcaccgctgctttccggaagacgcatataccatcgggagtggtgtctctcaagaagaaggagttcaggtcgctcacccagggatctcgctctgttacggagtatctgcacgagttcaatcgtcttgctcgttatgctccggaagatctgcgcaatgatgaagagcgccaggagaagtttttgggaggacttaatgatgagctttcttacccactcatggttggagattatcctgatttccagaaattagtggataaggctatacgtcaggaggacaagtacaatcgcatggagcagaagaaacgccggattgctcacttcaaggcacaacaggggagtaatcagaagccgcgtcttactttaggaccccagtctgtgccacagggaggttcttcgtccattgttcgtccgcagcgtcagttcttcaacaacaatgctggcaacaacatccgtaatcaagtcccacgtcctgttgctgcctcgacacagcaacaacctgccaagaggaagcaaggcagcaagcccgtggtgtgtttcaactatggagacccaggacattatgctgacaagtgtccgaagccccgacgcgtgaaggttgtccctgcccagaataactctgctgtaccagcatcaaaggcccgtgtcaatcatgttgctgctgcagaagctcaagatgctccagatgtgattttgggtacgttccctgttaactcagttcctgcaactgtgcttttcgattctagtgctacacattcattcttatctatgagttttgcgggaaatcatgggatggaagtagaagatcttagacgtcctttgatggttagtaccccaagtaatcaagcactctctctgcaacgtagcccctctgtcagaatagaaattcaaggggtaccatttctagccaatcttatcttgttagaatctaaagaccttgacgtcattctagggatggactggttagccaaacataaaggtgtgatagactgtgccaacagaaaagtaactctcatcagcaatgatggtcgagttgtaactgttcatgcattgtcatctgagtttttaaggtcaagactgaaccagataactttgggagagattcctatagttcgggagtatcccgatgtgttcccagatgatttacctggtatgccgcctaaaagggatatagagttcagaatagatttggtacctggaacaactccgatccataagagaccttatagaatggcagccaatgagttggcagaagtcaaaaggcaagtagatgatttgcttcagaagggatacatcagaccgagttcatcaccatggggagctccagttatttttgtggaaaaaaaagaccatacccagaggatgtgtgtggactatcgtgcactaaatgatgtgactatcaagaataagtatccgctacccagaattgatgatttgtttaatcagcttaaaggtgccactgttttctccaagatagatcttcgatcagggtatcaccagttgagaatcaaagagtaagatatacctaaaaccgcttttaccactaggtatgggttgttcgaatgtacggttatgtcttttggacttaccaatgctcctgctttcttcatgaacttgatgaataaagtatttatggaatacctagacaagttcgtggtggtctttattgatgacattcttatctactcccgaaccaaagaagagcatgaagaacatcttcgccttgcattggagaagctacgagagcatcaactgtatgctaagtttagcaagtgtgaattttggttgtctgaagtgaaattccttggtcacgtcatctcagccggaggagttgccgtcgatcctagtaacgtggaatccgtaaccaattggaagcaaccaaagacagtttcagagattcacagttttctaggcctcgcaggatattatcgaaggtttatagagaatttttccaagattgctaagcccatgacacgcctgcttcagaaatatgtgaagtacaagtggtcggaagaatgtgagcagagttttcaagagttgaaaagtcgtttaatatcagctcctattttgattttgcctgatccaaagaagggtttccaagtgtattgcgatgcatctaaacttgggttaggttgtgttctgatgcaagatgggaaggtggttgcctatgcatctcgtcagttacgtccgcatgaaaagaactaccctactcatgatcttgaattggccgcagtagttcatgcgttgaaaatttggcatcattatcttttcggtactcgtacagaggtgtataccgatcacaagagtttaaagtatatctttactcagccggatctgaacatgagacaaaggagatagttggaattaattaaggattatgacatgggaattcattatcacccgggaaaggctaatgttgtagcagacgctcttagcaggaaaggttattgcaatgctaccgaaggatgacagctgccattggaattatgcaaggaatttgaaagattaaatttgggaattgtcagtagaggttttgttgcagccttagaagcgaagcccacactaattgatcaagttagagaagctcaaattagtgatcctgatattcaagagatcaagaagaatatgagaagaggaaaagctatcggtttcttggaggatgagcaaggaactgtatggttgggcgagagaatttgtgtccctgacaacaaagatttaaaggatgcaattctgaaagaagctcatgatactttatactccattcaccctggtagtactaagatgtaccaggatctcaaggaaagattttggtgggcaagtatgaagcgtgaaatcgcagaatacgtagcggtatgtgatatttgccagcgagtcaaggcagaacatcagaaacctgccggtttgttgcagcctttgaagattcctgaatggaaatgggaagaaatcggtatggattttatcactggtttacccagaacgtcatcaggccatgactctatttgggtaatagtcgacagacttaccaaagtggcacatttcatcccggtaaagacaacttattccggaagtcggttggcagaattatatatggcaaggattgtgtgtttgcatggtgtccctaagaaaatagtgtctgatcgaggcagtcagtttacttcaaatttctggaagaaacttcaggaagaaatgggttctaagctgaactttagtactgcttatcatccacagacagacggacaaaccgaaagggtgaatcagattttggaagacatgttgagagcttgtgctttagatttcggtggaagttgggataagaatctaccttatgcagaattctcgtataacaacagttatcaagctagtcttcagatggctccttacgaagcactgtatggtcggaagtgtcgcactccgcttttgtgggatcaaacgggagaacgtcaggttttcgggacggatatcttaagagaagcagaagaaaaggtaaagatcattcaagaaagattgcgtgtggctcagtctcgtcataagagttatgccgacaatcgccgtagagatttgagttttgaagaaggagattatgtgtatcttcgtgtcacgcctcttcgaggagttcatcgttttcacaccaaaggaaaattggcaccgcgttttgtgggaccttataagattgtcagtagaagaggagaggttgcttatcagttagaattacctcaatctttggcaggagtctataatgtgttccatgtgtcacaattgaaaaagtgtttaagggtacctaccgaagaagctaatattgagcagatagaagtccaagaggatttgacctatgttgagaaaccaatccgtatcttggaaacaaatgagagaagaaccaggaatcgagttatccgtttttgcaaagtccagtggagtaatcactcggaagaagaatcaacttgggaacgagaagatgaattgaagtcagctcatccgcatctgttcgccagttcttccgaatctcgaggacgagattctgtttaaggggggtaggtttgtcacaccctgaaaattcaaaatttataaattgttgtttaattggaatttttagaaataattttaaaagtcttgaagaaaagatctaattttaattaataaattccaatataaaatggggccagataaaatttcattaaatactttgcttaattctataattcctagattttttctgggatttatttgagctaaggaagtatttttaataaatggaattgcatttaagaaataatttaaattgaaaaaggttttaaaaagtctcttttggctttgggccgaaagtcggcccaaaaccgctctctctctcctcggcccagtccggcccagtccgcagctgccgcgcgcgcgcgccctcgctgtcgctgacaggtgggtcccacctgtcaggcccgtcgtcttcctcgggccgaaaccctagtttcgcgccgccgccgccgctttccaatccggccgtccctttccttctccggccgaattgatagaggggaaatgatctccgggatctcctctaccttttctcctttggaatctttggctaaatcgttttggaaagcgttggattcgagtttgtctcggattcgttctt

SEQ ID NO: 26137 - DNA, 3715 bp, Oryza sativa
agagaggaaaaagaaaaagaaaaaggaaaaaggattttccctggaattaaaatattgcttgctcaattttaattggttaaaattatttctagagctctgaaaattccactaaaaatcctgttaatgaatttcgacctgtagaactcaagaaaaagtcccacatgtcaaatccgattattatttgcattactttcttagggttttctcctgatttgcaccggtattttcttagggtcatttataaattacaattttggcttgggagggaaacttcggggtgtgacaaacctaccccccttaaacggaatctcggccccgagattcggaggagctggtgaagaggtgcggatgggcggctttcaactcatcttccctttcccaggttgcttcctcttctgaatgatgattccactgaactcggcaaaacctggtgaccttatttctggttcttctttcgctggtatcaagtatacgaaccggcttctccacataggttaggtcctcttggatatcaatgtgctccgaatcaacctgttcttcaggtacccttaagcacttctttaattgggacacatggaacacgtcatggatgccgatcatgttggatggaagttctagctgataagcaacttctccccttcgttccaaaattttgtatggtcccacgaagcgtggtgccaacttgccttttgtctggaaatggtgtactccccggagcggagtgacacgaagatacacgtaatctccttcctcaaaagtgagctcccttcgacggttatccgcgtagctcttctgtcgagactgagcaattctcaacctttccctgatgattctgactttctcttctacttccgctaatacctctgttccgaacagttgacgttcgcctgtctgatcccagaataaagcgcatatggctgtataaagcttccgaccgtataaagcttcaaacggtgccatctgtagactggcctggtagctgttgttgtacgagaattccgcatatggcaagcttttgtcccaagctccaccaaaatcaagagcgcaagctctcaacatatcttccaagattaaattgactcgctcggtctgaccatcagtttgcgggtgataggccgtgctgaaatttaaacgggtccccaattcttcctgtagcttctgccaaaattttgaggtgaactgactacctcggtcggatactatcttcttgggtaccccatgcaaacacatgatccttgcgaggtacaattctgccaatctctttccgtataggtggtatgcactggtataaagtgagccaccttggtgagtcgatccacgactacccagattgaatcatgacccgatgatgtccggggcagtcctgttataaagtccattccaatctcctctcatttccattccgggatttgaagaggttggagtaaacctgctggtctttggtgctctgccttcactcgttggcaaacatcgcagagtgcgacgaattcagctatttctctcctcatgctgacccaccaaaacttttctttgaggtcttgatacattttagtgctgcctgggtgaatggagtactgggtctgatgagcctcggtgagtatcagatccttcaattccttgtcgtcaggtacacacaatctttctaccatccagatcgtgccatgctcatcctcaaggaaatcccgagcctttccgactctcatgttctttttcagctctgctatttccggatcatttacttgagcggctctaacttgatccacgagcgtaggccgtgcctccagagcggctacgaacctgtgttcaacaattcccacgttgagatgcccaaactcctgccgcaattcctcacacatgccctcgatgcatagggcagtgcagtaacttttccggcttaaagcgtctgccaccacattggctttacccgggtggtagtgaatactcatgtcatagtctttgattagttccaaccatcttcgttgccggagatttaggtccggttgggtgaagatgtatttcagactcttatggtccgtatatatttcgcagcggttgccaatcagatagtgcctccagatcttcaaagcatgaaccactgctgccaattccaagtcatgcgttggataatttccttcgtgtggacgcaactgccgcgaggcatacgcaaccactctgccctcttgcattaggacacatccaagtccgtgacgggatgcatcacaatagacttggaagtctttcgtcgggtcgggcagaatcaaaactggtgcggatactaatttcttcttgagctcctcgaaactcttatcgcactcagctgtccatttaaacttctcatctttcttaagcaactgagtcatgggtcgggcgattctggagaaattttcgatgaatcggcggtaataacccgcaagtccaagaaaactccgaatctgcgacacggtcttaggtggggtccatttggtaactgactccacgttcgatgggtcgactgccacaccctgagctgtaatgacatgacccagaaattttacttccgtcaaccagaagtcacacttgttgaacttggcgtatagctggtgctccttcaacttctcgagtactagacggagatgttgttcatgttcctcctcggactttgaatagataagaatgtcgtcgatgaacaccacaacaaacttgtccagaaattccatgaacactttgttcatcagattcatgaagaatgcgggtgcgttggtaagtccgaaagacataaccgtgcactcatatagcccgtaccgagtggtgaaggccgtcttcggaatatcctcttcccggattctcaactggtggtagcctgatcacaggtctatcttagaaaacactttagctcctttcagttgatcaaacaaatcatcgattcgcggcaaagggtatttgttcttgatggtgacctcgttgagtgcgcgataatcaacgcacattctcttcgtcttatcctttttctccacaaaaatgaccggagcaccccaaggtgaagtacttggtcggatgtaccctttctgcagctgctcatcaacctgcttcttgacctcggctaattcgttggccgccattctgtacggtctcttgtaaatgggagcggttcccggtgccaagtcaatccggaattcaatctccctcttgggtggtatggtagtgaggtcttcagggaacacttctggatactcggagactatgggtatgtcttccaatttcttcaaattcttctcctcggtgaccactgggacttccatctcgatctggttcaaggagaccccttgctttggcggggctagtgatttgtacactaccgtttctcccttctcgttggtcaaggtgactgtgcgattcgcacaatcgatgactcccttgaacttagtcagccaatccatcccaagaatgacatctaggtatttggattcaagaagaatgaggttggctagaaatggtaatctttgaatttctattagcactgaagggctaaaactgactgaggttgaactattccccggggtatgaaccctcattggtgtgctaagctcttctttccttaacccatacatccccacaaatttctttgaaatgaaagaatgcgttgcaccagaatcaaaaagtactgttgcagggattgagtaaacagggaacgtacctagtacgacctccggtgctgtttgtgcctcctctgcagacg

SEQ ID NO: 26138 - DNA, 5715 bp, Oryza sativa
aggtactctgtcacagtcctgttgccctgatggagtgcacgaaattccatcttcttttgtgccatgaccccatggggcacgggtgccttcctgaagctacggcagaactctacccaagtgacttcagtacccggtgggcgggtggccatgtgattgtcccaccaggctgacgcaggaccctgaagctggtgtgtggcgaaagcgaccttctcctgatcattgcactgcaggaggttcagcttcttctctatcgcatggagccagtcatttgcctccatagggttggtggtgctggagaaggtgggtggcctgacacgtaggaactcaggcaacttggactgagggggagggggaccaaactgctggtgctgctgttcggcgtgctgcatcatcctctggtgcatctgctggtgctgctgctgcatctgctgcatcatggctgccatcatctgagtctgatgtgccataacttgggctagcgtcggattctcaggaagtggtggcggaccattgccggaatcactgctggggtgcacaccattagcgcgttcttcgccgttgctgccctcgcctgttgcgcggctaccagtcctggtgtagaccatctggagggaaaagcagacgggggggaaagaagaaaaacagatgctcagaaactaagctttattacaaaggaattaaaactgcaattgttctgatctgaattaaaacacttaaagagcaagcaaaaatccttattaagacagccatatcataggcacatgatatcgaccgtcgactgaccccaaacaagcaacctaaacacaccaactaacaagcagaagctagacagtcgataaactaatgggaaaaacgagcctaatgctcggaacggctcctgcggtcggtggagtcgaaggcgtcctcctgctcgtcaccaagtccctctgagcgactcctggagcctggcagatacgtctcgccgctgccactgggagtagcagacaaccaacctccggtgccactggctggacctctggcggctgatgctggagcgaaggagagagcggactcgggagctggagctggagctgcaggaactgcgggcggaactggaggtgctgcgggagttgctgctggaggtgggttcctgggcgcaagctggatgcgcacgggtgccgtcgtagtcttgcggggcgtagtgcggatccggactcctcctggcgctggaagaccctttagctgagcgttctccttcttcaggcgcgctatctcgtccttcagagcaacgatcctcatgagcttcccatcgttcaaggccttggtcgccttgtgcaggtccgagtgcatcctgtccaatcccctcatcacagcacacatgtgaccaaaggtggtgtcgttctcgccagctgtcggacagaaggagctgacgccatcaccgttggctcgacgggggtggtagcggtacgccgtgtcgtggaagatgtagttgtcgcgctcccgtagtctggccatcatcaagtaggctgcctcctgacaggcgtgatctgctgtgcctcctgacgcctcaactgccatgttagcgaggcaagtccccacgtagccatggacctccaagcggacacggtgaggaagctcgccactaagcggcggaatagtcgtgtactccggcgcgttggggtagcccaccaccagtgtcatgcgtgccagctctgccacaaagtcgatcatgccttctccgcggtggttgggtgggtggccagccatctagagaagacaaaggagtaggatcaatgcatgctcaaatccaaatttaaataaggcaataaaagactcaaataagggaaacgaataagagcgaaatttttatgcatagatcattttgcatgagagcgaataaacaagacagacccacataacgataaaataatgagaaattagatatatactaataataacaaataaagcataaataccttgcaacccatgttcctgagctaggacctaatgcatttcacccatcaaaccccaactgactgacgaataaatcccaatagttttactaaaaccctagactgacccgttttgaaaaaactcacttaacgagcgaccaagattttttcccttgaaccacaaaaacagatcccaattttcccggaataaaatccaattgcaaagaacatatgcaatgaaaaggattcagagggctcttaggtttttccatttggcttgtcctacggtcaaggtcggctctgataccaacttgtcacgcccagaaattcccgaatagaattccaagcagaatgtgcattaaaatccccgtccaggaccagccggggtacacaaacaacaatgttgacattcagatccacgtcttacaaacatcataaaagtcttacaaaaatgcagcggaaaacaaaagataactggagctaatccttgactcgaactgcagcgggaacaccactccacaggcatcctcgacggcacggacaaagcctactcctcggagaacccgccatcggacacatactcgagctctgggattggggaaaatagagcaaggctgagtactacccactgtactcagcaagtcataccggaacgggggtatgatgcagggattccacaagggatagctaagcaggttcatttgcataaatactggcatttataaacaggaattgaatgcgaaaacagttgtaataattaagcagtattaatcatccactgtccaacgctacaccacgttgcgacaggcccaaccatccacctaaactatccaaattcaaaagattacactagggtgagactaattacggtgaatctggttgaccgcccataaccgcgggcacggctattcgaatagttttactctgatcagaggtgtacaactgtacccacaagacacagccccacgacacgtttccgtgcgccgacatgccaccacgacatcccggaaagaggccgtgacaggaccattcgcataaccccctctaaccaagcacaccacacctcaggtttcacccccactcctcgcaaggcagcgggcagtcccctttcgtgcctaggtgaatccggaagccgcataggccgtcgcagggcccatccaaactccatcacgcccacccttgcctggatgcgtcgactagaggaaagctacaccacaagcccagccgttgcccacgctggcttgtggtaagtacgataagttcttccagggcatcccgcgaaccggtcgttaattgccatgggtgcgactagcaaaaccatgcacccacagcccaccattcagttgcattttagttggataattacgaccatgaagcatggccagatgtctcgagcacgcagctcactctgatactaaaaaggtctaatattgtaattatcccatcaactgagctagtggtaattaagcatggctaagcatatagttctagctaagtcacataagtaacacgagctagtcgatttattacccaatgttgacaaaggatagatatcaagtaaacatggcacaagcgagcagataggtaaaccctgatcccgtgtaattagcaaaatatgcatatttatttgtaaacagtaaaacatttgtaaattaggatcaaaatgctcaaggggaatgtgtgacttgccttgcttcttcactttgatcttccgaactcttttccttgcgaccgcggacttccgaaacgacggaaactacacgctggcacgcaaaacgaggaaaatctctaataaaaaccaaggaaacagtacataaaaactaaacaaacatgtagagctcaattttagatgaattttgcaagttgaatggctcaatttggagttcgaatgaattagatatgaattttagaagttttgagccatttaaatgaatttctagaattattaacgaattatgacgcaattattatttatttttccaaaggaaaagagggttgctgacgtcatcaaaggggaggggcggcgccggcaagcgggccccaccggtcagcgggacaagggcgccggtccaccgtggaccgggaccaccaaggcggtccaccgccggtccacgggaaccgatggcccggatcggcccaaaccgatcgagcggccaggggcggcgcggctggggcacagcacggcacaaagccagctggccaaacgacggcgcgcggcggcgcggccacccgcggcgacggccggcgacagcgcggggaggagaggagggatgctcaccaagggcggcgacggcgagactacaacgaggaagccggcggcgggctcctcggggaggcaacggtggtccggtggcgtaccacgggcgcgaggcggcggacggtgaccgggacgaccggtgcgcggagagggcgatttcagtggtttcccgaagccaggaatccggtggccggtgtgcggcttctgatttccgatcccaaggaggaaacggcgcagtccggcgtcgaccggggaggcgaggcgacacagatggagatacaaacacggcggcgatctcgggttggtggtgaagttggtgctcggccggcgagaggcgacaaccgagcggcggccgagcttgactttgaggcggcgaaggtactggcagtggtggcgcattggggcgacggctagggcggcggtggtgcacggctagaggcggtgaaaggggcggcggcctcgggtgtgcggtgggagtggtgctcgagcggtggagagggggaaataagaggcggccggacttccccttgcggtggcgaagctggcggtggcggcggctcggcgcagcgacggctgtggcggcgggaaacggcgaccggagttcgccggagtgtggcagcgcgtgggtgcggcgtggggagagcgagggagagtatgccgggctcgggaaaaatggggaaacggacgaggggagcacggggatgctttttatgggctcgggaaggcgggatcgaggccggacgtggcggaatcggccggcgaagtggggcgccgatgtggggtggtggaggggttaaccggcgccgattttcgcggggagagtgggggaaatggtggaggacgtggagaggatcgttcccacgtcgttggatgcgagctcgggtgcgggagggcgccggattttgcggcgatgtggacggcaatggcggttggggtcggccggcgagaggtaggaggaggagctgacgggtggggtccacgggtcccacctgtcggggagagagggagggagggaccggctggggaggtaaagcagacttgagggagagagagagccgagcgggccgagggagaaggccagcccgagagggagagaaaagggcgcgcgggccgagggagggaaggaagacttgggccgaaaatggcccaaagagaggaagggggattttaattgttttctttttattttaattgatacaatgatctttgtgctattaaaactatttctcgagctccgaaaattcacggaaaaattccggagagtacattagggcacaaagaatattacaaaatattcccggccaatgatttttaaaggaaatttttaattccctcaataattcacttgattaagttgatttaacttttatttaatttctagaaaatgtattattaattgatttttattcccgaacgaaaatcggggcgttacaccccgtctgctgtcggtcacgaccggaactgacccaacgggcgttccttgcgtgcgtgcattaatccttgtcccaggaggcaaggtacaccaaa

SEQ ID NO: 26139 - DNA, 2378 bp, Oryza sativa
aactcaagaaaaagtcccacatgtcaaatccgatattatttgcattactttcttagggttttctcctgatttgcaccggtattttcttagggtcatttataaattacaattttggcttgggagggaaacttcgtggtgtgacactagtcctcctctttcgtttgccccttttcccgagctctctagtgcgccgtagagtcgccgccgcgtcgctttagccgccgccgtcgccggccatcctccggccacgctgcgccgccgcgtccgccgtcgttgccacctctcgttgccgccgttaggtgcgcacgggagcggggaagctcggccaccccttctccgccgtcgccggccgtcgtagcgccgttcccgccgttcaaccgagccgccgccgcctcttgcgtcgtcgccggccgtcatcgttcgtcgttggacgctttggtgagtaccgttgcgttcgtgacgtcgtcctctacgtgtagatgcccttggatagcccggccgatctctctatcgccggcgaggtcgtcgcccatgtcatgccggcgatgatgacgtcagcatgacgtcatgattcctcttttccagtttttttctaatagattaaatcttcggaaaatcataactaaataaccgtagcttcgtttcaggtggttcaagttgctaaatttttctaaaataaagatctacatattaaaattgtccataaattgaattaaatttatttaattctttttaatgggctttaattagatttaatcttgtaaaattcatattaaattcatttgaagtcagaatagggccgttcaagtctcataattcatctaaaatcatgttctacatgtttgtttattttatatgtattgtttatttggtttttattagtcttttactttgttttgcgtgttagcttgtcgtttccgtcgttgcgaaggttcgtgagtgcgctggaagtattcaagaagattaattgaagaccgattattgcaaggcaagtcacacagatcctaaacacaatcctttgagcatgttgatcctatatttaaattctctatttatttcaactgtgcatttattttcgaatgtcaccgggtggtgtgaacctattcctttgttatggccaatttgtattggatgccctattccttgataccttgggtaataaattgattagcttgaaccttatatattggattggttcagctaaatgctatatgtaagtttgcttagctatgcttagaaacattagctaactaaaggggttaattataagctatgttatattattattaattatggttacattaaatggtagctcacgatggttaatcgtgcgatgttaattaattgataattaaaacctggttaaggtgggttgtgagcatatggttttgatggttgtgctcatgacaattaaggaccggttcgcgagctactgttgtgaaacatttatcgtgccaaccacaagccagcgtgggcaacggctttatcttttgtatagcgtgattcattatagtgcgccagactgagaagtggcgagaagtccacgggggtcgctggggagtccatgccttgtttataagggggtgattatgatccaggaacggtgcactgttttgagttgtgttgtgcaaagggtattgtcacgatttccccctttgcaatgccgtggtggtatttcggggcatggcaacatgtgtggaatcgtgtcttgtgggtacaatggtacacctctggccagagtaaaactattcgaatagccgtgcccgcggttatgggcgagttaagcaatgtttttcgtggttagtctcacacctctcacaataattatagatgttatacctggtaataatttgcttagctcctggtttggagattagatctgtacagccgggtatggttgttcaggatggttgggcctatgcagcatgggtgtgatgttcagtgttgattaaaatttctgataaattactccactgttttacttctcttaaatctttgctaaatgctgcttttgcaaaagagcctatattatgccatcctttggaatccttgtgcacttgcatatttgctgtgtggcttgttgagtatgtcatatgctcattcttgcaataatcatcaaacctcagttgaagataaaggatccagaaggagaagacgtttggcttataccccagttgagctgcctgtgggagtggagctgaagccatcgctagaccgttaattccgctgctgttttcttttctttgtaagtatgtaacgttattattaagatggatttgtatattaaattgtcagtttgtgtacctcggctgatgcctggacgaggattttatgcacaaattagttcggaaattattagtgaatttccgggcgtgaca

SEQ ID NO: 26140 - DNA, 1688 bp, Oryza sativa
gcaataatcatcaaaccttagttgaagataaaggatccagaaggagaagacgtttggcttataccccagttgagctgcctgtgggagtggagctgaagccatcgctagaccgttaattccgctgctgttttcttttctttgtaagtatgtaacgttattattaagatggatttgtatattaaattgtcagtttgtgtacctcggctgatgcctggacgaggattttatgcacaaattagttcggaaattattagtgaatttccgggcgtgacatctgccccgcgtgcaatcaatagggggaattattccccgggatcccctccccctttccccccatttttccctccctctctccctcggattcgtttggaaacccctcccctaacctcgccggaccgtggggctgccgcgtgggccccactcccgtggacccggtccgcgcgcccctcccctcggctgacgcaataaatcctttttttaattaaaatttaaatgaagaaattcgcaaatattcatttaaagagcatataaacttcaaatgaccataacttggccatttgaactcggaattggaccgttcaagtctctaatttttccttaagaagtcaagaacccatttttgtgctttgttcctgcttgttatatggagtttattagagtaaaagccttttcttttccgttggtcgtgtagacgctgcagcttcggaagacccgctcttcttggaagttgaagcccacgtttgggaaagcgagcaaggcaagtcacatcatctttgaacatattgaatcccagtttgtaaaattatgttgatttaaattattgcattatcgctttatttaaattcccgccgcccgtcagcgagggtggcgggcgggcccgcccgtcagcggcgcgcgcgcggggaggaggccgatgggtcgcgggggagaggagagagagggagggaggtgggccgagccggcccaagagggggaagggggggaggaaaaagacttttagggtttttctttttataaaaccactttaactttgtttatttcttcttaattattttttgtgctctgaaaattccactaaaatttatttacgcattttaggcttttaggaaatatacaaaaatcctccaagccttatttgacttttaaatttgcacattttaattgttggaggctttcacatggattttacttattctttgcataatttcgaggatgtattttagagtcgttttgggacgtgacaaacctaccccccttaaacggaatctcgaccccgagattcggaagaactggcgaagagatcgggatgggctgccttcagctcgtcttcgcgctcccaggtagcttcttcttcggcgtggttgctccactcgaccttgcaaaaacggattacccggttcctggtcctgcgctccatggtgtccaggatttttactggcctctccacgtaggtcaagtcttcgcgaactacaatttgctctgagtcggcctgctcggatggcactcgaaggcatttcttgagttgcgacacatggaacacatcatgcacgttgcccaaggaggcgggcagttccagctggtaagcgacttctccgcgccgagcaatgatacggaaaggacccacgaaccgaggtgcgagcttcccttttgtccgaaagctgtgtacagctcgcaatggtgtgacccga

SEQ ID NO: 26141 - DNA, 903 bp, Oryza sativa
acaacaacagctatcaagccagcatacaaatggcaccttatgaagcgttgtatgggcgcaaatgccggacaccgctaatgtgggatcaagttggggaaagccaagtgttcgggactgatatcctgagagaagctgaagctaaagtcagaaccattcgggataatctaaaggtggcacggtcccggcagaaaagttatgcagataaccgtcgccgtgacctggaattcgcagtggacgattttgtatatcttcgggtcacgccattgcgaggtgtacacaggtttcggacaaaagggaagctcgcacctcggtatgtgggtcctttccgtatcgttgctcgacgcggagaagtcgcttaccaattggagctgcccgcctccttgggcaacgtgcataatgtgttccatgtgtcgcaactcaagaaatgccttcgagtgccatccgagcaggccgactcagagcaaattgaagttcgcgaagacttgacctacgtggagaggccagtgaagatcctggacaccatggagcgcaggaccaggaaccgggtaatccgtttttgcaaggaccagtggagcaaccacgccgaagaagaagctacctgggagcgcgaagacgagctgaaggcagcccatccagatctcttcgccagttcttccgaatctcggggtcgagattccgtttaaggggggtaggtttgtcgcgtcccaaatcgactctaaaatacatcctcgaaattatgcaaagatccatgtgaaagcctccaacaattaaaatgtgcaaagctaaaagtcaaataaggcttggaggatttttgtatatttctaaaagcctaaaatgcgtaaataaattttagtggaattttcagagcccaaataataattaagaagaaataaccaaagttaa

SEQ ID NO: 26142 - DNA, 922 bp, Oryza sativa
aggcgacggcgcgcgacactaagaggagaggaaggggaaaagaagggaggggtgcctcaccgagggtggccggcgcggaggaagacgatggcgaacggcgacggcaagccacgggaggacgacgtcggcgagcggacgagcttcggggtgccctaaggaaggaggagagagggattagagagagggagatgaaccacggcgaccggaaaccatggccgaaggcagcggtagaggtggtgctcacccgtgcgcgaggggatgagggctccggcgacgaaccttgacggaggagaggtggacggggtggatctcggccacgcgaatccgacggcggtgacggcgcggcctggcggcgaccctaacggcggctagcggcggccggagaagcggaaaatggcggctgcggaggttgcacgacgcgggggcgatgggaggctcgagagagtgcggcgaaatggggaaaaagtgagagggggcgacggcggtgcttaaaaaggggaagagagaaccgcacatggccgggagaggcggaaatcgccggccgacgtgggggaatggggaagagagagaggcgggattcgattttcgaatcccggccatctcgggcgcgggcgcgagtgggagatagaggggagtgggcgctggagacgcggcgcacgcgcgggcgtggtcgacgtggcccggggaaggcggggacgtgggcgcggcggtggtttcggcgcggcggcgcgagcgcgagatcggcgggaggagggagacgggcccgacaggtgggccccacctgtcggcgaccccgagagaggagcggcggggctgcctggctgggcctcggcctgcggccggcccagtaagggggagggaaggaaggagggaatgggccggcggcccattcgaaagaaaggaggaaaaagagaggaaaaag

SEQ ID NO: 26143 - DNA, 1203 bp, Oryza sativa
gggtcgtgtgaaccatgtgcggccgagaacgttgttgcaactccagacgtcatcgttgggacgttcctcattcattccatccctgctaccattttgttcgactctggagcttcacactcgtttatatctgtgccattcatggggagaaatcagttgggaatagaaaggttagaaaccctctgctcatcaccacccctggaggggttatgacagcaaagtactatagccctgccgtccctataaaattcaggggattccttttccccggatctgattctgctaggcaccaagaacttggatgtgatccttgggatgaattggttggctcaattccaaggagtagtggattgcgcgagacgcactgtcactctgtaccgagggccggaacaaccggttgttttctttgcacccccaacctcagtcagaagttcagaacttcatcagatagaactgtcagaaattcccatcgtcagagagttcggagacgtgtttccggaagaactacctggtatgccgcctaagcgagagattgagttccggatagatcttgctccaggaaccgctcctctgtacaagcgaccctaccgtatggcagcaaatgaattggccgaagttaagaaacagttggaagagctgaaagaaaaggggtatatacgtccaagtacttccccctggggtgctcctgtgatttttgtggagaagaaagacaagacgaagaggatgtgcgttgactacagagctctcaatgaagtcaccatcaaaaacaagtaccctcttccccggatcgatgatctgttcaatcagcttaaaggtgccactgtattctccaagattgatcttcgttccggatatcaccaattacgtattcgcgaagaagatattccgaagaccgcattcaccacgcgatacggactgtatgaattcacggtgatgtcgttcggtttaaccaatgctcctgccttcttcatgaacttaatgaacaaagtgttcatggaatacttggataagtttgtggtggttttcattgatgacattctgatatactcacaatcagaggaagaccatcagcaccatctccgtctggtattgggaaagctgcgggaacatcaattgtatgccaaacttagcaagtgtgagttctggttgtccgaagtcaaattcttagggcacgtgatatctgctaaaggagttgctgtggacccc

SEQ ID NO: 26144 - DNA, 756 bp, Oryza sativa
acacgattctagaactaaacaatattatttatcaagggcgtgaacccacacgaacctgccttaacccaaggcctacgatgattcagaccgaactggcaacccgaccctgggtcccagctcgttccaatccaacccaggccaaccattccacattttagttgttaagcaggttttaagaattaaaacactaacttgggtacattgctcggcttgcccataaccgagggcgcggctattcgaatagattttactctgatcagaggtgtacatctttacccacaagacacatcttcctcacgtgtaaccacgtgccacataccaccacggtatacagacggaagacgtgacatagtttccaacccatcctagccatagacaagagtaccgacccaatcccacctacggccggaacacccgggacaggcaggcaggactgagcccctagcagcaggacaccggccctgtgccatgacatctcgactaccgggccgcagctcgtgtagccttcatttgccctggagaatgtccatcgacccccgacttcatccacctccatccgtgtacttttgtttataaccagactgagccacaaactaagccttacccactagacatgtggaagtaccgtagtgctttgcaacagaggcccgaagaccggtccttatatggccgaggtgctactatcaaaaccatgcaccccgagcccagcctaaaaccattttggggattttgaatagagggggaggtgtgaagcca

SEQ ID NO: 26145 - DNA, 653 bp, Oryza sativa
  unsure (1)..(653): unsure at all n locations
atagggattggtgtagcggaccctttggttagctccctgttgattgcggaaattcgccaagcggcgcttgtgcgactccagttccttgtgcttggcttccaagcggatgctcttgtccaccagacgttggaaatccagatagtccccggagactagacggacggacagctcagggtccattcctgccaagaacttctcttgcttctcctcatcttcccgcacatcctccggggcgtaacgggccaggttgttgaactcatgcaaatactccatcacggagcggttgccttgcttcaactctcggaattcccttttcttaagggccacgactccggcgggcacatgggttctccggaaagcggcggtgaaacgggcccaagtaataggctgtccctctggctgcgtagcctgaaaatggtcccaccatagagatgcgggcccctgcagctgatgggcggcgaagatgactttctcctcatcgctgcactccacagtgtctagctttttccccacggcatgcaaccaatccaacgcatccacggggttgttggagctagagaaggtaggtggacggatgcngaagaactcggcgagttaaagtgttggggaggtggtggtggagcattatngtgtggcggattttggaggtggtg

SEQ ID NO: 26146 - DNA, 1325 bp, Oryza sativa
agtgtccaggtgatatgaatattcccaaagtctagagttgtaaaaccgcctaatgttacctaattaaaagcgaagcatctacctataatcatactagtggtaccatgagtagagtgtccactagttggggttttgtttaatctagggtgaacaaagaaataataacaataacaataataaggtcataacaaaggtaaataggcatggctaaataaaacagtgataacgcgggaatttaaataaagcgataatgcaataatttaaatcaacataattttacaaactgggattcaatatgttcaaagatgatgtgacttgccttgctcgctttcccaaacgccggcttcaacttccacgaagagcggatcttccgaagctgcagcgtctacacgaccaacggaaaagaaaaggcttttactctaataaactccatataacaagcagaaacaaagcacaaaaatgggttcttgacttcttaaggaaaaattagagacttgaacggtccaattccgagttcaaatggccaagttatggccatttgaagtttatatgctctttaaatgaatatttgcgaatttcttcatttaaattttaatttaaaaacggatttattgcgtcagccgaggggaggggcgcgcggaccgggtccacgggagtggggcccacgcggcagcctcacggtccacggtggaccgggtgcacacgggcttacgccggccggcgccgtgggtcccacgcgtcagccgcacccgagcgcgcgggcggctgacagccgggccccacgcggcagccactcggcgcgcccgagggcggccatgccggcgcggtcgacgggaggcggctttccttcgcccggagaccatcagctcggcggaccggcggccgagagaggggagggaagggggaaaggaggcgacggtccacaactcaccccgaggcgacggcggcgacggaggaggcggccagagcggagggaggcggtggcaaggctcgggtcgacggggacggcagcgctccggcggtcggcgaccgaaacggagaggtggacgaggtcggcaaggatgcggcgaacccgaaggaggcggctccgaggtgggaggcggtccggggcgacgacggcggcggaccggagctcggcggcgatggcggagagagagagcgacgtcgcgagctcgaatccggcgaggaggaagggcggcgagaggcggaaacgaacggaggaggtgcgggaagggtttaaatagggttggaaggggagagagcggctggggaggaaggaaaccggcgcgggaggttcggccgccatcaatggcggcggcgagatt

SEQ ID NO: 26147 - DNA, 1330 bp, Oryza sativa
gaacacattatgcacgttgcccaagaaggcgggcagctccaattggtaagcgacttctccgcgtcgagcaccgatacggaaaggacccacataccgaggtgcgagcttcccttttgtccgaaacctgtgtacacctcgcaatggcgtgacccgaagatatacaaaatcgtccactgcgaattccaggtcacggcgacggttatctgcataacttttctgccgggaccgtgccacctttagattatcccgaatggttctgactttagcttcagcttctctcaggatatcagtcccgaacacttggctttccccaacttgatcccacattagcggtgtccggcatttgcgcccatacaacgcttcataaggtgccatttgtatgctggcttgatagctgttgttgtaggagaactcggcataggggagactcttatcccaggtcttctcgaaatccaggacacatgcgcgaagcatatcttctaggatctgatttagacgctcggtctgcccatctgtctgcaggtgatacgctgtgctgaagtttaatcgggtacccagctcttcttggagcttcttccaaaagtgagaggtgaattggcttcccctatcagatacgattttcttaggaacgccatgcagacttacgatcctagcgaagtagagttcggctagtttgttccctctataggtggtctttacgggaatgaaccgagctaccttggttagtcgatccacgactacccatatagaatcatatccaccttgggtttttggaagtccggtgataaaatccatcccaatttcatcccatttccattctggtacttggagaggttggagaagtccggccggtcgttggtgctctgccttgacacgctggcacacatcacagagggccacgaactctgcaatttcccgcttcatactaacccaccagtatttctccttcaagtctaggtacatcttcgtactgccagggtggatggaataaggactttcgtgagcttcctgaagtatcagcatacccgaaatgtctaggtacatcttccttaagttctctgttatctggaacgcatacccgatttccgttccatagggttccatgttcatcctctgtgaaaccagcggctttaccctgtttcatattcttgaggagcccatgcatatccgggtcattcttctgagccttgcagatttgatcgagcaaggtaggcttggctttcagcgtagccaagaatccacgactaactatgcttaggttcagggcttccatctggtgattaagttccggtggaatgccacggacgttaagagtgtgcaatggctcttt

SEQ ID NO: 26148 - DNA, 999 bp, Oryza sativa
aactcttatgatcagtatatatttcacagcgattcccaatgagatagtgccgccagatttttagagcatgaaccaccgcggctaattccaagtcatgggtagggtagttgccttcatgaggtcgaagctggcgtgaggcataggccaccacatgaccgtcctgcatgagcacgcaccccaatccttggcgcgaagcgtcacaatacactatgaagtccttgcgagtatccggcaagattaacactggcgaggcaaccagcttttctttgagagttctgaacgccttctcacattgcgggctccacacaaatttctcttctttcttcaacaactgtgtcatgggtcgagcgattttggagaagttctccatgaacctctgtcacgaccggaaataacccaacgggcgttccttacgtgcgtgcattaatccttgtcccaggaggcaaggtacaccaaaagttgatacaattcagagtttaacaagcggaagcgtaaatagataatttattacatgggcgacgaaggcccagcacacacaaagacaaacgagaaacagcggaagactagggcgacgaccacaggcgcttgacggcaggcacgagctagacaccgaagccttcatcctcctggaactcttcttctggggttgggaaaaattgagcaagactgagtacaaccaccgtactcaacaagacacacccacaagtgcagaataaatgcaagggagtacaaaggagttataccataaaggggttagggttgcagtaaacagtaattaaagatatttagttgctcagggctattttgtaaacacgattctagaactaaacaatattatttatcaaggccgtgaacccacacgaacctgccttaacccaaggcctacgatgattcagaccgaactggcaacccgaccctgggtcccagctcgtcccaatccaacccaggccaaccattccacattttagttgttaagcaggttttaagaattaaaacact

SEQ ID NO: 26149 - DNA, 829 bp, Oryza sativa
tgctcttctccactggttctccatcaccggctgcgaagaagacgatggccgcaatcgttgatgagccgcggtcgtttcctcttctcttgcgttccatactctcctcaccatgccgaatatttctccttttgatttcatcctctctggtgcagccaatcggcgggaacgctgccatgcacaccggagctctggagcgcgctctgcgcaccgccgcagcaacatcgtcgccgttgccatcaatctagatcaagccggagcgagccaccacgccaccagcttcacctcaacctcctctccatttcccctcaagaatcttcaagaatggtgctacgagtgtggagatcgtccaccgtcttctccacctccggtcgccgtcgccattgtcgattccgcctcctccggtgagccattgtccgattcttcgcgtatacaccatccctgggacctcactaaccccatgaaaacacatgcatgtcaattcgatgagtggatcgagccgttgccgtcttcccggagctctacaccgtcgccggaccatcttcttctccgctgccgctgtccagactttccggcgcctcgttcaaggttcggtgagcacccttgagcccataggattgcattcatgcatttcattcacttagaattgagcaccaactcaacatgcagtagcagcctaagcacagccgccgctcggactcgccgccggcgttactccgatgtccactgaccaagaaaagaagaggaatggaatcgcaatagcatgatcttcattttgtcttttggtcgcaccctcaaacgagccaccgtttgccgctggcaagcttgcatg

SEQ ID NO: 26150 - DNA, 1143 bp, Oryza sativa
agattttggccagataaatggttagggaacttgcttttcaagataagcatccatccttatatgctattatcagaaggaaaaattcttcaattgctagtgttatgggctctgttccgcttaatgtttcgttcaggagagcattggttggtcataatcttgtatcttggcatgatttgtgtgcttctattgtacatgttcagttgaatcaatcttttgattgttttatttggaaatttaatcagagtggacgattctcggttaggtcgatgcatctagccttgattaataatggcaacattgagagaaacaagataatttgaaagcttaagatgctgcttaagatcaagatctttatgtggtacttgcttaaagtggtagtgctaactaaagataatttgactaaacaaaattggaatgacagtttaagatgctgtttctgtatgaaaaatgagtctatttaacatctatttatgaattgtcatcatgcaaagtttatatagagagcagttcaattctcttttggtttataccttcctactagcatttctcatatttttgatgggtggctcttaggggtggacaagaaaaagagtaaacttctattggttggagcttctacaatatgttgggcgctgtggttgagcaggaatgatatggtttttaacaaatcatcatcttttacatatatgcagataattttcagagcaacatattggctctgattttgggcacaattataaaggtgtgatgaagacggagatcttctaaaggttgcatgtcgtaaacttgagacgacggttatacaactttttaccaactatggatggagattcacaaataggcttcaataaatgtgtactccttatcctattttggttattttacttcttaaattggtgtcctatttttttttttgaactttacttgttttagagtgttagtttgtaataattggttgtagctcttttgagcaaaggccgggatgatctattccattatctaaaaaaaatcctctttagttggatagttatcgggctctaactcatttggaatcaacagtagatttcgaatatgcatttgcatggaattaaaataaatacggtggataatattgttttggccaaagatccttgctatatatgt

SEQ ID NO: 26151 - DNA, 704 bp, Oryza sativa
attgaatcccaatttgtaaaattatgttgatttaaattattgcattatcgctttatttaaattcccgcgttatcactgttttatctagccatgcctatttacctttgttacgaccttattattattgtattgttagtatttcctttttcaccctagatcaaacaaaaccccaactagtggacactctactcatggtaccactagcatgattttaggtagatgcttcgctgtttaattaggtaacattaggtggttttacaactctagactttgggaatattcatatcacctggacactttggaactgttggattatcgtggaattggcttcacacctccccctctattcaaaatccccaaaatggttttaggctgggctcggggtgcatggttttgatagtagcacctcggccatataaggaccggtcttcgggcctctgttgcaaagcactaccgtacttccacatgtctagtgggtaaggcttagtttgtggctcagtctggttataaacaaaagtacacggatggaggtggatgaagtcgggggtcgatggacattctccagggcaaatgaaggctacacgagctgcggcccggtagtcgagatgtcatggcacaaggccggtgtcctcctgctaggggctcagtcctgcctgcctgtcccgggtgttccggccgtaggtgggattgggtcgggactcttg

SEQ ID NO: 26152 - DNA, 689 bp, Oryza sativa
ggggtggtagcggtacgccgtgtcgtgaaagatgtagttgtcgcgctcccgtagtctggccatcatcaagtaggctgcctcctgacaggcgtgatctgctgtgcctcctgacgcctcaactgccatgttagcgaggcaagtccccacgtagccatggacctccaagcggacacggtgaggaagctcgccactaagcggcggaatagtcgtgtactccggcgcgttggggtagcccaccaccagtgtcatgcgtgccagctctgccacaaagtcgatcatgccttctccgcggtggttgggtgggtggccagccatctagagaagacaaaggagtaggatcaatgcatgctcaaatccaaatttaaataaggcaataaaagactcaaataagggaaacgaataagagcgaaatttttatgcatagatcattttgcatgagagcgaataaacaagacagacccacataacgataaaataatgagaaattagatatatactaataataacaaataaagcataaataccttgcaacccatgttcctgagataggacctaatgcatttcacccatcaaaccccaactgactgacgaataaatcccaatagttttactaaaaccctagactgacccgttttgaaaaaactcacttaacgagcgaccaagattttttcccttgaaccacaaaaaca

SEQ ID NO: 26153 - DNA, 919 bp, Oryza sativa
acatggcacctaaatcaaaacaaataatataaaaccttatgagctccacataatagtgaaaacaacattttcttcctcctttactctcctctcttccccatctctatccaaatctccagtgtgcgaccaagagaaaggcgaccgacagggagaagggtgcatgacaaccaacagagaggagctgggtggcagcagccgtgtcaccaagctcgacccgcagggaggtccagggatctcctctctcgcctcaccgccacgggcctcctccgctcccgccgcccgtcctccgtggagtcaccatctactacatttttgtgaggaggcaggaggcatgcacagtgtcaccgtccttactctgtatccctgacgctgccatgacctaatcgaaccagccctggtcgaacctctcccatgtccacttggggtaccactcctggctctccatcgggtgctaggtctcgaggtcgcaccaccactcgaggatctcgaacaccaacatgctgaatagctgaagctgtacacgttgcacttatgtgtcactggcaacaatagctacagctctagcgccacgtagccccgcgtgccccgcacgccggtcatcgtcaggtgggtattgtcacggttgcagagcttggcaagccttgatgttagcaccctttgctccaattcaaatagcaaacatatatgcttcaacactcaaatatttggaggaacaaaagaagaaatgggggatacaagttgctagtaacacaggaaggaggaggaggaggaagaagagaagtagatcaacgagggatgcccaccggccgcccaggtcaccgccgccgccgtgagcctcagctcgccaaattgatcaatcgatgcccccatgttttctgttgctgctcatatatgctggtagtggtgcttgcttgggcct

SEQ ID NO: 26154 - DNA, 732 bp, Oryza sativa
aaaaagacttgcgttacatcattggcaaggacaaaaggttcgtccgagtatccaaccttgttaaggtcaacagttgtcatcccactgtcatcaatcattacgcctccaccagtcaacctaacccattggcaccggaacagaggaaccttgagaggaccatagtcaagttcccatatgtcctcgatggcaccgtaatacgtggcagttgttccatcgtgtcccatggcatcgacacgaacagcgctgttttggttcgtgctcttcatgtcttgggctctcgtgtagaatgtgtacccattgatctcatatccctggaatgtcgcgatcgacccagacggtcccctcgccaggaaggcaagttgttggttgatcgactcgttacccatgagatgttgtcgtagccacgcggggaaagtatcaatgtgatgccgtgtaatccatacatcggacttaccgatgttcctggcgcgaactagagccaagtgctcctcgatgtaaggagctaccaatgaagagtgttgcagaacagtgaaatgggctttacggaataaattgttgtctaccgtcataattgctttccttccgagagttccctttccccgtagtctcccttcatggcgtgattccggtaccccgattgggcgaaggtcttcgataaattctacgcaaaattcgatgacctcctctgttccataacccttggcgatgcttgcctctggacgagcacggtta

SEQ ID NO: 26155 - DNA, 697 bp, Oryza sativa
gtagagcaaggtttccgagaaaatgattgctgccatcagggcaatcaccgtcatcctcaagggtgcatcatctccaacaccaatggcaccaccccttccagtgcacaccaactgtttgatggaatgccccaatgatagtagctcgagcacaatatcgagatccatctacatcaacgaggggactgctccgactgtcatcctggagcatgaggatggtgagggcaaggatcacatgcccttcattgtcatcaaggaccttcctgagttcacgcccactatgtgttcgatgatatgttctagctccgacaccaagcctgatctcactgtggctgttgtggttacttgtgccacttctgtggagtcatcaatggagatggtagctactggcagcaccaccgacgacacccacatcgacacccttgatagtaccaaggtgatgcccgccagctgttcgacggttggccttgatgtcaagggtggcgcagaccataccagggtcacgtgtcggaccatgatgggtgtgcccgagggcgttctagtacctgatgcatcatccaaagtcttctcgccatggttgatggctgaaatggatcttattccattgctgcccactgggtgttcgatgaaatgtcccaaagacaagaagctgctaatggggaatgctaagagaaattcatggccaccggttgggtggagt

SEQ ID NO: 26156 - DNA, 1187 bp, Oryza sativa
aaaatgaaagtgacaagtcagatccccttatcaatgaaaagaaagaaaagaggcataagtacttgatgctgcttgcaattcttgctgcatccattgcttaccaagctggtctgaacccacccgggggtttctggtcagaggacagtcgtgatggctacaaggctggcaacccgctccttaaggacatacactccagacgctatatggtgttctatgtttctaattccatctctttcatggcatctattgctgtaatcatgcttctgctgagtaaatctgtgagaaagaataaggttccactccaagcattgttgttgatcatgatactagacctgttggctctgatgacagcttatgcagctggaagctgcagaaaggtcagacatcaatatttgtcttcttggtagtatgcggggtggtgctataccttatgattgtaattattttattgagtggtatcgcaaaatggctgaaagaaaggaaaggtaggtggcctctgtgctggagaataacaaggagtaacaaaataacaaggagctgagcagattgttggaacaatgttttcaaattccttgatcatttggttcaagaaatcaaaaggacagtaataggtggaggtagactgtgtcttgtatcacatataagttctcttaagtcattttgaatagttcagtgtgcttgtcatttcgttttagttgtttcccaagtttggctagggggcagtagtcgcacatgttctcaattgtctgccccattcttttacttcttaatgctatgatgtgcgaacgtcttgcaggttgttgaaaaaaaaaactcctttttgccactgttgtgatgtctttgtattttagatgaaaatcatgtctttggtttttgttcaggactacaggatatgatgttctttgttgctgaacaaaatattcaacatttttcatttagggagataagattccagacgcagcagccttttttattcttctccttggttgaatatgattagaattttgatcatgtttagttgtatgtaactgattggtttcatgaggagatgaataatgcttgaaacatgcgaattttcttttcgttcgttataatacaggtggctgttcacatgaaaatgaattggacagttttgcatgaataggtttggggaaacatctcgttggttttatctcaggattgggtta

SEQ ID NO: 26157 - DNA, 15359 bp, Oryza sativa
ccttggttgaatatgattagaattttgatcatgtttagttgtatgtaactgattggtttcatgaggagatgaataatgcttgaaacatgcgaattttcttttcgttcgttataatacaggtggctgttcacatgaaaatgaattggacagttttgcatgaataggtttggggaaacatctcgttggttttatctcaggattgggttaagtcgtattttggtccttgaaatcttcttgaagtccacttttcacccttaactaaaaacaccatttgttgttgaccctcaacggttaacattcaaaaccgggtaaatcacaccctaaaccatattccaaggtggctttgattggcatgatagtaagcatgtacaccaattaagtttcatttcattgatgtgaacttatctaagtgtcatctatgtctggaaaatatgtataataggagttggcacttgtgaaaaccacctttgttttaaacaaaaccactataaaataggccttaaggtggtgtttgtccagttttgaaacttgaggctgaaaaacaactggtcttttagttgagatcgaaaaatgaattttgagaagggttcaaaagacaaaatggaattttcccgccaagatttctccatccattttgacacccccaatagaaaaggcaactgatgtacatcttggggagaatggcatcaccaggttctgcaatttgtgataacaaaatcttcactagttcccttctattccagttgatattaagctttggttatttagtgctatatatatattgctgccagtcaagttgcattaagcttttgcatcgactatgtagttttatgcagagcatacatatgtggtactggcacatatcctgattcccttctttacctgtgatatttaagataaggaaagtgaaggaaaacgattgtagctgtgttgactttctgcacttctccaggtacttattttgtgactttgccgctatggttcactgatactgcgatacgcttttttttttctgtattcagaaccttatcaagttctgcaatcccaaacgcaagaggatctctgagggtagcaaaaagaaaaggaacatgggatggtatagatgcacataactcgcatcaggtaaatcatttttaattattaattcctgtcctagagaaaatcctgtgtctatctttgaattccctatcttttttttttttctaatttgtaacatgctgtttactcaggacatagcaaaatactgtaaatggtcctgttctcaaagaatgctgccctagtgttccgtgtgcactgtaagtaaagttactgcagtgctgagatattgaagagcttcaatggtaccatcactccatcagaaacagtaagaaactcttccatccatgtgacatgttctattattctgtaccctatgcattttgtcatatagggcctgttgtattcacaggatcgaattctttacgcgggtaatttgatataaaacattagaatgacctcatttggtgggggtgcctaaggggattgaattacttgtgtttatcaaaagggattgttagcccttcactcttggcagattctctctgggaacagagtttggcacaattagctacatggatagttagacattgacacaggctacaaaacaacagttcctactgaaatcatcgatgcaccccaatctttagctgttttgtcataataaagcatagtgttgggaataactagagtgaaactcgaatcaatagtgctaatctgagatagatttaagccacatgcacacctgatggcctaaaaatgtgggtggctgttaacaactgagtcagaataaagctctgatgatagcatcatgggtataaagtggcgactatgggagttagtagacttcactattttcctttacctttctttgatataaaccttcatatgtagtcatatatcagggttgctgcatgttagatagaacacactgaaaatccaactcatcttgagttaaagctagagttcagcctggagtctggacacaatatttttcttttcttttctgtaatactagctctcacttcggttcatggaacatgttcctgcatcgacattcattgaatgaatgcaaaaggtcatactgatggttgctatagcaacacgagaatttgtataggcaatgtaccccagattctttataccaagcacgtttttcttttctaggtaaatttggatggacatattgaaattggaggcctctacaattgtactacctccttttcaagttataagactttctagcattgcctacattcatatagatatacatgtctagattcattaacatatatatgaatgtgaacaatgctagaaagtcttataatatgaaacggagaaagtagcattaccctaaagaaagctttttacccccaaagctttgaaggtccccacaataatctttctttcactcatatcccaaagccaaactctgtggtcacgtggctgttttactcttctctcaaagtaatcttcacagaatcacagccccatatggttacaagcaaaacgagtcaatctcacatgcagacgccaaagcgtatactgctaatcttcagacagcaatgacaagtagattcagcgaaaatgggaatatcttttagtaactgatactgattcagatatatcaaatatggcaggcatgattttcgagagagggcataagctggagatcaagaggatgcatgtatatgaagatctgtgtaagaataagatgatgggccatagacccttacactcgaactgctggaggctccctgcatttgccgtccatgattgtgatgtccaaccttctgcatggcaaattggtgagcgattctgaggatcaatctggtccaacttactggaccgtcgcttgtcgggaggcatcttgcgtatctttttttttttttgaaaggaatcagcacgagattgtgctatttcattagatataggcgtaaaaaaatacaacccctaggggcaaaaaaaagagctgtacaaaattacataagcgctatgattaagttggtaggaattctccaagtcgccttgcgcctgccattatccaggttcttgcctcttcctttatttttgccataaggttgggggctgccgtttccttgtgctcgaagatcctttggttcctttctttccagatttcctaggctatgagtaggattaaggatcgcagccctttcttgggcacttcccttttgttggctagcatttcccaccattcgtgtacgctttggcatggctcccaattgctgataagccacccagttggccgtcagtctccagatccttctggtgtatctacaggaagctaaaaggtggcataccgtctcgttcgtcatacggcatagggggcacactccgctatttggccatcctcttgtagctagtcgatcggaagtccaaactctattttgaatcacaagccacgcataaaatttgcattttgcaggggcccaagatttccaaattaggggattgaagttggtgccgactgttcctagacactgagccttgtatgccgaagaggccgagtattctccatgattcgagagcttccagacgatgtgatccgactcattttggtttagcatgatgtcctgggttgcgctccatagggacacaagctggctgatcagctccagtgtaaaagtagtgttcccatttagctccaggtcatcgatgcaggtgtcattttcaatgccttcacgtagcgatttgcttcttttcttggaaatagcatagacgagcggcatgttgtcctttggtctttgcccgtccagccaggcggactcccaaaagtagatcgtgtttccatcccctattgttattttggtagctgcagcgaagagaagtttgtccgtttcatcacacggtgtctctagtcccacccacggcttggtggggtctttccattcatgccagagccatctcagtcgcaaggccctcgtaaacatctccatgttcagaacccctagtcctcctagtgcggttgggaggcacgtccttttccagttcaccttgcatttccctcctgtaatgtcccccgtccctacccagaggaattttcttctctttgcatctagaacgcccaaggcttccttagagatcttgagggcagtgagcaaatagataggctgcgcagtcagtaccgacttgactagagttgatcgccctgctggcctgatgttttttcccctccagccggtgacccggtttgctattttatcaaagatcggttggacgtccgtcttgcgcagccttccaagcagaagcggtagtcctaagtattttatggggaattgggcccgtaacgctgggacgccctcaagaatggagtctagatcaatgcttgcacatctgattgccgccacctgcgatttttgcatgtttgtgaccaatcctgtcgcacgtccaaaacgcacgagaatgtcggtgaaagcctggacatcctctctaacagggtttatgaaaaccactgcgtcatcagcgtacatggagattctaaggcgagccgctctgcctcttagcttggttatggcgtttagttccgttgctttggagaggatccattgtagggggtcaattgccaatatgaagtgaagcggtgatagcgggtccccttgtctgagtcctctgccatgtgctatcttttctcctggtatcccgttgagtagtacttgcgaggtggaggtagtgagtatggccgtcacccagtctctccatttctgcgggaacccatgatgttgcatcatggctaaaaggtaatcccaacgcaccgaatcgaaggctttggttatgtcaagcttgaagagaagcattggccgccttgttctatggtatcttcttgccaaatttctaacatagaggaagttgtcgtggatgctcctgcctttgatgaaggcgctttgattgactgtgacgagggttcgcatgtgtaatcgtagtcgcaaagccaaggttttggagaggatctttgctatactgtggattaggctaatgggcctgtagtccgtcacctcatccgcgccttccttttttggaatcaggacgatgttagctgagttcaggaggttcatgttcgcacatctcagattattaagcgattcgaagaccgccataatgtcccccttgataatgtcccagcaaactttaaagaagttccccgtgtagccatctggccctggtgccttgtcagctggcatctccttgattgcccgatgaatctcctgttccgtgaaaggatcgtccagatgcgagaggtccgtcgttggggcatgcaaggcttgccagttaatatcgcatgttctcggttctggcctactcatcatcctagaaaagtgttcgaagataacatcatctttgtcttggtggctcaccgcccagccacctccactgcgaagtctttggatgtaattctttcttcttcgagcattgactttgaggtggaaaaattttgtatttgcatctccctccttgatgtgcattacgcgggaagcttgcctcttccttgcgcgttcaagcgttgccagaccaagtaggcggcgtttaagtcctgctctcagccagtgctctagcgttgtgagctctctttgctcctgtgcggagtctagccgctgtatgacgtcaagcgccatgtggaattggattttcgcctcagtgcagattcccctggaccactctcgcagactttttccggtaatttgcagcttatgatttaaccgatgcatgggttctgtgtgagtcgtctgcttgctccaagccgccgcaacaacgtccttgaatcctggtatccttgtctaaaaattctcgaacttgaagggacgtggtttccgtggccctgaagtattggaaaggagtagcggacagtggtcagaagggcctgatggtagagcatttaggatgtgctgggggaaagctaggtcccaagcctcgttacaaaagcatcggtccagtttcaccatgatcggccgtcgcctctcattactccaagtgaactttctgttctgtaagtggatttcttttagctcacaatggtcaagggctaagcggaagcgggtcatacgcgcaaggttaatgttcccattgctcttgtctctagccctgtaaatcatgttgaaatctcccaggagcagccagctctctcccgagtatggcttgagtcttcttatatgccgaaggaaggcatcttttagacggtgccttgtaggcccatatactccggttagcatgaaggtagtgtttgattggatgactttgacatctgctgagatagagaagcgaccgtctcggacgttttgcacatttaatgtgtcactgtcccaaagtagcaggattcctccctttgtccctctagctggtttgaagtcgaagcgatccagtttgtatcctcctagaacctggcgagtgaatcatccatgttttggagtttcgtttcctgaaaacatgccatgttgcatttcgtgtccagcacgagctcatgcaccgtgttgcaccgcgcagcggaattcaacccccgcacattccagttagggagtacctatacatctttcgaaagatttttataatcgtatcacacagatttttaatctttgtattaaaatccgatagatataataaaaagcaaaaagcaattaagaaacaccataatgaacattaaattaccatatcctcaagaaaaagaccaaatcaaatacaaaatttaaaatttacatgtgaagattcaaaaattacagtgtaacttacaaaagttacagtgtaagtttcataaattacactgtaacttacaagaaaatgcactgtaaatttgagtgagaaaatcgagtgagagataagaaaaaatctttcgagtgagatatagcaaaatcgttccagttaactatttgcaagttttgtgacatttggaatgatggttgcctcactgattctgctcggcccaaacagccagagtttggtccagcttaaaagggcccaacttgctagaagtgatggccatgtggtttcccggcccaacccgcaaggcccatggggcacggtggcgcagtactcgtgtaagtgcgaaggtgggctttgtgttgggccggtggcattagaggaggagtaggaaggcttttttcctttttctagcggcccatgcactctgtcgtcgtagattttttggcgatgcactcggtcgtcgtcgttttggcgatcgctgaggccgttgatgccctgagtgcactgcctcgttaccacgctcttttcgtgattccgcgtcgtagaaatcacagttgaaaacgaagaatgtaggagattcaaatcaggcttatgccctggaaaataattcgtgctactccctccgtttcatattagaagtcgtttgatttttttcttagttaaatttctttaaggttgaccaaatttatagaaaaacataatagtatttttaacacaaaacaaacatattacgaaaatatattcaatgttaaattaaatgacactaattttatatgagtaaatttcataaaactgtaattttagtgacaaaactatcaatttgctgcaacattagtggcatgtttcagtttgctgcaacaatagcttgagaaattatcataaaactgtaaattttacgttatatgctgttacaatacatataggtgacaactatagcagcatataatgtaaaagttatatgttgctacaatacatataggtgacaactatagtagcatataacgtaaaagttgcagttttctgaaacatactcattttatattttagatgttaaatttttctataaattttgtcaaacttaacaaaatttgactaggaaaaaagtcaaacgtcttataatatgaaacggagggagtataattcttgtatcttccactgcaggtgggcattcgcatcaacacacacctacaatcgtcaatcactcgtgtaagtcttagttcggtagtgagttttggtttggctactccctcttttaccactttaccatgagcatgtttttcaaactggtaaggtatatttttaataatttttataagtttctttaaaatattaaataaacccatatttcaagtttataataattattaataccgaattaagtatgccgcagaaaatctccatcaaagcaaattccgaactcagccttagactcatttttttttactagaaagactaccagggctttgtctagtagtatattttcattgaaaaaagaaactatatatgtacaaagaaaaccaaagttacaagggccaaaaaaggattataaaggttgtaaccaatcaaaaaactaattgctctaaaggctccttcattctgcacatatgcagaagaatttcattcttgaagaggcttctccatgactgaaaaagagggcacaacattctgaaagataaacctatttctctgtttccagatgtgccaagaggcaataaaaaaaatttccaagaaacccattctggcaaagttcaaccttgatagaacaatcatttgaaagaactccatgtgctgattccaagtgatacccagatgtcgccaacatctaacactgaaagggcgggtgaagaagagatgaagcccggtttctctttgacccccattacacaggacacaagttaaatcagcattctcctttgcacaatgccttctgtcaagcatatccgtggtatttagcatgtcactgaaaagaagccaagcaaacaccttaattttcataacacactttgacttccatagccaaatatagggtcttgggggctgaaggggcataaaattgagcttgtaaaatctcttagaattgtatgtacccgaattccaaataaagctccagctatctccttgtcctggctacaaatgcaaaagactgagctcttcttccatcaataggaattcttcataggcctgcactgacagaggaagaagaaaagaatcttccagtggtcttgagcacatgcctaagactcatttttgtgtgggcttcctaatttttatatgggaaattggttaattagtatatttttttcaatatgctctattgttacactgataataatacatatggtaaatactccgacggaccaccgtaaaatactacttcctcggtttcacgacgtaagacttcctagcgttatctacattcatgctatgaatctatttgaatgtggacaatgtcgtagacaatgctagtgcctactaggaagtgttatagtgtgaaacggaggaagtattagttatatacacatgttttcattatttttaagaacttggctctgcttttactgaattctattctttttgcctttttggaaagtagtaagtatttcagtttatacattagtgctccaaaattctttttaaccaaaatttcgatgcggaaaatggctacttcgtcccttctttctccttccttgtcccttgtactgatcttaaaatgatggtgtaaattttacatatatggtgtcggacattattcctgcattgatggctgctgatatgggccatcggagtgcactgatagcgaatacggaacttctatctgacctgcccacatttatggatacaataactctgcacgtttgaattttgaattttttaggcgaagtttgatctctgcatttttcagatttttttggactcgtttgaatcttggcatcgtttgagcagctagtacgtacgttggcttccgtgcatcagagatgagaatccaagccataaagaagccatgaatgctcctgaatgagagagaactgtgctggagtacttcatccataggagtacggccaaaatagggttcaaaagattcgagaaaagacagcaaattttttacgtttagcctgctaaatcctgaccatgtccggacaaatttatcccggcagtatttacacagagcttcttttggctcattagctgtgctttacttaggtggtgtttggatccagagacttaactttagtccctctatttaaacactaatttagagtattaaatatagactacttacaaaactaattacataaataaaaactaattcacgtgacaaattttttaaggctaattaatccataattagagaatgtttactgtagcatcacataggctaatcatggattaattaggctcaatagatccgtctcgcgaattagtccaagattatggatgggttttattaatagtctacgtttaatatttataattaattttcaaacatccgatgtgatagggacttaaaagttttagtcccatctaaacagggccttaggcccctcacagtggcttagtcatgccacgtaggttttttgccgccgtggagggagggaccgcgccttagctaggttcgtcgtcccctaccttagcgacgcaaagcctcgccaaaacgagggcgcgcagcgaggagaaaaggcgggtcacgcacgctgtgggcggcgcagcctcgtgctcgcgtggcctagcgcccaaaatcccctcacgcggcagcaaaattcctgattcaccctcccaaaatcccctcccgccacaacattctttctcccgccacagatcggattgatagataagcaataaaatcttgaagattggaagagaagaacagatcggattcaacaagatgaaaacgaaaacgaaagcaaaatcatcacaacaagattcaacagatcggactcctcctgcaacaccacccccgcctgctccgattccgacgacgaggaggacgacggcgaggtggggagcgacgctgatggcggaggacttgccgctccccccgccggcaagaacccccccccgctcgacaagaaccccgcgccgctcgccgggactcctcccctcctcctcgccgccgccaagaacccgccgccaagaactcgccgccgctcgccaagaaccggcacgggagacatggaggtgaggaggcacagcagcacgggaggcgaggaggaccagctcaccggtgctccagatccggccgccgccgccaagaaccgcctaccgcccgccaagaaccggcacgggaggtggcgaggtcagccgttggcgtcgaactagacgaggccagccgccgccgacggagtccgtcccgctcgaggtcgccgcggccggagagatgccgagctccaccgccaacaccgccgcggataagctacggcggcggtggacggagacgacgcgggagggtgccttggccgccgctgcttgaggtcgccgcggtggaggaggcgcggcgaggcgcgcgtgagacggtgcggtcgacggggaggaggcagcgaggtcgacggggaggaggcggcgctgtcgaggagaaggaggcgaagaggcgtgggagggaggagaagaaggggcggcgcggctgagagaaagagaagggtaggtgaggaattaaatttccttcacctgctagtgccccatgtgctagggtatgcccactgtagactttgtatccttcaacagtagcttcatctcgttaggtcactcaaaagaagatacctgcactgtaggcttgagtgtctttaggtcacttttttaggctaagcccccttattgcgtgtcttgcactgtgagaggccttattgataccggaagttttaactttttacccaaagcttcaaatagaatgtacaagcactgcaactaacccggaatcgtctgcaaatactcacaaatatttgcatctgaaaacagttacagtgactgtacaactattgatactggagagtcgtgtacgttgcacaaccgtcatatacattattgtatcgttccaactaattggttgagccgtaccgttccaactagaaaaatgacgtttcatatactccattgaattaggcgtctacttgatttgtctcaaataatcgtggaaatttttaagtggggtcagcataatttacacacatggctttcccaccatttttggggcctttattccaacaaaatagggaatgatattctattatgagatgtttacatcataaaatactagtatcaattacttgatttttttaagataatgaaattactctatcttaaatctgtagtttcatatcaattcaatgtgaactactatgtagttttagttttgtaatatggtgccttaagtatgtagtctttcaatttctaatactcaatcttaaatatgtaattatgtgataagtttatagctaaatctgtaattatgtgttatatcgtcaagtttgtagttttgtgataatttaatagaaataatctacaattttacaatatttactcaaaattttctaatgcttcccctttttctcggtaagatctaatccaaccttacgagtgaaaggaaatcattttaaaaagaaataaaaaagcatgaagtgcttactattatcagaaagaactagaatagtatttatactcctttaaaaataccaatgatattggtgaatggtaaatctgccaccactcactaccaatactatgtaagtctccccaaatagtgagataggtggacttttatcactttctcaacctcaacccaataaacaagaaaattttcttttgaagtgaggaaaaatgatgacaaataatatgatctgaagattttacaataagaataattttagtttttaggctttagagtgtacggcggggttctcctttttaaatgccattgcaacacaagagcattcaactagtttatgttaaagaaaggagatcaaaagaagagaaggttcagtaaaaacaaataatatatgcaactactatatacatatatgtaacaagtacttattgtcatgaattttacctgattataggtatttcttttaaccgaaccgacaacacaatgtgctaatttcattgaatatagtatgagaaaaatatatatatcaatatttaagagaaaaaaattataccggccggggttgtgaacactacggtaaaaaagctctgagaggtgtcttgcttcaccagttcagctcgggtccaggttctagcccatttagggccatttttctttggtgccaattcttcccctactaatcctttggtagttttgaataatgcatgttagcattttggattgaagccaatttttgccaaatcaatagagtggagctaaatctatactattaaaaatttggtagtgtcaaaatttgctcaaggtttgatactaccaatattttggtagattttcgaaccaaacatgcccttatttttgctcccaaggttaaagtggatagtttcttgtatggaagcagggcggccatgtcattcggggggacaaatccgcgaggagatcacatcaaggccctccacatcaaccaccaaatatactaggcagaatcattgcgatcttagaacgaatccacatcaaatgccagtgaaaagatcagttctttctcatccactgatctctcgtagtcgtagtggtagcagcgtaggagtagtatttccatttcgatcccttctcttgtagattcaggcgtgtttaattttaggggtgaaaagttttggcttgtcggatatacgaacatacatttgaagcgttaaacgtagactactaacaaaacaaattaaagattctacctgtaaactgcgagacgaatttattaagccctaattgatccgtcattagcaattgtatactgtagcaccatattgtcaaattatggagcaattaggcttaaaagattcgtctcgcaatttacacgcaatcggttgtaattagtttttttcctatatttaatactctatgtatgtgtccaaacattcagtgtgacagggtgaaaagtttttgcgtgggaactaatcagggcctcagtctcttcttgtttcgtgttgtttatttctctgctgtttttcttgggatgtgattttggctctgtttagattccaccttataatttttcaccttatcatatcaaacggttgaacaactgcatgaagtattaaatatagacttaaaaaataactaattgcacaaattgtgactaatttacgagactaatcttttaagcttaattgtttcatgatttgacaatgtagtgctacaataaacatttactaatgatggattatttatgcttaataaattcgtctcgcggttcactgatggattctataattagtttttctattagcgtccgaacactctatacgacaccctatataacacccgatatgacacgccaaaactttacgcgcctgatctatacacccccttagcctctctgcaaatttgcctttttccctttctttctttttatgttttgtccgatgaacgcgaggttccatggctgcgtctgcattcctgcagaaaaggatgaaaggaggcatcttgcttttggccgttcttggtggtattcttgctttcctctcggctttctgcgagaaagtttgcgttttgatgtgactggtggttgtataatatcagcagcagcagccattgcaatgacttgctgctctcaaactttggaagattataatttgatatttcagaaaatttttaaccaaatttggaaagttcatcacggggtatttcggtcattaggataaaattgtacaatagcactaatggagcctaactgaatgacgatggtatattatagaagttaaacaaaatacgatggcatattgtagaacttgacaaactcattgatacattaatataatatagaatatggccaaaatcagtggcatacaacaaattctctactccctccgtactataatataaaataaaagattttaggtgaatgtgttatattatgggatggagggcgtatttcttatggttgttcactaaactacccatctactatggtgccacatttttttaaaaaagataaatcttatactataagtccatatcttacatattaaattacatacacttaaaatattttagataaatatagaaaaaagatttatttatccatttaattatgggaaaaaatattagtctaaattaacatatatgtaaaaactaatatgaaagaattagaaaaataccatataaatactgatacttatcatatatcatgcattgagaaaagaagaccataattgaatgtttttattgagcaaaatgatggtattatttttatctttttagttggatctatctaaccataattaatcaacctatattagcaaaagtctgtatcgtcattcaataacatatcataacattattagtaataattgagtagaccggcccacccacactgtgcagagacgataaaactgtagttggcttagcatagcatgagattatcggctaatggacaacccactttattaattgctctagagaaaaaaaataaattaccgtttgtacttatatcatcctttaaccattcttttcatttacactacag

SEQ ID NO: 26158 - DNA, 5800 bp, Oryza sativa
tgaggaatttatttggaagcactcaaatagaaaaggaaattaatagtattcctcaaaatatttttgggaatatggtaggaaaataggtggaggcaaaaggataggatttgaaccctaatatatatggcataggtttcaaggaattgtttgaggctaaaaggaaatttaggtgacaaggatataatttattttcttagcacgagagcaattattcacaatatttgtaataataatattcttgtgccgagaaagaaatcaagccacaggaattaaattagcggctagatcaaaatgaagaatttagatatttggcgataaataagaataggccggtttggaatcaaaggataggtttaagatcaaaggacgggtcgacaattgaatccaattggaatcatttggtttaagttataggataatagtggagaatttattggaccataattcataaaaaatagaaaggggttttcaaactaaatttgaataaaagaatttttgtcaaaagaaggttttaaaccaaatcaagaaatacctcaatttaaccaaatatatattttaaaatgaaaaacacaaaagagattaaatactatagaggttttgtgcgagttagttttaggaggtccctctaattatactgtcctaagtttaggaggttattaaaaacataagaatcggcatgatgcaggattagaaaatgacacattttcaggatgttacatttatgccgctggagcagatgacaatgcgttggcaaactatttaccaaccgcgttgaagggttctgcacgttcgtggctgatgtatctcccccctactcaatttcttcgtggtcagacctgtggcagcagttcgtcgccaatttccaaggaacatacaagcgtcatgcgatcgaagacgatcttcacgcgttaacacataactcaggggaatctttgagggaatacgttcggcgctttaacgagtgcaggaacaccatccccgagatcaccgacgcttatgtaattcgcgcctttaagtttggtgtcagagatcgctacactacccaggagttggcaacaagacgcatcacaactactcgaagactattcgagatcgtggaaaggtgtgcccacgtggatgatgcactaaggcgcaagaacgacaagccgaagactgggggagagaagaaatcagctgcagacacatctgagtcaaacaagaagaaaaatcgcaaaaacgggaaaaggaaagctcaagcggaagtcctcgcagcagaatacgcgaaccctcccaagcacccggacccacaaggaagcgaaacaaagaaatcttggtgccccatacacaaaacagatagacattctctggaggattgccttgttttcaaaaagtcgcccgagaagcacatggcgtttgaaaaaggcaagcgagtacgcgttgtcgagaaaaacgaggagtcacctcctcacgaatcggacttcgcgtacccagactccgacctccatgtttcacacatcttcggcggctccatgacgtactcctccaagcgagaatacaagaaagtggaacgcgaagtttgttcgacatggcagggggctgcacccaggatgaagtggtctgagcagaagatggagttctcggaagcagaccatcccaaaacctcggttatcccgggacggtatccgatcgtggtcgaacccactattcggaacatcaaggtagcacgagttctcatcgacgggggcagctcgatcaaccttctttttgccaccactttggatgcaatgggaattccacaaagtgagctgacaccaactgatcaacccttccatggaattactccccaatcatcatccagacctttgggcaagattacgctgcctgtgacctttggccaagccaacaacttccgaacagagcagatcaccttcgatgtcgctgaattcgatacagcttacaacgccatcatcgggagaactgcacttgcgaagttcatggccgcatcccactacgcatatcaagtgctcaagatgccgggaccgaagggaacaatcactattcaagggaacgcaaagctggcggtgcagtgcaacaagcgaagcctcgacatggtcgagcaaacgcccactccacccgccatgtctgagccacccaagaaagtgagcaagccaaacaagacgccgaagccggacggcgccatcaagatcgttccgctctctagtgctaaccccgacaagactgtcaaaatcggggctacactagacgagaaataggaactcgcgctcatcgccttcctccgcgacaatgccgacgtgttcgcttggcaaccgtccgacatgccgggggtccccagggaggtgattgagcacaaactaatggtgcgacccgataccaagccagtaaaacaaagactgcggagatttgcaccagatcgaaaacaagccatacgagaagagctcgacaaacttctcaaagctggcttcatcagagaagtcctccatccagagtggctcgtcaacccagttatggtgcggaaagccaatggaaaatggagaatgtgcgtcgacttcacagacctcaacaaggcgtgccccaaggatcactttcctctccctcgaatagaccaactggtggattcgacacccggatgcgaactattaagcttcctcgacgcttactctggctacgaccaaattagcatggcgaaggaggacgaggaaaaaacaacgttcatcacactgttcggggtattttgctacgtcaagatgcccttcggattgataacagttgggaatactttccaacgcacggtccagggcgcacttagcaatcagcttggcaacaatgtcgaagcgtacgtcgacgacatcgttgtcaaaaccaagacaagcgactcattgattgatgacctccgggaaacgttcgacaacctccgacgatatcgcctcatgctcaatccagagaagtgcatgttcggagtaccgtcgggcaagctactcggattccttgtttctggcagaggaatagaggcaaatcccgagaagatcaaagcaatcgagaacatgaagtcgcccacaagactcaaggaggtacagaagctaaccggatgcatggcagcattaagcagattcgtcgctaggatggtagaacgaggacaaccttttttcgccttattgaagaaacaagacaaatttgtatggacacaggaagccgaagaggcatttattgcactcaagcgctacctatcaaacccccctgtactcgttgctccccaacctaatgaagaattattcctttatattgccgctacgccacactccgttagcactgtcattgtcgtcgagcgagagaaagtacagcgaccagtctattacgtcagcgaagctctccatgacgcaaagacaagatacccacagattcaaaaactgctctacatagtcattatgacatcaaggaagctacgccactacttccaagcccacagggtcacaattgtttcctccttccctcttggcgaagttgtcagaaacaaagacgttgtcggccgcatcgcgaaatgggtagtcgagctaagccaatttgatgtccacttcgtgccgcgaacagccattaaatctcaggtactcgccgatttcgtggccgattggaccatgccagataacaagtcagataaccaaggcgacaatgagacatggacaatggcgttcgatggtgcactcaatagccaaggagcaggcgctggatttatcttaacatctccatccggagatcaattcaaacacgcaatccaccttaacttcagagcaacgaataacactgcagaatacgaaggactacttgccgggatacgagatgcagccgcacttggcgccaagcgactaatcgtcaaaggggactctgagctagtcgcaaaccaggtgcacaaagactataaatgctctaaccccgagttatccaagtaccttgcagaagtcaggaagctcgagaagaggttcgacgggatcgaggtccgacacgtctatcgcaaggacaacgtcgagccagacgacctagcccgacgcgcatccagacgagaaccgctcgagcccagcacctttctcgacatcctgacaaaaccttcggtaaaagaagtaagcggcgaagttggcccaagcaccctcgacatcagctcggaggtcatcgcggcagaacgcgccgtggctgacattgaaacaacggatgactggcgcaccccattaatcaaattcatcagcagcgaggagttacccgaagacgacacagaggccgagaaaataacccgtaaagcaaaaatctactgtatgatcggcaacgacttatacaaaaaagcgccaaacaggatacttctcaaatgcgtctctaccgacgacggcagacaactcctcctcgacatacacgaaggcatatgtgggtcccacgccgccggtcggacattggtcgggaaagcctttcgacaagggttttctagccaacagccctcaaagatgcatgcgacatggtccagcgatgtgaagcctgtcaattccacagcaaacacacaaagctacctgcacaagcgcttcaaacaatccctctgatttggccgttctcgtgctgggggctagaaaaacttggcccattcccacgaggacaaggcggctacaaattcctatttgtagcgatcgacaaattcaccaaatggatcgaagcagcacccactggagaaatcatggccgacaacgccatcaagttcatcagagggatattttgcagatacggactaccgcaccgcatcataaccgacaacggctcccaattcatcagcgccgatttccaagattactgcatcggcttaggagtcaaaatatgcttcgcctcggtctctcaccctcaaagcaatggacaagtcgaaagggcaaacgacatagtactagaagggataaaaacccgcgtctacgacagactcatgtcacatgacaaaaaatgggttgaagaactcccatcagtactatgggccgtgcgcactacaccgacaacgtccaataaggaaacactcttcttcctcgtgtacggctctgaagccatgctccccggtgagctacgacatcaaagtacacgagtacagaagcattccgacaagaagcaggatgaacagcgagacatctatgtaaaccttctcgaggagcatcgtgagcgagttgccgtgcgagcagcaagctaccaacaggccctccgccgttatcacgagaagcgcatccgagcacgcatactttcgatcggtgactacgtcctccgacgagttcaaacctaagcagggcgaaacaaactctcaccaaaatgggaaggaccctacatgatcacacaagccttgcggccaggcgcatacaaaatcgcagacggcgacggtcgcgaattagcaaattcatggaacattgaccaactacgtaaattctatgtatgagtcaataccattgtacctgtaagcacccttacagtatcaataaagactacttcttggtctcatataatgaccaaagtgttttcacccaacaactcctcactctgacgacgcctagcgttgaaacctgtccttatgtccgtttacaccgtctcgacaaggcctccgaggaacccaagggatcttcggctggagatgcccagagccgataaggccttgtcagatccttcagagacgaaagaccatgtaagatctggtcgtgtaagagttctcgccgtgcgtattaaccaaaccgtgtaatcggaaaccaatctttccaacttcacggctgggggctaggatcagagcttattcaaccaagacagg

SEQ ID NO: 26159 - DNA, 1658 bp, Oryza sativa
catttgttaaagatagatttctttattcacaaaatattccttacaatttgtacataaatattttgtcacattacatcttttcccaagatatcttgttgcagggtacgaatcctaccaagaaggccaacgccagtccattgattggaaaatcttctcggccaacggcgacatcgatctcgcgagatggtctatctccgccggatccctccgagaacgaccaaaaccttcgcggagaaattcaagatccatgcgtgggcagtgatctcgtatgcaagccagcacatgtcctccggcatatcggctcgctcgacaacactcttgcttcaaggcctcgtcgatacgcttaccaatgccatcgagttgggcgcaggcctcgttgagccacgagatgtacccggccgccgatttttcaggatcaccgcgggctacccgaagatcccgacacaccctctccatcgaggtgcaacaactcttcaagtaagatgagaaccacacctcgcggcctcggagcgtttccacagcttgatctttcttcacggccagcattgccctctcgagttccaccacttcaaattttgtcttccaatattggatacgacgatcttgggtcgcaagggaatcctcgagatctgctaaacataacgactactaagataactcggaaacccccaaaacagcatcaaggttgacaggatcactcactcgggccagttgctgtcacttcgacctccgcgtcaagagtttggtcctcgacgttatgcgatgcgtgcggttcaaactcgagtaccggaattattgccagcgactcaggctgcccgcgctgctggacatcctcatcatcggcatctctacaatcgacaagatagacttccgagatcaacggtgaacaaagatggcaatcatgcgcataagggtaaccagagtttaaaatttacgagtcagaaaaatacaagaggtcctactcttcaaagtgggggaggacagattcccccagatcactgacttcctccatcacctccttccgcgcgtcgcttgccgctccctgatccaagacctcacgcaggttgagctcaggacgcgacaacttcatgcaagcgaggatgtgacacgccccggtatagataccgttagacgactcctccgcgatcctggccgcgtgcttggagggaattttccccatcgccgtcgctagctccgcaagagaagaggtcaacgaaaactcgtcggggttcgccggaatcgtggacttgatgccacactcctcggcaagttggtggagaccggtgtaggtgacccgcaacgaacctcggatctcggagaggttatccccgagttccgacatgcggtcctcgagccctttgcgctagcgctcgttgccggccaccagctccctcatcttcgtgaagtcctcacgggcttcggccagttcccgcaccaagcgctcagcgcgcgcgttggccgccgccgtctccgccctagcttacgagacctcgcggccaatgccgcgagcaccggcctcgagaagacgccccatctcagcttggagctcctcccaggtgaggatagcctctggcagaccacggcctccagcgggatcgctggcagggccgctgggcgtcgcctcccgactcccgatcgcgggaatgatgtcggtagat

SEQ ID NO: 26160 - DNA, 9050 bp, Oryza sativa
tctacatgggtcttaggttaggaaattttttggttggtccggggtagatacacccatactttctatcctctaactccaaattactccctctatccataaaagttagacatatttcacatttgagttcttccaaataagttgttcctatttgtggtctttatgcattcatgacttaaatgatgagataaattaaatgtttgattagaacccaatgagtcatctaaatactcgttggttgcatgcttgcattcactacttgattttataacatccaagatgatttaatttctccttagttgtcacaccctgaaaattcaaaatatataaattgttgtttaattggaatttttagaaataattttaaaagtcttgaaaagaaaatctaattttaattaataaattccaatataaaatggggccagataaaatttcattaaatacttggcttaattctataattcctagatttttctgggatttatttgagctaaggaagtatttttaataaatgaaattgcatttaaggaataatttaaattgaaaaaggttttaaaaagtctcttttggctttgggccgaaagtcggcccaaaaccgctctctctctcctcggcccagttcggcccagtccgcagccgccgcgcgcgcgcgttcggtcgctgacaggtgggtcccacctgtcggacccatcgtctaccttcgtccgccgccgcccgaaaccctagcgcgccgccgccgccgttcctttccaaatccggccgttcctttccttctccggccgaattgtttgagggaaaacaatctccgggatctcctctaccttttctcctttggaatctttggctaaatcgttttggaagttcgtggaatcgagttcgtttcggatcggtttccctctctccaagccgagctttccttcgccgttgccgccgccatgggccttcgccgccgcctctgagcccctttaaaaggacccccggtgtctcctctacccgtcgccaccttcgccttcgcctctcgtcgtcggaaaagccctagcgccgtgtgccctagctttgccgtcgccgccgccgctccagccgtgcgccgccgtcgtttcagccgtcgccgtcgctcgggaagaccaccgtcgtgctcgccaagtcgtcgccgtcctcgtccgccccttcgccgtcgccagagatcgtcggagcttcgtcgccgtcgtcaagccgaagagcttcgccgcttcctcctcgtcgccgtcgccgtccgttgaccttccgccgtcgttttggtcgccggtgagttcgccgtgccgcccgcttcatcttggtgccctccgtttgcgtcctcgcgccgccgttcgccggcgagcgtgcgccgttcgagccgtctcctccaccgagccgccgccgctgtcggtgatgtcaccgctgacgtcatcggggtcgtccgccgtgagccgccgtggacccgatcgatctcggccgtccattttggattggttcgatctcggccgtccgttcgtgtgaaccgccgcccgtgcgcccggtccaccaaaccctagcccgctgacgcaataaaccctcttttccttttcaaaaataattcattattgcgtcataattcaatttaaaccgatataagtgttttaatccgatttaatctttaaaaattcataactaattcatcttagctccgatttagttggttcaagtctctaaatttttctaaaattgagatctacacattaaaaatatccacatgtactgttcatgcttgtttatgtgctgttttggtgattttgctcttttctgcttagattccgtcgtttccggagagtccgttttcgcagaagaagagtttgaagagttccaaggccagcaaggcaagtcacacagatcccaaacaaccctttgagcatgttgatcctatttaaagctattgtttctattcaactattgcatctattttcgaatgtcattgggtggaattgacctattctttgttatggcccttttgtacttgattaccttattccttgataccttgggttattacaatttgactagttgagctttatttatattggttcaactagatattagatataattgcttagccctgcttagaaacattagcacatttatgggataactaatgattcactattatttcatgatggcttaatgatagttcacgatggtcgatcgtgattagttaattaattaatgtgccaactaaaacctgataatggtgggttgtgagcacatggttttgatggtcgtgctcatgacaattaaggaccggttcacgagtttcggttgtgaaacatttatcgtgccaaccacaagccagcatgggcaacggctttatcttttgtatagcatggttcattgtggggcaccagactgagaagtggcggagataagcccacgggggtcgctggggagtccatgccttgtttataagggggtgattatgatccaggaaggtgcgctgcagtggattgtgttatgcgaggggtattgtcacaactcctttccgagataccgtggtggtattgaggcacatggtgacatgatgtggggttgtgtcttgtgggtacagtggtacacctctgatcagagtaaaactattcgaatagccgtgcccgcggttatgggcgggtctaacaatgtctttcgtgattagtctcacacctctcatcattgtaaaagatgcttaaactggtaataatttgtttagctcctggtttggaatggtatattcctggtttggagatagaactgtgcagccggggtggttgttcagaatggttgggcctatacaacagggtatgttgtatagcgttggattaatattgtttaattacttaactgttttatcaaattctcaaatgtttgctaaatgctgcttttgcaaatgcaaccctattatgccatcctttgttatcctgtgcacttgcatatttgctgcgtggcttgctgagtatgtcatatactcaccttgcaatcattcatcagaggaagagttctacaatgaggctgatggagtggaggaataggtgtagctttggtcaagctgcctgtggagtggagccgtctgcgccgtttatttattttccgctgcttagatccttattgattgagaggaactatctacctctgtaatgacattttattcgcttattaattagagtaataattgtactctattatcaatttgttattgtgtgcctcggctgattcctggacgagggttcacacacatttaagcgtttggaattttggatagaaattccgggcgtgacaagttggtatcagagccaggttgaccctaggttatgccaaatggttatccatagaagccctctaaaaatattggaaaagtagaactggtctcctccctttctcttttaattaaaccaaactaatggcacatgcacttcataatctcttttaatggttctcattaaaaatttattccagtgttattagtactgtacatctattactgtactaatggctcatttaccagcaaaagttttacaatactgttttatttaatcttgctgcaataaaataaatttagcatgttgattttataattttctttcatttcttttgaaaccagttattcaaaattacaaaatttgtgacctcgtttccaactgttttaacttatctcgcaaagcttggtttactttatttacttacctttttactctgattttctaactttattcaaattaatccaaaaacttgtgctattaattggataaaggtcttaactacctcctttcacttgtctttagatgccgcgttacaagcctgagtacctgtttggtgttgagggttttgtccaggagttgcgtacgatgtcctttgtcattggatttgggactgcccctttttatgcccagattcctcatgatcgtcatgaagagaagtgccgagtcaaagtcaccttgaacagtaatagtgaagatatcccctcagtgatgtttgaagctggaggaagaaactacatccatgcatgtcaggaggtggcaaggatcgccataggagagctccgtgatcgctacagtgatcaattggccgacactgagtatcgctaccatcctcgccaaccccagggaagtgaccgtggcagttaccttgagactgaaggaattgagaatgatgctaccacgaagcatttggttgagatgttgtgggctatggatgaaagtcgtgcggagactgtgttagccgctcaagatcgtgaagaccggaatcgtggtaagatttgcaagttagaagacaaggtggatcgtttggagaaggaattagccgcattgaagggagaagcaccgccgcagaaggccaggattcgtcttaccgcaaggaagagagctctatttgtccctcgctatcaactggcgccaaaggttcgtgtggtggagaaagaagttgccccagctcaagcggatcctccggtcatcatcataagtagtgatgaagaagaagaatccaagcgcaacaattccaagattgagtgggtagcaactcaggatgataaagacgagccttcaatcgacctccgatgcttggaagaactagagtgacttgttaagtcgttgtcttagatcgttgtgttagtttgcttgcttaaagtttgcttgtgtgtggctcgcatgtgatttacatcagtggtgggatgtaagtgcatgcgtttgtttgcttttgagtgttaggaagttggtgagtttagtggtgtgtgagtctttagtttgtaataatgaaactcagttaagatcaataaaagttaaagtaattctctgtcctaagtagtttccccggtttctcttcttgtgccctgcccatgccagatggtgaacactcgcagcaatgggaatggtcccaacaaccccaataacaacaacaatggagagaatcccactcttgctcaagttcttgctcaacagacacagcttatgaacatgatgatgcagcaatttcagaatcagcaaaaccaaggaaataatcatgcacctccacagaacaagttagcagaatttcttcgtgtgaggccgcctgttttctctagtaccactaatcctgttgaagctagtgattggctgcatgccatagagaagaagttggatttacttcagtgtactgatcaggagaaggtctcatttgcatcacatcagttgcatggccctgcctctgaatggtgggatcacttccgccttaacaggactactgctgaacctatcacttggcttgaattcaccgctgctttccggaagacgcatataccatcaggagtagtgtctctcaagaagaaggagttcaggtcgcttacccagggatctcgctctgttacggagtatctgcacgagttcaatcgtcttgctcgttatgctccggaagatgtgcgcaatgatgaagagcgccaggagaagtttttgggaggacttaatgatgagctttcttacccactcatggttggagattatcctgatttccagaaattagtggataaggctattcgtcaggaggacaagtacaatcgcatggagcagaagaaacgtcggattgctcaattcaagacacaacaggggaataatcagaagccgcgtcttactttaggaccccagcccatgccacagggaggttcttcgtctgttgttcgtccgcagcgtcatttcttcaacaacaatgctggcaacaacatccgtaatcaagctccacgtcctgttgcagctccagcacagcaacaacctgccaagagggagcaaggcagcaagcccgtggtgtgtttcaactgtggagatccaggacattatgctgacaagtgtccgaagccccgacgcgtgaaggttgtccctgcccagaataactctgctgtaccagcatccaaggctcgtgtaaatcatgtcgctgctgcagaagctcaagatgctccagatgtgattttgggtacgttccttgttaactcagttcctgcaacagtacttttcgattctggtgctacacattcattcttatctatgagttttgcgggaaatcatgggatggaagtagaagatcttagacgtcctttgatggttagtaccccaagtaatcaagcactctctttgcaacgtagcccctctgtcagaatagaaattcaaggagtaccatttctggccaatcttatcttgttagaatccaaagaccttgatgtcatcctagggatggactggttagccagacataaaggtgtgatagactgtgccaacaaaaaagtaactctcaccagctatgatggtcgagttgtaactgttcatgcattgtcatctgagtctttaaggtcaagactgaaccaaataactttggaagagattcctatagtccgggagtatcccgatgtgttcccagatgatttacctggtatgccgcctaaaagggatatagagttcacaatagatttggtacctggaacaactccgatccataagagaccttatcgaatggcagccaatgagttggcagaagttaagaggcaagtagatgatttgctacagaaaggatacatcagaccgagttcatcaccatggggagctccggttatttttgtggaaaagaaagaccatactcagagaatgtgtgtggactatcgtgcactaaacgatgtgactatcaagaataagtatccactacccaggattgatgatttgtttgatcagcttaaaggtgccactgttttctccatgatagatcttcgatcagggtatcatcagttgagaatcaaagaggaagatatacctaagacagcttttaccactaggtatgggttgttcgaatgtactgttatgtcttttggacttaccaatgcccctgctttcttcatgaacttgatgaataaggtgtttatggaatacctagacaagttcgtggtggtctttattgatgatattcttatctactctcggaccaaagaagagcatgaggaacatcttcgccttgcattggagaagctacgagaacatcaactgtatgctaagtttagcaagtgtgaattttggttgtctgaagtgaaattccttggtcacgtcatctcagccggaggagttgccgtcgatcctagtaacgtggaatccgtaaccaattggaagcaaccaaagacagtttcagagattcgcagtttcctaggcctcgcaggatattatcggaggtttatagagaatttttctaagattgctaagcccatgacacgactgcttcagaaagatgtgaagtacaagtggtcggaagaatgtgagcagagttttcaagagttgaaaagtcgcttaatatcagctcctattttgattttgcctgatccaaagaagggttttcaagtgtattgcgatgcatccaaacttgggttaggttgtgttctgatgcaagatgggaaggtggttgcctatgcctctcgacagttacgtccgcatgagaagaactaccctactcatgatattgagttagctgcagtcgttcatgcattgaagatttggcgtcattatcttttcggtactcgtacagaagtgtacaccgatcacaagagtttaaagtatatctttactcagccggatctgaacatgagacaacggagatggttggaattaattaaggattatgacatgggaattcattatcatccgggaaaggctaatgttgtagcagacgctcttagcagaaaaggctattgcaatgctacagaaggacgacagttgccattggaattatgcaaggaatttgaaagattaaatttgggaattgtcggtagaggtttcgttgcagccttagaagcgaagcccactctaattgatcaagttagagaagcccaaattaatgatcctgatattcaagagatcaagaagaatatgagaagaggaaaagctattggtttcttggaggatgagcaaggaactgtatggttgggtgagagaatttgtgtccccgacaacaaagatctaaaagatgcagttctgaaagaagctcatgatactttatactccattcaccctggtagtactaagatgtaccaggatctcaaggaaagattttggtgggcaagtatgaagcgtgaaatcgcggaatatgtagcagtatgtgatgtttgtcagcgagtcaaggcagaacatcagaaacccgccggtttgttgcagccattgaagattcctgaatggaaatgggaagaaataggtatggattttattactggtttacccagaacgtcatcaggccatgactctatttgggtgatagtcgacagacttaccaaagtggctcattttattccggtaaagacaacctattccggaagtcgcttggcggaattgtacatggcaaggattgtgtgtttgcatggcgtccctaagaagatagtgtctgatcgaggcagtcagtttacttcaaatttttggaagaaacttcaggaagagatgggttctaagctgaactttagtactgcttatcatccacagacagacggacaaaccgaaagggtgaatcagattttggaagacatgttgagagcttgtgctttagatttcggtggaagttgggataagaatctaccttatgcagaattttcatacaacaacagttatcaagctagtttacagatggctccttacgaagcactgtatggtcggaagtgccgcactccgcttttgtgggatcaaacgggagaacgtcaggttttcgggacggatatcctaagggaagcagaagaaaaggtaaaggtcattcaagaaagattgcgagtggctcagtctcgacataagagttatgccgacaatcgccgtagagatttgagttttgaagaaggagattatgtgtatcttcgtgtcacgcctcttcgaggagttcatcgttttcacaccaaaggaaaattggcaccgcgttatggggaccttataagattgtcagtagaagaggagaggttgcttatcagttagaattacctcaatctttggcaggagtccataatgtgttccatgtgtcgcaattgaagaagtgtttaagagtacctaccgaagaagctaatcttg

SEQ ID NO: 26161 - DNA, 568 bp, Oryza sativa
ttcttgaaaggaatatgcagctcacatggtgtccgctgactgatgtcatcaacgggacaggtccattcgtcctgtgtttgcatggcgtccatgctctgcgatcctacctgccccgttgaggcgcagctgctacggtttcctgacgggctcaccattgcaggaggaatggtcggctggggatcatgggaccgatgtgcggccatgcgttcatcaaccttccttgccacctcctcttgcatgttgagttcgtagctcgatacccggaactctaggtctgcaatcttcgcctcggtatctctcttgctcctcatccgactcctgtacgtgtggatgtcctccttgaaaccaatcttccaaggaatcacccctttccctcgtgttcgtcctggatgctctggagtctgcagggcgagtgtcagctcgtccctatctctgtcgggtcggaacgtgccctgagaggaggctcccactgcatctgttagtcgttgcgcaacctctcgtatctgaacgccgaataccagtgagccatcagctgggttgagcgttccaccgtgagcatagtaccaga

SEQ ID NO: 26162 - DNA, 974 bp, Oryza sativa
atacaagaaacatctgctaagtcacgagacatttatgttttaacaatctaagtcatgtatgctaagtgtaaatgtcgtacattagaaccctacacaaaccctacattagatatctttagtcccggttgttgagaacaaccgggagtaaatatcttttcccgctatttcgaaattctttttaaacccggttagggttaagaaccgggactaaagattatagcactgcatatgattttctcttacatatgtgtttataaaatagaagttaatgcattaacattatttaaagtactaaagattaatgacaattacttcgaaaaattatttttgtctgtaataaattaagtggataaatcgtaataagcaaatatatgacttataattaataaaaattccaatatatatatatatacttagcatatatatgaatgatattattatattggtaaaaactctaattaagatatgtatgtacatactgcatgatttaaaattaataaaaattgtaatcatcatatatacttagcgtaggaattatattaaattaaatgctaaaaactctaattaacatatgtaaatgccacatgcatgatttaaaccttttaaaaattcgaatagtcatatataagtagcatatgaaagatagtaaattaaattgtgaaaaactctaatatatgaatgatagttttaaaaatatattaaatttaatacttttaaaaattctccagtcaattataattagcatatgaatgatagtaaattaaatgttaaaaactctaattaacatataaaattgccacttgcgtgatttaaaacttttaaaaatacaatagtcaattataattagcatatgaatgctagtaaattaaatgttaaaaactctaattaacgtacatatgaaattgccacctgtgtgatttaaaacttttaaaaattgtaagtatcacatataactagcatatacatgatttgaa

SEQ ID NO: 26163 - DNA, 1585 bp, Oryza sativa
gtgcttattattcgcttgatattcgtggagtatccagacggtacctatatgctctccaagcattcaaacatactttccttctctgccttgataagagtgtagctggctggactcaagtaatggcttcctttctcctttggttccgggtgaaggtcgccgcgttgttccatatgcttcagatcattacgtgcttccagtgtatctttcgactttccgtatacacctaggaagccaagaaggtttacgcaaaggttcttagtgaggtgcatcacgtcgattgcgtggcgtacgtccaagaattcccaatatggtaactcccaaaatatagagttctttttccacatcgccgcgtgaccatcttcgctctctatatgctggcttccagggccctttccgaacactactttaagatctttaaccatagcaaacactgttttcccgctgcgatgtttaggcttcgtacggtggtcggccttatgttcgaagtgcttgcctttcttccgtaccgggtggtttgctgcaaggaatcgacgatgacccatgtatacaaccttcctacagtgcttaagatacgtactttctgtttcatccatacagtgagtgcaagccttgtaccccttgttggactgtccggataggttgctaagtgcaggccaatcgttgatggttacgaacagcagcgctcgtaggttaaactcctcctgtttgtcctcgtcccacacggggacaccttccttcttccacaactgtttaagatcctcgaccagtggtcttaggtacacgtcgatgtcgttaccaggttgcttggggccttgaataataatcggcatcattatgtacttcctcttcatgcatagccagggggggaggttgtagatacacatcgtaacgggccaagtgctatggccgctgctcatctctccaaaaggattcatgccatccgtactcaaaccaaaccgtatgtttcgtgcgtcctttccaaattctttaaattttctatcgatgtttcgccactgcgaaccatcggcggggtgtctcagcatcccgtcctgttgacgctcttcagcgtgccatcgcaacattctagcattccccttgttcctgaacaaacgccttagccgtggtattatagggaaataccacatcaccttagcaggaattctcttctttgttagctgcccgtcaacttctcctggatcgtcccgtctaatcttgtatcgtagtgctttgcaaacagggcatgcttctaggttctcgtactcctcaccgcgatataggatacaatcgttcggacatgcgtgaatcttatgaacttccagtcctaacgggcagactatcttcttagcctcgtacgttgtctcgggcaatttgtttccccccggaagaatgttcttgacgagtttcaataaatcgccaaatgccttgtcactaaccccattttttgccttccattgcaacaactccagagtggtatccaactttttgtgcccctgctcgcaacctgggtacaacgaagctctgtggccctccaacatgttgtccaatctatgggcctccttttcactttcgcagtcctccctggcgt

SEQ ID NO: 26164 - DNA, 2410 bp, Oryza sativa
atggcgcaggcggtacatcatcctccctgggcgacaagcggcgtctcgtgcaccatctcctccggctccgccatctcctcctcatgatcctgcaccgtctcctcctcatgctccgccagcaccgtctccacctcaggctccagcatcgactcctcctcaggatcctgcaccgactcctcctcgtgctcctacacctactcccccgcaagctcctcttccggcaccttcaaagtcaagggcccccccagctgcaccgcctgcccacacaagggcaacgaagaaggcgaaagttgacgccgacaagaacaaggacccggggtacgattgcacgcaagaggagcttgacgcttacgttgcatcagaagtcaagagacaattcaagcctcgaagtccagaaaagaagattcctatagaccccagtgtcaggaacttcttcaggggtatgtctgcatctgccaaggaggccatcaagctatcgaactatgagcgaacgctgaagaaagcatcttctggaaagtccaaaccagtccctcagcttggagagcaaccaaaacaggagatcgagccgttggttaccggtaaagaaatgacgatagaacaatttattactgacaccggtctaactacggatcaattgctaggagtcgcaccaatcgaaaaggcggaagtgaaatacatgtacgaactcggtaaaccgcttgtcaagcctgagctgctgcagtccctacccacacaaatgtacaaattccatcagctgtacatggagatgagcgccgccggtagagagatgatcggagcgaggatcagggacacggacttcttgcaaggagatgacattctctggatcaatttcaagggaatctacgaactataccagctggacgccctcgacgtctctattatgagttgctggattttgtaagtatatcgttcggttagatttcttactatacgtctcctttaataaattaggtccttgtatataagtagactatagaaaataatatactcccttttatcgttgtagaatggagattcaaagggcccgacggcggagggttttcgatactggattcatcgaccctcggagagtaaacgtcgcattgctcgaccaatatccacaagaaacagaggacaatctcgtccatctcctgaaggcgcagcattacaagacgttcatactgttgccatacaacacagagttagtttaattttactgtcttcctacataccaaatttcattcccgtacgaacttgctaagtgtttcatatgtaatgcatcccacgcacattgcagattccactgggtgcttttactcttcgacctggaggcctgcaccgtcaacgtatatgactcaatggataaaaaagagtctacgtttgacaaggttttcgaacttatagacaggtaccgtcataagttcctttgttaattaagaaaatcttgttatgttaattgctactacgaatcatagctttaaactccatgtagggcttggtatcggttccgtcatttggtccgcggcaaatggagagaaagacttaggcggaagttcaaatttcctgtgagtacacatgctctatatttatatttctccgattcaaatacatacaagtgtatattaattagatctctcgttgtttgtcatttatttgtagtgcgcaaagcaaaagcagggaaataacttgtgcggctattacgtgtgcgagtattgccactgccttgcaaaccaaatcatcaccacaagagagctcgatgtacgtacaaataaattcaaaatttcattacgtagcgatttcttgtttaattactaatcaatttcatacattcatatagtttattcgcatgagggataacctgaccacacacaaggaatttatcacggcggttcaagaacaactcatgggattcatcaacgaagaaatccttaatcccaagggtgaattctactacgacggaaacacaattcaccggtccttagcttctgagctagcagcgagtactactacgtcgaaatgatagctagctagctaggacatataatggattgtaattaatacatgactacatatgtttctatatgcatgtgtacacattttctataatgtaaatatattttggtcatatatatatatatctatatacatatgcattaatttgcataacatatatatgtgtataaatacatatatattatgcatgtatatacatataatataatataatatatatatatatacatatatatatatgtatgcatatatatgtattgaaacatatatatgcatggtttatatatatatatatatatatatatatatatataaactatatatatatataaaccatgcagcaacagggccatgcaaaaaaaaatggtcagctcgatctttagtcccggatatttac

SEQ ID NO: 26165 - DNA, 701 bp, Oryza sativa
ggacaaatttatcccggcagtatttacacagagcttcttttggctcattagctgtgctttacttaggtggtgtttacatccagggacttaacttaagtccctgtctttagacactaatttagagtattaaatatagactgcttacaaaactaattacataaataaaagctaattcacgtgacaaattttttaagcctaattaatctataattagagaatgtttactgtagcatcacataggctaatcatggattaattaggctcattagatccgtctcgcgaattagtccaagattatggatgggttttattaatagtctacgtttaatatttataattaattttcaaacatccgatgtgatagggacttaaaagttttagtcccatctaaacagggccttaggcccctcacagtggcttagtcatgccacgtaggttttttgccgccgtggagggagggaccgcgccttagctaggttcgtcgtcccctaccttagcgacgcaaagcctcgccaaaacgagggcgcgcagcgaggagaaaaggcgggtcacgcacgctgtgggcggcgcagcctcgtgctcgcgtggcctagcgcccaaaatcccctcacgcggcagcaaaattcctgattcaccctcccaaaatcccctcccgccacaacattctttctcccgccacagatcggattgatagataagca

SEQ ID NO: 26166 - DNA, 1013 bp, Oryza sativa
tcaaacaattcggccggagaaggaaaggaacggccggatttggaaaggaacggcggcggcggcgcgctagggtttcgggcggcggcggccgaaggtagacgatgggtccgacaggtgggacccacctgtcagcgaccgaacgcgcgcgcgcggcggctgcggactgggccgaactgggccgaggagagagagagcggttttgggccgactttcggcccaaagccaaaagagactttttaaaacctttttcaatttaaattattccttaaatgcaattccatttattaaaaatacttccttagctcaaataaatcccagaaaaatctaggaattatagaattaagccaagtatttaatgaaattttatctggccccattttatattggaatttattaattaaaattagattttcttttcaagacttttaaaattatttctaaaaattccaattaaacaacaatttatatattttgaattttcagggtgtgacaaacctaccccccttaaacagaatctcgtcctcgagattcggaagaactggcaaataggtgcggatgagctgacttcaattcatcttctcgttcccaagttgattcttcttccgagtgattactccattggagtttgcaaaaacggataactcgattcctggttcttctctcatttgtttccaagatacggattggtttctcaacataagtcaaatcctcttggacttctatctgttcaagattagcttcttcggtaggtactcttaaacacttcttcaattgcgacacatggaacacattatggactcctgccaaagattgaggtaattctaactgataagcaacctctcctcttctactgacaatcttataaggtcccacataacgcggtgccaattttcctttggtgtgaaaacgatgaactcctcgaagaggcgtgacacgaagatacacataatctccttcttcaaaactcaaatctctacggcgattgtcggcataactcttatgtcgagactgag

SEQ ID NO: 26167 - DNA, 1124 bp, Oryza sativa
cccaagccaatgaaagaaacctcttggatcccatggtacctttagtcctttaggctgcaaaaactttgcttccagcagataactaattgttgatataaaagctgcattccttggtaaaatctgaatttgctctgtgataagataaaaaaaaatgcatgtttgatagattgcagaggctctgaaatcaccatcttagtctgaaagcttgcccaatggttgccactgaaatcttcatcttgtttcttgactaccaaacgatttctagcctccacatcccaaattaagttggcagctattgatttaatcacctggagcatggaaattgattcacatatagagagcttgagtgtgcgcctatatccttgtgcaactcttctatggtacagtagagctgcagcattaaggaactgaagcagaaccccgccagagtccaaatgcacctccaagttccatgtcagatcaaaccgaaccattatgtctgaacactgggacaagcttaatgacttgatatgctcttgcttagtgaaggaaagggcatttggaatagagtgaacttgtagcttggatagcaatgacctcaaagatccatcatgaattaatgcttttgggttaatacacatcttcccaggacttgcaccttcaaatatacattgcagctctttgttgctcaactgtctttccttcataatacgagcaagttctttagatataatacgagcaagttccatagattggctattcatatgatgcccctgcattgcaagaccatagacctctcttccctccatcccccatgccaaagaacttactagacttggtggaggccatggtttcaacccagccatctcctgtgttaaaatcacggttccaatgactaaaactccaatatcaaaaggctcccatgccaggaagcttactccagccggtggtggccatgggggcatcaatggtaaaccttccaaatataatttggatcctggccaatgcaaaggttgcaactcccatcgtctaatcactccacccaaccaagaaggtggccatgaatttctcttagcattccccattagcagcttcttgtctttgggacatttcatcgaacacccagtgggcagcaatggaataag

SEQ ID NO: 26168 - DNA, 820 bp, Oryza sativa
ccgggactaaagatatctaatgtagggtttgtgtagggttctaatgtacgacatttacacttagcatacatgacttagattgttaaaacataaatgtctcgtgacttagcagatgtttcttgtatcaacagatggctgaccgcgatgaggaacagatattgtacgatacaatcgcggagggaagcagccagtactggaatgaagaagaggggaacgaggatccaaaccagtacttgaacgaggaagggaacgtggagagggatgcggaggggaaccagcaggggcacgtggaaagggatgtggaggggaaccaggaggaggaggctagtggtagtcaaccctccgttggacagaagagggcacgcgggcaacgaggtgcagcgaagaagcttgagggtcggcacatcataacggaagtggaagaagatggacgtcctagtgccccggccgaagccgccaagaactatgtacgtcacagcggttgggttgtgcgggataacgtgcctgtcagtacggtgtactggcgaagaacaagggcacgaggagatcatgagagctttgtcccagattcggagaaagagatgctgtggaccacaatgctcgagacattcacccttcctgcgggtacagaggacaaagtgaaaaggtggactctgaagaaaatggcagaacagtttcagagcttcaagggagatctgtacaagaagtatatactgaaggggcagacaccgaacttcgacacattcccaaagctaagggatcactgggacgagttcgttgcatataagacaggtgaacaagggcaggcgatgatggaaag

SEQ ID NO: 26169 - DNA, 5721 bp, Oryza sativa
caatatagattagatagatagtttaagtctatagcaaaacactagagttgagtcatcgtatagcttctactgtaatagttagccacaagtttgtaaataccctatcattttatgtaaaggaatctcctttaaaaccttgatcaaatgtatgcaatgaagatccagatcgttgaacctgtatcaatctactgatccaggtcttgatacagtctaaacatgtcggttttcgaatcattagttttgggacccgacaataaagcactgtcaagtagacttggaggaattcttctgggtcggtgctcccatcatacttttcaatagctccgggtcggaatctctcaggccatcggacatcacgtagggaacgaccgaaagccctgcacccagcgcttggagcggcgggttgtcggcggtcgcgtgaccttcgtggatcttggtctgacgatgaagaggactcggatgatgatgatgatgacgatgggtcgcttggttccggcgtacgattacgagggtgacgacctggatctcgggaatcttgtcttcgtctctcgctgttgtctcgacgccgatcttcttcatcttcgtcattacggcgacggccatgaccaatgctgtccggcccccgccggtcgcgatcgtcgtagtctcggtcctcgtttggacgacttcttcgatcatggtgtcgtgaggagacatgacgccgggagtggttcacgtcatcccgtgctcgccgtgcttctcgacgaccattgatttgatctcgaagatcgccagtaccacgaggtggaggggtagcttgtcgaggtgattctctccgttctagaatttcaccgttagcatcgccgacgggagatcggttttgttgggctgcggtggcggcttcttcgaacgcgttgctgaggttagtcaccgatgcccgtagttgttccgtccaacgctcgaggtcgtcgtttagaacaggatcgtaaggtgtttccctcagtatggcctaaacagccctgatgtgttgggctggggtagtcgattgattcgccgtctccgcgttggcttgtgctgacgtgccaacgccatcgatagccaacacctcccgcgccgcgtctgatatcgatgaccccaacgaatcgatctggggccggagtcgctccttgttccttgccgttatccctgacggggacgtatgacttaggagacggagttttcatagcgccgagtagaactttgcaactcgagaggtcgtgattctttgtcttatgaataggacaatagacgtcccgagttggagaagtacgttgaattccacgttctttgcaggcgcggatttcagcatggacgttgatgaatacccagcaatcttgaagagtatgtttcttggttttatggataggacaccaagacctggtagtttcggaagtcatctttgttggcccgtgattttcgtcggggggacaaggcttggccgcatcagaatccttcacgagtttgggtgtagtcggtaatccgttctctgtttcaacgggtggatttttcgacatgtaggcgtctcggttcgtagccactgcgttctcgttgccagttattgggggcccggttgagatcggcatagtggtgtaaaccgggtagacgatttcgccgacttgagtccataccagcattgttgaagtaggaagaacttcaccgaagctggtgttggcattgttgtcatcgaagcttcatggcatagtagtagaaccttgaataccaggcccccctacctggcgcgccactgtcgacgggggatacccgtagaccggatatagagggtattggggtacgctggtataaggatctacgtagtatgacatcgagcaattaaaagacaagaattatactggttcaggccccttgataggtaatagccctaatccagttgatatgggattatatggtggaaaacacagattacaaaggaaaagacggaactcaggggatttggcgagattgtagtcgagatgattcgactagctctcgtcgacttggctccttgcaggctccgacttcgtaggctgtgtggggtgtgttggctctgagattcgatgatctatgccctccccggggggtcccttttataccgtaggttgggtgctctccgagtaggactcgaacataccagacctggcacgatacgtaggtaacccaattcttgtccgaggaggtctctcttcgtccattgactttacgaagagtttccttagacgccaaaggatttatccatgcacatgtgaataggccttgtcaatatgtgacgtatgtcgaggggtagagggtatgcctgactcgtaaccctgatagtagcccccgacttttgctcaaaaatgaactcgcgcgactgtttgcgatttcaggtgtcgagaacgttgtcattccaggtgcgagaaccacgcagatgacgtgtagtcgagcacaccgtttgaagcccaacggtcacgagtgaattttgaactgaagtccaaaaaccgccatgcacaacggacctagaaatctccgacggagatttctcttatttccttggaattcgcaccgtcaggagtgcgcttatttaaagggattttgggtgtgagttttgaggtccgcctacttcaccaagcaaacactgctcattagtgctcctcgccttcttcgccaccgcaaagaaccctaacctcgccaatccttgtccgtctccggcgatcctccagcggcgatggatcttggcaagtcaacttccaccaccgcgaccctgaagaagctccaggaggagggcgccctccctggccgcgacaaggcggagagggaagcaggaggtactaatccacagcccctcttaggtcgcatggttgcgatcgaagattacattgtctgcggatttcttcctcccccctctgaattccttgtactagtcttgaatttctatgggctttcacttttgcacttgaatcccaactccattgctttccttagcgtttttgtgcatctttgtgaggcctacattggggtagagccctttctcgatctgtttcgcttctattatgagttgcgctggatgaaatccaataaggtgtctggctgtgtcgggttccgacttcgagatggtatgaagttgcgctatgtccccttccagtgtccctcttctcgcagcaaatggcggaacagatggttctatcttgaaatcaaagatttgaatcctgtcctcgttgttcctgaggagcaaccggacaagattccggtttggaccgccaagccccctttgaccccctctctgcaatcgtttatcgacatcatcgatgatctccgagaacggggcttatcgggatatgaagttgttgcagacttcgtcggtaggcggatccagccgctccaggctcgggcccacccggcatataactattccgggccagatgacgcgacccgggtttctcctcggggtatccttctcgtattcactttgatacatttgtattcacgttccatttgacttatcaagaattgattctttcttgacaggtctgagcagtgaagtcatggagcggtgcgctggtcaagtgatgatcagcgacccatcagcgacgagcaacattccaaaacccctctgcgataaggatgcggcggaacgcgatgaagcaatcaatgtgagtttatttgaatgtctttttccttccctgtttgaaatcagcttatgatcggacttagcgtagccccttcccttgactgacgtcgtcggaccactcgcggatcatcaagtggcggcttccctgaaggagaaggtcgtcgaggaggcgtccgacattgccaccggtagtggtggcaaggctccgaccaagccgaggaaattctcgtctgtgctcggacatcgccgcaaagcggagacttcctcggtaactttcaccttgtcattatgctaagtagtgaggaaggtttctgacgcgtctcctccacctgcgcgtcgtcaacgcattgtgacgatccgcgagaagtaagtcaggggacttttagattctcatgtcttctatttgagtggaattttgatctgctgaagctgatagggaggcgcgtgttggcaactttttgtgacaagtcgacaagcacgatcgcagcacctaaacgccttgcggtgatcctagagtcgccaaccacctcgatctagctaaagggccaaatcaagatgggttttgttgaaaaacagctaaaccagctagcagagccgatttagagataaaatcagcctctaggccaatttagatcaatatgaggataactacccgtctcgtgggcaaaacggaaggttttcaggacaaacctacaaagaggtgtcgcactcttgcagcggcggcggacggtttacggcgcaaaccgacaaagatggactaaactagggtaaaatagaaaacatagtaaaagaacgattcaagtagattgtattcgggggttttacaatgaaccggccttgtcccttatataggggttggtcttgccctctacaggcccttctccacgtccaactcgggatagaaactaaaggaaacacgaaacatgccttcccgagcaaggaaacccgagacccgacgaaaatagagtcggactcggaccctgacagtttgaccgcccacatacctgcggtcagaccggccctactagccggtcagaccgcccacatacctgtggtctgaccggccctagcgaaggaaacccggcactttccaaactttggcaatttttccctatttcgttcataggtgccaaatttggatgtaaacacatgcccccgtgcctttttggtgaacatacgtgaacctaaaagcatagaacatgttatctcagggcgataatccaattaccggccataggacttcctaagcatcttaccaaatgctcgggaagtatttcttcaagcatctcccattaattgctctctaaaaacaccgtcttgaagtgtcttcatctccttcaaagtcttcaaacacttgtcgatgacgtcttcaaaattgcttctcatcaaggtcttgtaatcttcaatcgacaagtcgtcttgcttaaaataccgaagaaagccaagatttatctcaactggcaaaacgccaatttcaacaatgttttattactcgattcggcttatccattagcccgagcgtagtagagggaaggactcaacaacttaatatcataaaattcggcaaaacttctcatctccttagacataaaagaagctcctttaatgtttgaggaataccgaatctatgaacgatatgcttcgaaataaagccaattacctccgtgtaattaatattttcgaacggcatggcttcggcctacttagtgaagtaatccgttacatctagcatgaaccgatgcccgtttgatgacgaaggataaatttgaccaatgaaatccaaagcccaacttcggaacggccatattttaatgataggattcaacacagcggtaggagctaattgaacattgccgatccgctaacaagctcactccctctatagaatttgaaacaatcataaattattttcggccaatgaaaccccactctcgtaagcaaccaatttatcttacgggccgattgatgaattccacaaatcccttcatgtactactctcctagcaactttagattgatcattatctaagtaatactccatctatttttcggcgatataatatttgaacgcttgccgccgaatcttccgatcaaccttaa

SEQ ID NO: 26170 - DNA, 2536 bp, Oryza sativa
atgcctgacccgtaaccctgacaaaatcgaagttcgaacggataagttaagacctcgagaagttcaaattcagagaaaatctaatgacagaaagaaaaggaatattccaggaatatcctatggatattaattctttaaattgaattatttttaataagaaaattatagtggggcccactgattagtggctcaggttttggtggactcggtgtatgatgggtcggctggcgtggatgcctcgtggtgacacgtgtatagagatagatgacatggcaatgacgtgggtggatctagggctgatgtgccgagggaaggagttatggtaatctgactctaaagatttaagcaaggagatcaaatggctgtatgttcctcatgtttgatacccttggaatactctaagggaaagtgctaccgcggtattctgtgcgcctcagatttatctgtgatcgtatcacataccaataattgcattatagcggaattatagctagatattactgttatattcatataaatttagcctaaattaattcactttcactaaattatggatagttaaaaagagataatgaatatagatttcgacttgtcacgatgtgttaaaacatattagaaattcaatataataatactttaagagatattgtggccgggagatttgctaagaagcaaacggagactggagaccatactgaaggacgcacatttcgttgaggtgattttctcatggaactgaacccccatatacctgaaatgctatattctattttgggtttttttttccttatatataccatttacccaaaatacaatattctattttggggttttttccttactagcaatagtgtctgtgcgttgcaacgggaaaaacaccgtttgatagtgtgacaccttgaaaacctcgaatctgtaaaaatcttgatatattaatcaattcgacggcccgcaagctgagcagttgagcgcggcccacatatgcggggacggtccgatgcacttccgcagcccattgggcgcagcgtaatcaacggcggcgacagcccgacgctaggcgaatctgagccgtccgatctaatggacggctccaatcgtacccgcgctggatgaagcgccgatcggggagaggggcaaaaccctggctcccaaatccctctctcctgataccatttatctccggagacgagcgagcaaaacgatggcggtccggcaagctggtgcgcgcgtgcagcgacgaccgccgagcggctcctgcttcgccggctgggggccgcacccgagggcagcgcaaagccatgccacgacgtcggcggtccggttaggtggtcgtgcaaacggcgacgagcgctgagcggcttggacctcgtcggtggtaggggcgacaccaagccgacacttcccgtcttcggcaaaggacggtggaggggtgctccaggacagcgtgcgcaggaaacccgacacgactgcgagaaggtgaaggtgcggtggtgccgcttcccagaaagctccagtgagctcaggggcttcaagtctggtaagtaacccgaacccttagcttaattgatttggatttgactcttatggttcttacccgaaattagggttgttcgaatttagagaattttgtcgggaaatttcaatctattttattccctcttttcgagttaggggtgtttcaatatcgtttattctcttttaatttcgggaacttcaatctagtttatccctttgctcaattttgtttttttagcttgcgtttcatcgcgcaagcggggatggagggcgccgctcgtccccacggaaagattgaatcggactttcttttatttgttttaatgtttttttggtcctttttttcgttattacggacaacagaaacatttttaattttttaagcagtagagatagagaagatagagatatatagtaccgtgtcaaatataataggattcgatttttttaccgcgtcacgtataattcttttttttttggaatcggacatatttgttttttttattttttttttctcctttctttttacagcgtccacacggattcttttttttttggccggtcttttttttcacctgttttttttttcgcctgtttttttagaatcggacagattcctttttttttctttttgccctttttttttactgcggaatcggattcagttttcttttccctttttccgcccgtttttttattcttttttcgtccggttttttttgcccgttttgttttggatataggattgcatcggttatagtcggtttcgatggtagggattaatgtagggacaaacctacttttaaagcagattgcttttctcatattcaaccttttccacatgtggtaggtgttgtgtaattgtcttgagagatggacccctaattggttgctgcaattattgtctgtgcatgtactatttatcatatttatacaaaagatattgtacggcttgattcatactgctttcgtttttttaatagatgacgccgttgattttcttctcacatgtttgaccatt

SEQ ID NO: 26171 - DNA, 3260 bp, Oryza sativa
ggcgcccgatctctgtgatgtagtttttttccctgatccgtgtgatatgtgcggtcgatctgtgggatgtcgattttttttcgatctgtgtgatgtgtgatgtgtaaatgaatatgtggagatgttttttgaatgatctgcgatgtatttggagataaaaatgcagcttgatgtatttggggatttttgtgaatgatacgtgatgtatttgggtttaaaaatgtagctggatgtatagggggattttgggaaggatatgtggcgttaaaatgatttgtgaataatatgaatggtggtgcctcgaaatcatgaaaagcatgaaaaaaaaaagaaagaacattagtcccggtgttaactctaaccgggactaaatctttagtcccggtttttaacactaaccgggacaaaagatggatcttttgtcccggttatttcaaccgggactaaaaataggcatctttagtcccggattcgtagtcccgtttgtataaccgggactatagggggttgcgaaccggtattaaaaagggtttgtccaccagtgtcatctccctgccagctgcttcccctacctctcttcccccaccccttctcccgcccctccccctcatgatgggttcccctttatctctccttcagcatttgttcccctaccatttgttcccctaccccgattcctcatgttgttgagacatcagcgacttccaccacttctctatagatttatccaggttttgcgttgaattttttttggaatttgaagaaggttgattgaaagtttaggctttcactgcttcgatgaaagttctatgatttttgagatgaaagttttgtgattttgagatgaaagttcaagttttcaatcaaaaatattttcagatgaaagtttcagatttttaattaaaagttttgtgattttgggataaaagtttcaattaaaagtttcttttttgagatgaaagttttgggtttctaatttaaatttttataattttcagacaaaagtttcatttgagtcgtttttttcaattttgatatggaagttttagattttgagttaaaagctttttaaatttgtgataaaagttttagcattcttgtggtcaggtggcatcaaggaagaagaacaagctctcgcctttgaatcaatggggagtggggctgaaacatgcgcacgacagcgggcctcatgggcatgcttgtgcacctgcagcggagctgcgccaaagcgctaagcgctagcggtgtcttgacatatactctgtatgttgtcatcatccaaacacccccggtggtacttggatcatggactaaactgtccctgtcctatcggatgtttgaaaattaatttagagtaataaacatagactacatacaaaactaattacataaatgagagctaattcgcgagacaatttttttaagcctaattaatttataattagagaatgtttactgtagcatcacgcgggctaatcatggattaattatgctcaatagattcatcttgcgaattagtccagagttatgaaataggttttgtcagtagactatatttaatacttctaattagtatcaaacatccgatatgacgtgtactgaaaaatttttagccccatccaaacacccccgatatgcgtcactgtattgtgccagatagatgaatatatctgtttaaaaatttcagtcccttaacaactgacaaaaggacatttcaattaattatacaaaaggacatttcaactgttaagtgtgcatggatatgcgaagggacgaacagtagctagtactacactagagattttttttttaagtacagtaaaggtctagatctttgaaagacatacaccacaccataaatagagcacggtaccaagctaatgagtactgagcagtcgagctagtgcccagccttgcgttgaacatcacattacgtacgtttcagcaagcaggtgctcgatcgatcggccatggcaccggccacggtgctcaactccggcgagcccgacgcccgacgccgcgagcggccgcacgtcgtcttcatcccgagcgccggcatgggccacctcctcccgttcttccgcttcatcggcgcgctgtcctcccacgaagtagacatctcagtcgtcaccgtcctccccaccgtgtcggccgccgaggccgaccacttcgcccgcctcttccacgacttccccagcatccgccgcgtcgacttcaacctgctgccgctcgacgcctccgagttccccggcgccgacccgttcctgctccggtgggaggccctgcgccgctccatgcacctcctcgccccggccatcgccggcgtcgccccgcgcgccacggccgtcgtcaccgacgtcacgctggtgtcccacgtgaaccccatcgccaaggaccttcgcctccagtgccacgtgctgttcatctcatccgtgaccatgcactggtggagaaaccatctttcgtcggtcggccgatttccacagtagtcccggatgcaataaaaaccggggctaaagatgttctttagtcccggttcaaaagggtaacgggcatatttgatctttagtcccgggttgtgttaccaaccgggactaaagatgatctttagtcccggttcgaatgctgtcagggtctgtcaggccctcccggtatctttagtcccggttgataacaccaaccgggactaaagatgttaactttagtcccggttggtaataccaaccgggactaaagatcccggtgatctttagccccggttggtgctaccaaccgggactaaagtcccacccctatatatatgtcttcttcctcctccagctgcccgagcaagcttcaaaatttcttcaaaaaagaggggaggtcatgccaaaatttctattgaatttattttggtgattacatacaaatcggaggtgcctaaaaggtttgcaacttcatcctccaatgttttttttgtcatactacatttgcacctatgttttgcacactttttttgtctccaaaatgtagttgtaagttgatgagagagaaaatgtgtgtggggaagaaagaatatatagaaatttagttcatttgctaaacaaggttttataaaatagttgagaaggaaaactctagtgaaagttaatcttaaataatagaaaacaaactaaaatgaaaattaaaagaagtaaaacacattaaaattagtttattacttaacaaatagtttttaagaattatttggtgtaatattttatgatttttgtatgaataaa

SEQ ID NO: 26172 - DNA, 1060 bp, Oryza sativa
agagagaaaatgtgtgtggggaagaaagaatatatagaaatttagttcatttgctaaacaaggttttataaaatagttgagaaggaaaactctagtgaaagttaatcttaaataatagaaaacaaactaaaatgaaaattaaaagaagtaaaacacattaaaattagtttattacttaacaaatagtttttaagaattatttggtgtaatattttatgatttttgtatgaataaagatatcttataattattgtatgactgtcattattgtaagaataattatttgtgtacggtttttttgactcatgtagatggatcggcaatggatgtacgctgaccggcggtccaaagagtttattgacggcgtgcactattttttgagagtggccgaagctaacaggaaaaggggttttatttgttgtccatgcaataagtgtaagaatcagaaggagtattctgcatccaggactattcatttccacttgtttgagtcggggttcatgccaagctataattgttggacatcccacggagagcaaggtgttgaaatggaagaagatgaagtggaagacgacaatattccggactttgctcaatttgttggatttgaaggaaatcaaacgggcgaggaggaaatagctgctgatggtaacgacgttgcggatgatcttggtcaaatgttgcaggacgccagggaggactgcgaaagtgaaaaggaggcccataaattggacaagatgttggaggaccacagaacttcgttgtacccaggttgcgagcaggggcacaaaaagttggataccactctggagttgttgcaatggaaggcaaaaaatggggttagtgacaaggcatttggcgatttattgaaactcgtcaagaacattcttccggggggaaacaaattgcccgagacaacgtacgaggctaagaagatagtctgcccgttaggactggaagttcataagattcacgcatgtccgaacgattgtatcctatatcgcggtgaggagtacgagaacctagaagcatgccctgtttgcaaagcactacgatacaa

SEQ ID NO: 26173 - DNA, 3076 bp, Oryza sativa
tatacacatataccttggacggtgattcaaaacaatttttctcttaaattacttatccaatctacaatccgatcacaccgttgtattcgttgtaattaaatctttacaacaagatgtcacatgattatattctaattaaaaataatcatatgtttcaatccattaacactctttgtttcatacgcgatagtaatatgtttcaatatgtctcttcagcatgtttcacaaatttcgtggaactacatctcactactctctctcctctctccacctcatgcatgcatgcattttagcgggcttcaaaacaacttttctcataaactaattatccaatctatgatccgaacacatcggtgtattcgttgtaattaaatctttacaacaagatatcacatgattatattttgatgaaagaaaaacatatgttttaatccgttaacactagttgtttcatatgtgatagcgatatgtttcaacgtgtatctttatcatgtttcataaaatttttaaatgtttcagttgctgattttttgtttcaccatatataatttgatgtttcactcattggtcaactagaacatttgaccaaccaattttctttgggacataggacgttagatgggaagcttcctcatgattgaggagtgaagaatgaagtacagcaatatacacatacacatacgctcgctgcttggctggacgtccgatatttggtgagatatcggacgtccgagccgtagcgctctccgaaacttttgacacgtaagaaattttttattttccatttcagacaaatgctttttgttttattgaaaccgacatttcagacaaatggtactacaggcgtacagctgctataaaaagacacatatgccaacgctcttatcagtcgagcattcacccagcattagccggtttcacaacagcatcataaagcagctgctcggccatggcaccaccgcctgcggtgctcagctccggtgagctcggcgcgcgagggcacacacggccgcacgtcgtgttcgtcccgagcgccggcatgggccacctcctccagttcttccgcttcatcggcgcgctgtccgcccacgacgtcgacatctccgtcgtcaccgtcttcccgaccgtgtccgccgccgaggccgaccacttcgccgccctcttcagggactatcccagcgtccgccgcctcgacttcgacctgctgccgttcgacgcgtccgagttccccggcggcgacccgttcctgctccggtgggaggccctgcgccgctccttgcacctcctcggcccggtcatcgccggcgtcaccccgcgcgtcacggccaccgtcaccgacgtcacgctggtgtcccacgtcaaccccatcgccaaggacctgggcgtccagtgccacgtgctgtacgtctcctccgcggccatgatgtccctctgctcctacttccctatctacctcgacaacaaggatgccggggccgacgtcggcgacgtcgacatccccggtgtgcgtcgcctcaagaggtcctggctgccgcagccattgctcgacctgaacaagctcttcacgaagcagttcatcgagaacggccgggagatggtcaagaccgacggcgttctgatcaacacgttcgacgcgctggagccggtggcgctcgccgccctccgcgacggcaaggtcgtccgcgggttcccgccggtgttcgccgtcggcccgcacagctccctggcgagcgaggcgacgaagggcgccgccgccgacgcagaggggtcgccgatggcatggctccgccagcagccggcgcggtcggtggtgtacgtcgccttcggcagccggtgcgccgtgagccacgagcagatccgggagatcgcggcggggctggaggcgagcggctcccgcttcctgtggatcctcaagaccacggtggtggaccgcgacgacgacgccggcatccgcgacgtgctcggcgacgggttcctggagcgcgtgcgggggcgcggcgtggtgaccaaggcgtgggtggaccaggacgcggtgctcagggacccggcggtgggcctgttcctgagccacagcgggtggaactcggtgatcgaggcggcgacggccggcgtgccgctgctggcgtggccgcggggcggcgaccaccgcgtggcggcgacggtggtggcgagcagcggcgtcggggtgtggatggagcagtggagctgggacggggaggagtgggtggtgagcggggaggagataggggggaaggtgaaggagatgatggccgacgccggcgtgcgggagaaggcggccaaggtcggcgaggaggtggccaaggcggtggccgtcggcggcacgagccacacgggcatcctggatttcgtcgccaagctcaaggctgcaacttaagcattctctctcgtgttcgtctgagaataaatatctactgctacataattcctccttcaatgtcacgtataagtgtacaagtgaaaggagggagtgtgataaataaaagcactctcgtgtgtgcggctatgcgtagtttgggattgaaaaaggccaatttccaattggcaccaccaaagctcctccttgttcccggttaggaacaaatttggttgttttcatttttcagtttgtttcagttgtgttgcaaatctattgtcttggattctcccccatcttctttcttttcacatgttcttttaggccattcacaatgcaacacgctggcattcgccctgagcggtccacgttggcgagtagcccaaattcaccgtcacgttatagcatgggcccacaaaactcaaacgcgtgtgaccaaagttggtcacccgttcttcggcacaatcgggactaggtggcatggggaaacgaggtcgcggcgcattgcggaggcatggcttcgccacaccgttcctcccgatgagatttctctccctctatccccaaattgtgtgacggcgcggcgcggcagcatgaaggcggtggaagagagaacggagagcggcggcgacagcaagaagggagaacgagagtggtggagaagaagaggagcctaccggcgacctgggagcaccacatcgg

SEQ ID NO: 26174 - DNA, 2069 bp, Oryza sativa
gagtattccaagggtatcaaacatgaggaacatacagccatttgatctccttgcttaaatctttagagtcagattaccataactccttccctcggcacatcagccctagatccacccacgtcattgccatgtcatctatctctatacacgtgtcaccacgaggcatccacgccagccgacccatcatacaccgagtccaccaaaacctgagccactaatcagtgggccccactataattttcttattaaaaataattcaatttaaagaattaatatccataggatattcctggaatattccttttctttctgtcattagattttctctgaatttgaacttctcgaggtcttaacttatccgttcgaacttcgattttgtcagggttacgggtcaggcataccctctacccctcgacatacgtcacgtattgacaaggcctattcacatgtgcacggataaatcctttggcgtctaaggaaactcttcgtaaagtcaatggacgaagagagacctcctcggacaagaattgggttacctacgtatcgtgccaggtctggtatgttcgagtcctactcggagagcacccaacctacggtataaaagggaccccccggggagggcatagatcatcgaatctcagagccaacacaacccacacagcctacgaagtcggagcctgcaaggagccaagtcgacgagagctagtcgaatcatctcgactacaatctcgccaaatcccctgagttccgtcttttcctttgtaatctgtgttttccaccatataatcccatatcaactagattagggctattacctatcaaggagcctgaaccagtataattcttgtcttttgattgctcgatgtcgtactacgtagatccttataccagcgtaccccaataccctctatatccggtctacgggtatcccccgtcgacagatttgacatgctcttctttctaaattctaggggtaaaaacatatcagatattatctggtcctatccgcttcgaatccatctgaaacgatgatatggtatgagtttttagaaatccgatggatatggatgcagatgcggacaagatatctctaaaatacaacagatgcggactatccgataggctatttgccgcataatccgaaattatcaacttatgtaaccattcaatctgttgcatataacatgagttggcacatctaatggcccaattcatcaattaacctagattcgttagtccagggctttcaccgtctaactaacacttgcttagttgttttttatattgtggatatcatgtattcatgttatttagtacttaagtacataattattacgatggtccgttcattgattattgcgttgttgtcctttgcattgctaactcaatggtgtattgcttgcatacacacatagcatctgacaaatttaatcagtttccgaactgagtccacaccaattccgacatccaaaacaatccgttctacatccgcatccactctgaatccgcttaaaataccactatccatccgaatccgctccatttttacccctactaaattcttgtaaaatcgagctcaaattcctggttcattggtttattttatttgatgttatttagttagtcttttcttttgtttatttgtttttcgtttgtgattgtgtagacgttggagtacaggagtggttcgctgcagaaggcacaatgcaggaatgatacttggaggaaggcaagtgaacatattggacccaatttataaatatttttttgaacacatgcattcttttatttatatgctatcgatgggtagggtgacctaattgctattataccttgccttttataattattgattacctatgataccttgtcatcctagtttttctgagttgaacattgggctcatttcaaggtagagtagttatgtttagctctgctcaaggttgttttgaagcaaaatataattttgattaatcatatatttataattatttgtatatgaaccgtgtgactgtgaactatcttttcgatagcacgtgttgttgtgtaataaacaacgggcggataaa

SEQ ID NO: 26175 - DNA, 3498 bp, Oryza sativa
  unsure (1)..(3498): unsure at all n locations
attcaaatatcaacggtgtctaactcaaggaataaaataattaatttatgctaatcttgtttatgacaatttattgtacttttcaataacatttttaaaattgatggtttcaaaagtaatactacaaaataagcatatttttattgcctatatgcattaaagagagaagttagtgtatatgagtttgaaagacgactgtattcgttctttctggttcctagctccccgcctcgtttttcacgtgcacgcttcccaaactgctaaacggtgtgttttttataaaaagtttctacacaaaaattgcttaaaaatcatattgacctatttttgaaaaaaaattagctaatacttaggtccggttcttttctccaacaagagttggatgaagattaagattttcgttgcacgcttttcaaactggtaaacggtacatttcgtgcaaaaactttctatatgaaagttgctctaaaatatcatactccctcagtcccataatataagggattttgagtttttgtttgtattgtttgaccactcgtcttattcaaaaaatttgtgcaaatatacaagacgaaaagttgtgcttaaagtactttgggtaataaagtaaatcaaaaaaaataataattccaaaattttttgaataagncgagtggtcaaacagtacaaacataaattcaaaatctcttatattatgggacggagtgagtattaatctatttttcaagtttgtaataattaaaacacaatcaatcatatgttagtaccgtaaaaaacttaatcttcatcttcaggagaaaagaacaccaccttaattaatcatgtgctaatagatcgtttcgttttctgtgcacacggttccagatggaacctccagcaacaaacagatcgttaagtggctaaaaagagtgctaactcaggggtgtttggatccagggactaaactcatatcggatgaatttggagtattaaatatagactacttataaaactaattacataaatgagagctatttcacgtgacaaattttttaagcctaattaatccataattagcgcatgtttactgtagcatcatataggctaatcatggattaattaggttcaataggttcgtcttgggaattagtccagggttataaaatgggttttattaatagtctatatttaatatttataattagtgtccaaacatccgatgtgggttttagtccgatctaaacagggtctagtgctatggctccttcatgcattccacgtttcattgctctctttctatcgttaccctctctacccagtgaccaactcaccatagctctctatatcgcctatcgtttgggaagtttccacactcccagccatagtgatagcggcatacacggatgcatctagcgcagccgccgctccctcatctcgatcgcccgacggagacctggaccgaggaggtgatcgttggcggcgcatccccgcacgagtgccgactgcgcccgtgcatctcccgactcggctgtattctcctgtccctccacggatccactcccgaagatgcttgcttgctgttgctgaagatacatgctggttggtgctgctaatgcattcttgatgttcttgtgtacctgtatagtgtgtcgtccgtggatccggaagagggaagcattgatgccgttttattttacttttgcaatcactatttttttgttcccctggccttttccttataaactattctgcatttatatttttattcaactgaaattgaaaactaaagaatgtaaattctttgattataaagacgacagatagtttgaagtttttgaatctggatgtggtgcttaaagctctttttttccctctgcatttacctttttctttctttctttaccaggtttatcttcacactttgatctgtccccccggtgaactttttctttttctaaaaaaacaaacttgcctgggagggaagtattttggatttgttgaaccaaaatgtctaggacggatatggtttttttaaaattgcatgtcacactctatttatctggattcatctagtaccacgtacttctttttcctttgtattcgtatgtgcttggccactaacggtactagcagtccgccggcacaagttcaggcagatcaggccgtgtagatcgagccgccatcgccccctcctccttctcatcgcccaaagcaggtgtcaccatgccggtggcagcctacggcactatgagtaggcagatggagatagtaatctattttttcttgcgattgttttctgggatttttttctccaatacttcggacttttctagatgagatcgtacgtttgtaaaaaaccccctatcgaaacttgtaatttccatttaggtccacaggacgggttttcaccgtcgatacgtcatctaacggggctgtggataggtgcgtacacgtggcactttctacagccaagaatcaggaggagagctccacacgagatgctacgtcgctcaattggaagcctgggatcggaccctgaaatcagtttataagatctggcccaacagaataggtggagggtaacggaagggagatgggttgggcttggctagaggtttgagcccgagaaggagatttagacttaagtttatgttttttaatttaggggtattcctttatgggttgagagaattgataatttgattatatttgtaatttaatttattgacgtctctttagccttatggtctccactcagattaaggtggcaattattttctagagttaaataatatttgttgtaattaaatgatatttgttgtattgacaattaatttaactcatggtctcttagtgtcaaattatatgcttgttcaattgtgggcattatatttggattagaagttaaattggcaactaatttctccttatttatactgtataagctctatataattttgtaaattaattcatttcatccccttggtatgattatgggatttagttattcatagctttgttttaagttgaacttccacccaactccagcaaagatcactgcgcatgatccaaaagttctaaaaaaattcaaatttttactgattttttaactgaataggagtattattcagggtgttacagtcaaccggactcttggatcagcgttcgctctgcacaggctcctatgtaccggggggactcaagaccacaatcaacgtcgtgatgcgtgagctgatggcttttgatgggctcggctgatatttttcatcagtgaatctatggggttgtttggtttaattctttcatccatactttagaccgccaaacctccataactatgtttttgctaattatcatagttgtaaattaacacattttttaagcaccttgctttacatatcatagatttaatcttttacctaactttaccacaaatacaacttacaatctataggaaaaaaaaatatgacaagccacacttttctaaaataagttataacaatgttagttgagaactaa

SEQ ID NO: 26176 - DNA, 842 bp, Oryza sativa
ctcgtcccaagccaacccaggccaaccattgcacattttagttgttgagcaaattttaagaattagaacactgacttgggtacattgctcggcttgcccataaccgagggcgcggctattcgaatagattatactctgatcagaggtgtacatctttacccacaagacacatcttcctcacgtgcaaccacgtgccacataccaccacggtatacggacggaagacgtgacatagttcccaacccatcctagccatagacaagagtaccgacccaatcctgcctacggccggaacccccgggacaggcaggcaagactgagcccctagcagcagggcaccaaccctctgccatgacatctcgactaccgggccgcagctcgtgtagccttcatttgccctggagaatgtccatcgacccccgacttcatccatctccaatccgtgtacttttgtttatgactagactgagccacaaactaagccttacccactagacatgtggaagtacggtagtgctttgcaacagaggcccgagcttaatccttatagtggccggggtgctacttcccacaactggcatgcacccaaaccccaccgaaaacaggttttaggggttttgaaagaggaagagaggtgtatgtccaattccaccataaaccaacaattccatagtgtccaaatgatatgagaattcccaaagtctaaaattataaaaccacctaatgttgcctaattaatcagcgaagcatctacctaaattcatactagtggaaccataaatagagtgtccactagatggggttttgtttattctagggtgaacaaggtaataataacaata

SEQ ID NO: 26177 - DNA, 830 bp, Oryza sativa
gcgatgttggtgaaggtggtggtgcagcggggcgacgagccgacgaggaggaaggagaggccggcgcggagacgatggcgttccggcgaaattcgggcgacgccgtggcctggccgggagagaggacggcactccggtgccgggggaggtggtggcgacgtcggccggcgcaccggggacgcggcagaggcggccggaggtggaacagtggcggcaacgccactgttttgccggcgagaacgcgtctccggtgttttccccgcgaaacggagggctgaccgagggagagggggtggctgcgaggccgagggagaagacggcgcggccggacggcgcacgggcgaggcgggagaggcggctggaggcggccggcgcggagaaaagaggagggcgacggcgggaaggcagctccgggggtcacctcgcgaaacggagggcaagccggggtggaggaggtggcggcgacgctggaggaggcgacggcgcggccggccggcgcacggtcgaggcggcaccggcggctggaggcggccggcggcgtgggagagagagggcgacggtggggagggagctagggaccacggggaggctcgggatggggctaaaacgagagaacgggggatgaggatcccattttataggatgggggagggagccggccacgggaggagcgggaacggcggcgggaaccatggccggcggcaatggttggtggccggacttggcgcgtccattcccggggattgaaggcaccattcaaggggaaattaagggggaaagagagaggagggaaaggggattaattcccctcaatcaatttgggaatccca

SEQ ID NO: 26178 - DNA, 1907 bp, Oryza sativa
ttgtcatcataagaatgtcatgcttatcatttacttctaacttgccactgaatgctttggagtatgatgtcacgcttatccagcataccatgtttgacaacttgtcactaactgcatcatattagctttcctagcctccgggtgctagatactactgctattcgatgcaagggtcgataacttttgcctttgaattacgtttctcaaaagaaccaacttatcacacttgacatgctttgacatcttcctaaataactttactactgaacttgttattgtctgaccgttttcctgccaaatctgaagctttgttgttagatgcgattttaatctgacctcggtaaactatcttcgaacatatcacttggttcataactgggaatagctcccacgaacagacaactcggattcactttccactcctcagttagcattcaacgtattcctttacacctttaaccttgatgtgttctttccagatttctcttatcaatcacctttcgacctacttctttgcctgatcataaacacctttgctggtatcttctgagagagtcctcatagaacttgtctgtattacacatttctccctcattacatgaatactaagcattgtctaaaaggaaaggtgcttagcaatggtacattgcatcctcaacatgaatcttccataaacataacgaactcattgtttataatcatgaatatatttatttattacatgattgctacaaactttctattacacaatgataagtagcgaactgaaaaccacaaacggggctgctcactttgattcgggggagatatagctggcattgtcctagtgactgcatccttgattggttctgtgatgatgtggtaggactgcgtattgctatcattcacaggagaagcttccttctgattgctgtttgaagcggatgacggttttctgcttggtatcgccctcctgaggttgattgccctttgcttggcctggagtaggtcggggagagacacaacttcttccatcaacgacaattctttgctgaggctgtcggtgcagagaatggttggtgctgaaggtattattgctatgatttattgcagagtcaggtgcagcaggaggagcattggtgctgtggatgatatcgtcgatattgccgttggagctgactagctgatgagacaatcgtagggttgttcgttggatttctgcggtcttggtcgacaacacactgagttggcaatccttgggcacatggtttgtaccttcgcatagaaaacatgtgaccttgcaggtgggacactcccctggtggatggtcttcttcacaataagcgcagagtgtgagacacatgctagcaacgtgtccaatttctccacaacgggtgcatgcctttgattccatctcttcctcgccgagatgtcggggagactcatcttcatcatccgaggagacttgatctgacccttcactatcagatactctgccaccgtggcttaggaggtgctgggtcaactgtcgtgcacctcggaaggtatttcctctttgacgtctaggaatagttatccctgctggaggccattcggtgctggtaatagtcatcttacgtacttcttcttcagttcgcatcggtgcttttctcttctgagtcttactcttcttgcctttggcttgcttagtacgtgaccccacgtggtacgaagggctaggaggaaagcaattcccgggattcaatggattctctccattgggctctctactttgcacactaggctgcaagcttgacttggtgcgaggaggctggtttagcgatgtctgccctattaaaccaaaggaaggggcttctttggcatatacccatggacaattcagggcatagtgtccttgttctctacaatcgtgacaaaaggggacatct

SEQ ID NO: 26179 - DNA, 2293 bp, Oryza sativa
tatagccgaaccaagcgatgggtcggattgtgttaatgatttatgcaatgatgccatagcaattatagccgaaccaaatgttggttcagattgtcttgctagcttggataataatgcaacaaccattatagccgaaccaagtgttggttcggattgtgttactagtttagacaatgatggaatagccaattcaagtgatgattcggattgtgttgctagcttagacaatagcatcatcgaagatatagccgaactaaatgacagtttggattgtattacaagcgaaagtgaaatagcattgtcacctaagaccaattcacaaatcggtcatgtggatgttggaaaagatgatgataatgtcttgcgggatagtaatgagatagaatctaaaatagttatgcatacatatcaaaggccgtatcctgaacacatagattcggtcccatacccgcaaggatttgaggtgcccaacttcacgaaattcacagatgaggatgctagaacaacaatggagcatatcggccgatttattgatcaatgtggtaaggccagtagcgatgatttgcttaagttaaagttgtttcccctttctttgtcaaactttgcatctacatggtatagtttgcttgctcctaattcaatttctacatggtcacaaatggagcataagtttcaagattatttcaaagatgcaagcttgatggagcaaagaccgattgatacttcatcggtcacttgtgaaacgatttcagttacatctatgcctaagaccggaattgatagtaatcctctccctattagtcctattgatgttaacaaaaagaaaaggaaaaatgttattattggggatcctcggcccaagactagaatcaataatgcgaaggccaaagatcataaagttgcaaatgatgagtcatctagtttccaaaagaccaaaaagccgaagctcacttttgagatgcttatggctaaatacaagagaggattagccggtcaacgatttgataaccaaactagtgattcgaaaagaccaagatcatctcgtaggaagagatttggtcaaacatcaaagcaatcggagccatcaaccataccaactgtcgcaccgggaaaattgccttttcccgaacgctagtgtattaatccccgtcccaggaaaagccggggtacaccatacaaacatgatataaaagacacatctttattacatcgataatatttacattattacaaaggcgcttcaggcctgacaatcaaaaataaacagcagcggactagcgggcctacggctcaatcttcacaggcgctcaactggggtataagccaggactccacctaagacatattctccaaagcttctcttactgaagaggggaaagattgagcaagaatgagtacaaccacagtactcagcaagccacaccggagatgcataattaatgcaagggggggtacaaggagataataatataggggttaagttttgcaataaacggcatttaaaagtcacttagttgcccaaaaccatttataaagacgatcctagagctacacagtattattaaacaaggccgtgaaccctcacgaacctgccctaacccaaggcctacgatgattcagaccgaactggtaacccgaccctgggtcccagctcgtcccaagccaacccaggccaaccattgcacattttagttgttgagcaaattttaagaattagaacactgacttgggtacattgctcggcttgcccataaccgagggcgcggctattcgaatagattatactctgatcagaggtgtacatctttacccacaagacacatcttcctcacgtgcaaccacgtgccacataccaccacggtatacggacggaagacgtgacatagttcccaacccatcctagccatagacaagagtaccgacccaatcctgcctacggccggaacccccgggacaggcaggcaagactgagcccctagcagcagggcaccaaccctctgccatgacatctcgactaccgggccgcagctcgtgtagccttcatttgccctggagaatgtccatcgacccccgacttcatccatctccaatccgtgtacttttgtttatgactagactgagccacaaactaagccttacccactagacatgtggaagtacggtagtgctttgcaacagaggcccgagcttaatccttatagtggccggggtgctacttcccacaactggcatgcacccaaaccccaccgaaaacaggttttaggggttttgaaagaggaagagaggtgtatgt

SEQ ID NO: 26180 - DNA, 4017 bp, Oryza sativa
aaatccacatgtcaagcatatataaaaaataaaattaaaaaccatattttctcctattaggtaaacataaaaaagacaaaaaaaaatctaaggtagagaggagaaaatatgattttttttaattttattttttctatatgactgacacgtggcacgtaggtgctatcgtggcatgccacatcagcgcatggagggggttagagctcctctggacctagatgacacctcaagacaagttcgaggacttgaaaatgcattttgagagtttagggacctagataatacgcccactcttttttttctatgagttctgctgacacgtgggccaccagtctatcataaaagaaagggtaacatagtaaatttgagataaaggtagagagtagccgagtgtctccccattccctcccgtctcgtctccgctcattgcgccatctcgcgcatgaacaggggaggggcgccgatctccatctggcgagcagagaagggggaggggatcctggtgagcaaccacatcctctttctgattcatctctctctcccaccttctttcgtgtggaatttgcttgcgctaaccatagcttctctccaagatctggaaggaagaaactttttctcttaatttcagagccttaaccttaatacaagaaacagtttgtttgttcctcaaaaagggagaaatgccgttaatctgcggggctgtgcttgcttgcgttcatcctccatttcctgcttgcaatgtggctgcaagaaaagattaaaagggcctctctcgtttaggtcggggtgctaggaagtagggaaacacctttctctcttcttttggtaggaaaaagatggcgcctttgatgggacaagccatctttgctgatccctagcacttgtttattccaaagtggggggagtgatggtcgatagatctgtagagacagtagagttgtatgattgcggttagtgggcggttggacaggttcagtgttttcgacattagcttttgtgatgatgcctttcttttgagcgagttagatggataaaatcagtgggtggcttcggttgtgacttgtgaggagtgagtctcgttgtagtggacctgtgggaggttgatggatctgcgtgtgcaggttggttcttgattattttgtttttttttttgtttgggattgttgggggatgatctcttgttcatcgaattggtggatttctgtatttttttgtgcagttcttttgtatctaggcatgttctaatcaattgaaattcttttgctgccctttgcagattctgaaggcaagtgtcaacaccaagcttataaatctttgattggtcagtagttctttctgcaatctggtctgatatatatacgtatcagttgtgggagcaatggcttcaaaggcaatgcctcgagcgccccctgcagctcccaacttacagtcactgaaactgtgttctcagaatgattcttctttggagacaaccagtccgagtaaacgaagtgcattggtgccaggaaggtcagctgaatcaagcaaaccgaatcccgaagtggtgcaaaaggagcagaaatcaactcagcatcaaaatgagtccattgatcttacgggtagcaatgatcctgcagaagtaaaggctgagggtaacctggttccaaagcgtcttgcagatgaggaaaagggtgttgtggaggatggaattgcgaacggaagcttgaaatcatcttcagctttaggaaaggagcatggtatagcaagtgcaagtggaagtgccaggttggttgggagatctgagactggagaaagaggtttcagtagcagcagatgcaggccaagcacaagcagtgatgtcagtgatgaaagcgcttgcagcagcattagtagcgtcaccaagcctcacaaggcgaatgattcacgatgggaggcaatccagatgatcaggactagggatggaatccttggcctgagtcattttaagctattgaagaagctaggttgtggtgatatcggcagtgtgtacctttcagaactgagtggaacgaagagctattttgcgatgaaggttatggacaaggcatcacttgcaagccgcaagaaattgcttcgagcccagactgagaaggaaatcttgcagtgcctggatcatccttttcttccaacgttatatacccattttgagactgataagttctcatgcctggttatggagttttgccctggtggagacctgcatactcttcgacaaaggcagcgtggcaagtattttccagaacaagctgtcaagtacgtatgatttactcaatgcacatgatacacattaataccttggtactcttgtagggttcactatctttttcatttgttgtttttctgttccgataaatttcgaaaacgtggatacacaattcagaaaaggttatggtttgctttaagttagtgtaactgcgtaattggatggattatattaagtatgtaagctgattgtgatgataattttgtgcaagttgtcaatgtgaagtcaatacatgcaaaattaatttctacacaatgatatttcattttatcaatgtagtttttttaagaattaataaaaactgcagcttacatccacattcaagagctaaaactcctcaaatagcatgaactaagcaacagcatgaaaagtggtatgcatatctttggaatatttgttttgttccatgtacttcttgaattcacttatttgcaagatagcatagtaaactgatattgcactttcttcttggtcgcagattctatgtggcagaaatactccttgctatggagtacttgcacatgcttggtatcatatatcgtgatctgaagccggaaaatgtccttgtccgtgaggatggacacatcatgctatctgactttgacctctccctgcgctgtgcagtgagcccaacactgatcagatcatctaaccctgatgcagaagcacttcggaagaacaaccaggcctattgtgttcaacctgcttgtgtggagccatcctgcatgattcagccatcgtgtgccactcccacaacatgctttggtccccgatttttctccaagtcaaagaaggatcgaaaaccaaagcctgaagttgtcaatcaggtcagcccatggcctgagctcatagcggaacctagtgatgcacgctcaatgtcatttgttggtacacatgagtacttggcccctgagattatcaaaggcgagggtcatggtagtgccgttgactggtggacctttggcatattcttgtatgagcttctgtttggaaaaacacctttcaaagggtcaggaaaccgtgcaacactgttcaacgtcattggccagccgctgcgcttccctgaatacccggttgtgagcttctcggcaagagatctaattaggggcctgctcgtcaaggagccccaacaaagattgggttgtaagcgtggtgccactgagataaaacagcatccattttttgagggtgtgaactgggcattgatacgctgcgcaagccctccagaggttcccaggcctgttgagattgagaggcctccaaagcaacctgtttcaacatcggagcctgctgctgccccttctgatgctgcccagaaaagcagtgatagctatctagaattcgatttcttttaggactcaataatttttttttccatttgtttgcatcatcttgagtagggttttcacatgtagtgtcttgcagattagtatgtagattttttttgtttctgtcaacatgtcctgtttttcttgaagtaaacttattggcattcagatttatatttctcagcaaagatctgaaatggttaatcttcaagtgagtcaaagaaaggccgccactttttggcttgtgcagtgctagctcagttttgtgtaccctatatttctcatagtaattagtactcagcagttgttctgttacagtgttacttctgtctgatggagcatttcaagtttaacagtattgtccttaccagattgtcactgcaattgctgaatagttatgtgcatgag

SEQ ID NO: 26181 - DNA, 5182 bp, Oryza sativa
cagtgctagctcagttttgtgtaccctatatttctcatagtaattagtactcagcagttgttctgttacagtgttacttctgtctgatggagcatttcaagtttaacagtattgtccttaccagattgtcactgcaattgctgaatagttatgtgcatgagctgaaacacattcagtgagaagtttcactgaataatgcttgatccagaaaaaagaatgttgatcaatattgactcattgactgcaacagcagtttttgtatctcagtataactaaatgctataccatagatactaatcaattattttgttaatgcatgattggctgacaacttgacatagccatgtgttcctatgccctatccctgtctgctatgaggttttgatttacgcatctaggacaaattctttttggagtaataaattgtcacatgcatatgctgtaatctatgatcaatgataagtgctccatgtcaggattgccaggttgccaactggaggtctgcctagcatgttttattgttcggtcttctggctatacatgaaaaattgaggatataatagagtgccagattttctgtcctttggctgcatttttcatgtggttctagacattatattataatcaagcacaactcttcaccatacaacaatgcagaaaaaatgctggaaatatcccatataacaaccatcatctcctgtacaaatgaatcaagaaattcaagatcacaacattggtgaaagtgtttttttacaagcttttgttgtctgaagatgctatgcgtgcagtgttctatatctgcaaaagtgactgaagcagcaaccataaaagtataagatcaaaatgagaagcatttcaaatattttgtgattttattcctttcattgggattaggctcctttttgtcatcatcagccacagcgcgattgttatgatctggtgcaggtgatagtggcgttgggctgatagaattactcttgttatttacaggagaaggtgaaattggtggtgttggatcagcagttggcacagttgtaacctccttgccatcacagacaatcttgacttcacagtatagaggtgcgttcttctgaacctgtcctgctattgtgtttcctctcttgaacttcctgtgctcattcagacaaattcagaatgtatttctgaaatgccagcaaattattttggtagttctgttaattggaacttgcaaggtatataaaccttaccgcaatttggattttgaaacccccagaactagctgttgtacatgaaagaccggaataagttcgaggatcgcattggtaacatgatcgctctcgatgaggtacacatcaacattaacctgaagatatgacaggaattataattggatttctatatgtgccttgcagatacatctcaagctgttgtatgagcacagaaatgtgaagatctgatgtaaccagttcacctgaaagttgcggcaatggtctaaatatttttgtagcatcacacgcctctttgatctctcttggttcatgtaagtttctacctgctctgggcttgcttggctcttgggcatcattcctactatttcagatatccaaggagacatacgtcaagttcatcagaagatatgcatcaacttaatctgtttagacttaaaaaagttcaggcgcacagtcattattcagaaaaaaaaaatacaatcagaaattttgtctattcagacggtgagagcagagcttcagaatatatgatttgtttcgtcagaaccaattgaaaattttaaaaatacaaattatcttgacaagaaagctactattccaatttttggttgtagacatcatgtgtgggagtagtataagggcctgtttggatcccctgccagaatttttcaccctatcacattgaatgtattgagacatgcatgaagtattaaatataagcgaaaaaataactaattacataaattgcatgtaaattgcgagatgtccatgatttgacaatgtggtgctatagtaaatatatttgctaatgatggaataattaggcttaataaattcatctcgcagtttatctgtaatttgttttgttattagtctacgtttaatacttcaaatgtgtgtctgtatatctgatgtgacacgccaaaacttttcacccctggatttaaacgcagcctaatatttaacaacgactcaagctagaaggaaacataaatcctagactcaaccatgactatgatgtccaaatgaaaagactttaaatatagatcctgcgcgccctatccctccagaaaaaccgaacggtttcttcagagttatgtactgatgatttgctcttaacattttttactgtatggtgagttatctatattgctcagctagcctaaaatgagagttatacaacagtatatatctctgcatataccagaaagccctgggttttcctaagctctaggcagtcgtccttctcagctcccctatctggccatgccaaagaatggcctgtctgcatcattcagcaatcaacgatgaattgctgtgcgagtgtcaaagaaaaaaaaaaaagctacgagaacggaatctcactgtactggtctgttcacatttcagtggaagtgtaacaaagtactcgccctgctcacgccggcatctcagagacctataacactcgaactactagtctactctactgtttgccatccaatatactccacgtatatggagttgagaacagagaataaaattaatgcggaatcacatgaagcaaaattcgtgatgggatgtacttttgtacctgaccgagcaaattataattggttttgtcaaatcgaaaaattaaacgtgggttttagaaatataccactgatgggccattatcccttaactgtagatgcatcgacaaaaacaaatatagttctttctcgcataagggtcgtgttctttccagcttacagattgtagatgatacggcacacttcgtaagcttcaaaaccatactttatttgtaaaaactttaattatgggcatttcttagaaaactttttgaaaaccaacaattcaatattttaatatttaattcattcatttatattctcgaataatttccatacacttaattctatacatcacccataaagaacaagcccttacattatctagagaaattttacggtccttgatgagaaagtagccataggtactaaatttcatactaaaatatctaatagctgaaggtaacgggttttatactagaaaatatattacctcccggtattttcttatggatggtaaaattacccatatagagaaggaactaggtgtaactcctctgaatcaactagaattgtaggctcgctttcactacccttgttctggaaaagggttattctgtctatccgaacatggtacacacaagtgtcccgtgcacactaactaataaatatcaccgaaaattctaaaaaaaaatgtacatgcacttccaatagtatcacacctaacttcaaattcattatacttagagagagagaaaaaaggacaaatttctgacacatttatactcttaaatatataatatttttccttttctattatggctaaaatatactctctctatttcatattataagtcgctttgattttttagtcaaacctttttatgtttgactaagtttatagaaaaatttagcaatatatataactccaaatcattttcattaaatataacattgaatatattttgataatatgcttatttttattagaatgttgttatattttaaatatatttcgtattagaaagaaaaattctaagcgacttataatattataaaacggagggagtaatgaatttgaagttgatactttatatatacgtgcaatactattggaagtacatgttcaatttttttcctagaattttttgtaacatctgttaacgtgaaacttttgtggacatgatatatatatctcttcctattcatacatgccttggttggtgatcattctagaatttttggaaagttgatcactctagaattagcatggacacctaaaccaaacaccacatgggtggtattgtttctatctccaattctccatgcagtcaacatcagctctagagcttttttgctgcaaggtttgcgatggggcaaaatatgcctaacgtaggacggcaggatgccaacaaagctagaatggaactacagcttgtgacaatgccagctttgaaaaattcagtcaaagacaaatcaccccctaagctagtccaagaacttgaccttgatttcaacaatgctgcaggccaatctccaaccaaagattgctgggacccaattgtgatcttaccaactgaaacacaagaacagtccttcgaattaaccgttttaatttactctttgatcaatagtctctaattttccatatgcaatactaaaacacccttgttctaatccagctagctcaagaagacgatcaaagcagcttcataatcacagtcaacaagtgtatgagctaggccttagacaaatataccatacatgtataggaagtttgtatttctaattaatgatccaataaattaagtagtaatcactagttccatctcagaaacacatgtgccagattttcttgaggcaaatgtataaatggaaacatgtttcaattagctgttggtcaaattaagagtatggacagagaggggtgtgtgcttacatccggtggggatgctgatgacgacggggaagacgtgcacgaggtagacgaagctccgcggcgaggccagccgccgcagcgcccacgacagcgcctccatgcttgacccgcccttccccaccgccacgtacacgtcggcggcggcggcggcggcaggaggagccagcgacgccggccctgcctcatcctccatctcctcgatctcccacgtgctgatgccattgttcccatctctccccctgccggcgccgccgctgccgccgtccttccccggccgtccaccggcttcgtcgccgtcctccacgacgccgccgccgccgccttcttcccgagactcctcggccatgtggaggagcgagcgagacgacgtacggcgacgcagcaaatgaagacgaagggaggggaggagaggaggtgttgggttatgtatgaattatgatatgacactgcatgctgtggcgaaggtgtagaggatgtgtttg

SEQ ID NO: 26182 - DNA, 1539 bp, Oryza sativa
ccgggacagtcaggcaagactagagcccaagcaacagggcaccaaccctctgccatgacatcttgactaccgggcagcagctcgtgtagccttcatttgccctgtagaatgtccatcgacccccgacttcatccatctccaatccgtgtacttttgtttatgactagactgagccacaaactaagccttacccactagacatgtggaagtacggtagtgctttgcaacagaggcccgagcttaatccttatagtggccggggtgctacttcccacaactggcatgcacccaaaccccaccgaaaacaggttttaggggttttgaaagaggaagagaggtgtatgtccaattccaccataaaccaacaattccatagtgtccaaatgatatgagaattcccaaagtctaaaattataaaaccacctaatgttgcctaattaatcagcgaagcatctacctaaattcatactagtggaaccataaatagagtgtccactagatggggttttgtttattctagggtgaacaaggtaataataacaatagcaataataatgtcttaacaaaggtaaataggcatggctaaataaaacagtgataacgcgggaatttaaataaagcggtaatgcattaatttaaatcaaaataattttataaactgggattcaatatgctcaaggatgatgtgacttgccttgctcagagagaacggccttccgaaccttcggcgacgaccgcgaaccacgcttcgggaacctccggaacgacgaaagctacgcgaagcacacaagcaaagctacaagcctataaagaagcaataacaacacataaaaagaaagcacacagttctttaggttgtaacaaacattaggagacttgaacgggtcgattcggagctcgtatgaccaggatatgatcatccgaagtttaatgctgttatatggagatttgcggattattataattaagctttgcaattataaaacaggtgtaagcgctagcctggaaaagacaggaaggctgcgccgttgacatgcggaccccacatgtcaacctaaaggaccgcggtagaccgagtacacagagtcggtccacgggtcgacggaagcggatcccgtgtgtcaaccgaggcgagtggccgacaaacggactccactagacaccacacggactgcacacgtggaaaccatgcggctaccgagcggacacactaacacggtcaccacgcgcacaagcgaacgactgccgacgccgatacacgggtaccggggccgacaaccgcacaacgggcacgggcgacaccgaaaggacgaggacagggcagcgagggagagggaaccttaccaccacgcgacgaggcgtgggaacgacaacgacgaacgggcgcggcggagacagacgggcacaacggagacgaacggcgaggggacggcttcggcggcgatccttggacgaaggcgagacgcggccggcacgaggcttgacgacgcggagccgaggacgaagacgaggacgggggctgcagcgaccttgacgaag

SEQ ID NO: 26183 - DNA, 523 bp, Oryza sativa
gaaagcagcggtgaattcaagccaagtgatagttcagcagtagtcctgttaaggcggaagtgatcccaccattcagaggcagggccatgcaactgatgtgatgcaaatgagaccttctcctgatcagtacactgaagtaaatccaacttcttctctatggcatgcagccaatcactagcttcaacaggattagtggtactagagaaaacaggcggcctcacacgaagaaattctgctaacttgttctgtggaggtgcatgattatttccttggttttgctgattctgaaattgctgcatcatcatgttcataagctgtgtctgttgagcaagaacttgagcaagagtgggattctctccattgttgttgttattggggttgttgggaccattcccattgctgcgagtgttcaccatctggcatgggcagggcacaagaagagaaaccggggaaactacttaggacagagaattactttaacttttattgatcttaactgagtttcattattacaaactaaaga

SEQ ID NO: 26184 - DNA, 609 bp, Oryza sativa
cggcggtgcttctcccttcatgcggctaattcgttctccaaacgatccacgtggtcttctaacttgcaaatcttaccacgattccggtcttcacgatcttgagcggctaacacagtctccgcacgactttcatccatagcccacaacatctcaaaccaaatgcttcgtggtagcatcattctcaattccttcagtgtcaaggtaactgccacggtcacttccctggggttggcgaggatggtagcgatactcagtgtcggccaattgatcactgtagcgatcacggagctctcctatggcgatccttgccacctcctgacatgcatggatgtagtttcttcctccagcttcaaacatcactgaggggatatcttcactattactgttcaaggtgactttgactcggcacttctcttcatgacgatcatgaggaatctgggcataaaaaggggcagtcccaaatccaatgacaaaggacatcgtacgcaactcctggacaaaaccctcaacaccaaacaggtactcaggcttgtaacgcggcatctaaagacaagtgaaaggaggtagttaaaacctttatccaatctcatagcacaagtttttggatta

SEQ ID NO: 26185 - DNA, 684 bp, Oryza sativa
ccgccgttagggtcgccgccaggccgcgccgtcaccgccgtcggattcgcgtggccgagatccaccccgtccacctctcctccgtcaaggttcgtcgccggagccctcatcccctcgcgcacgggtgagcaccacctctaccgctgccttcggccatggtttccggtcgccgtggttcatctccctctctctaatccctctctcctccttccttagggcaccccgaagctcgtccgctcgccgacgtcgtcctcccgtggcttgccgtcgccgttcgccatcgtcttcctccgcgccggccaccctcggtgaggcacccctcccttcttttccccttcctctcctcttagtgtcgcgcgccgtcgccttcgactgccgccgccgcctcccgtgctgccggtcgccgccgtcgttggccgcatgccgtcgccgctagacctagccggccggtcggttttgatgccgagccgagccggcggccgcctttatcgccgcccgttccctccccttcctagccgccgttagcgcagccgcctccgcatcgcctttgcgccgtcgccttcgccgccggttgtcgtcgccggcaacgcgttcgcgcgcgcgccgtcgccgtcgccgcggtcggtcggccggccgtgagccaagccgagccggtgccgctgccccttctctcccgcgccgctg

SEQ ID NO: 26186 - DNA, 604 bp, Oryza sativa
cggaccattgccggaatcactgctggggtgcacaccattagcgcggtttttgccgttgctgccctcgcctgttgcgcggctaccagtcctggtgtagaccatctggagggaaaagcagacgggggggaaagaagaaaaacagatgctcagaaactaagctttattacaaaggaattaaaactgcaattgttctgatctgaattaaaacacttaaagagcaagcaaaaatccttattaagacagccatatcataggcacatgatatcgaccgtcgactgaccccaaacaagcaacctaaacacaccaactaacaagcagaagctagacagtcgataaactaatgggaaaaacgagcctaatgctcggaacggctcctgcggtcggtggagtcgaaggcgtcctcctgctcgtcaccaagtccctctgagcgactcctggagcctggcagatacgtctcgccgctgccactgggagtagcagacaaccaacctccggtgccactggctggacctctggcggctgatgctggagcgaaggagagagcggactcgggagctggagctggagctgcaggaactgcgggcggaactggaggtgctgcggg

SEQ ID NO: 26187 - DNA, 856 bp, Oryza sativa
gaagggagctcacttttgaggaaggagattacgtgtatcttcgtgtcactccgctccggggagtacaccatttccagacaaaaggcaagttggcaccacgcttcgtgggaccatacaaaattttggaacgaaggggagaagttgcttatcagctagaacttccatccaacatgatcggcatccatgacgtgttccatgtgtcccaattaaagaagtgcttaagggtacctgaagaacaggttgattcggagcacattgatatccaagaggacctaacctatgtggagaagccggttcgtatacttgataccagcgaaagaagaaccagaaataaggtcaccaggttttgccgagttcagtggaatcatcattcagaagaggaagcaacctgggaaagggaagatgagttgaaagccgcccatccgcacctcttcaccagctcctccgaatctcggggccgagattccgtttaaggggggtaggtttgtcacaccccgaagtttccctcccaagccaaaattgtaatttataaatgaccctaagaaaataccggtgcaaatcaggagaaaaccctaagaaagtaatgcaaataataatcggatttgacatgtgggactttttcttgagttctacaggtcgaaattcattaacaggatttttagtggaattttcagagctctagaaataattgtaaccaattaaaattgagcaagcaatattttaattccagggaaaacctttttcctttttctttttctttgacctctctttttcctcctttctttcgaatgggccgccggcccattccctccttccttccctcccccttactgggccggccgcaggccgaggccca

SEQ ID NO: 26188 - DNA, 774 bp, Oryza sativa
  unsure (1)..(774): unsure at all n locations
ccgcggttatgggcagtcaaccagattcaccgtgattagtctcaccctagtgtaatcttttgaatttggatagtttaggtggatggttgggcctgtcgcaacgtggtgtagcgttggacagtggatgattaatactgcttaattattacaactgttttcgcattcaattcctgtttataaatgccagtatttatgcaaatgaacctgcttagctatcccttgtggaatccctgcatcatacccccgttccggtatgacttgctgagtacagtgggtagtactcagccttgctctattttccccaatcccagagctcgagtatgtgtccgatggcgggttctccgaggagtaggctttgtccgtgccgtcgaggatgcctgtggagtggtgttcccgctgcagttcgagtcaaggattagctccagttatcttttgttttccgctgcatttttgtaagacttttatgatgtttgtaagacgtggatctgaatgtcaacattgttgtttgtgtaccccggctggtcctggacggggattttaatgcacattctgcttggaattctattcgggaatttctgggcgtgacaactagagggtcctatttatagctttggattaaagagatcggactcttcccgcaagaaatcggttcgggaaatctaaactcggtttttggggataaaatcgaaacgaactcgattcggataanatacccaaccatttgctccgattcttgaggggaaaaatagaggaggatgagaggataaaaaccct

SEQ ID NO: 26189 - DNA, 772 bp, Oryza sativa
ttacccggttcctggtcctgcgctccatggtgtccagaatcttcactggcctctccacgtaggtcaagtcttcgcgaccttcaatttgctctgagtcggcctgctcggatggcactcgaaggcatttcttgagttgcgacacatggaacacattatgcacgttgcccaagaggcgggcagctccaattggtaagcgacttctccgcgtcgagcagtgatacggaaaggacccacataccgaggtgcgagcttcccctttgtccgaaacctgtgtacacctcgcaatggcgtgacccgaacatacacaaaatcatccgctgcgaattccaggtcacggcgacggttatctgcataacttttctgccgggactgtgccatctttagattatcccgaatggttctgaccttcgcttcagcttctctcaggatatcagtcccgaacacttggctttccccaacttgatcccacattagcggtgtccggcatttgcgcccatacaacgcttcataaggtgccatttgtatgctggcttgatagctgttgttgtaggagaactcggcataggggagactcttatcccaggtcttcccgaaatccaggacacatgcgcgaagcatatcttctaggatctgatttagacgctcggtctgcccatctgtctgcaggtgatacgctgtgctgaaatttaatcgggtacccagctcttcttggagcttcttccaaaagtgaaaggggaactggcttcccctatcaaatacaatttttttgggg

SEQ ID NO: 26190 - DNA, 1005 bp, Oryza sativa
agggcagtgcagtaacttttccggcttaaagcgtctgccaccacattggctttacccgggtggtagtgaatactcatgtcatagtctttgattagttccaaccatcttcgttgccggagatttaggtccggttgggtgaagatgtatttcagacttcttatggtccgtatatatttcgcagcggttgccaatcagatagtgcctccagatcttcaaagcatgaaccactgctgccaattccaagtcatgcgttggataatttccttcgtgtggacccaactgccgcgaggcatacgcaaccactctgccctcttgcattaggacacatccaagtccgtgacgggatgcatcacaatagacttggaagtctttcgtcgggtcgggcagaatcaaaactggtgcggatactaatttcttcttgagctcctcgaaactcttatcgcactcagctgtccatttaaacttctcatctttcttaagcaactgagtcatgggtcgggcgattctggagaaattttcgatgaatcggcggtaataacccgcaagtccaagaaaactccgaatctgcgacacggtcttaggtggggtccatttggtaactgactccacgttcgatgggtcgactgccacaccctgagctgtaatgacatgacccagaaattttacttccgtcaaccagaagtcacacttgttgaacttggcgtatagctggtgctccttcaacttctcgagtactagacggagatgttgttcatgttcctcctcggactttgaatagataagaatgtcgtcgatgaacaccacaacaaacttgtccagaaattccatgaacactttgttcatcagattcatgaagaatgcgggtgcgttggtaagtccgaaagacataaccgtgcactcatatagcccgtaccgagtggtgaaggccgtcttcggaatatccttttcccggattctcaactggtgggtagcctgatcacaggtctatcttagaaaacactttag

SEQ ID NO: 26191 - DNA, 912 bp, Oryza sativa
aaagaataagtaaaatccatgtgaaagcctccaacaattaaaatgtgcaaagttaaaagtcgaataagggttggaggatttttgtatatttcctaaaagcctaaaatgcgtaaataaattttagtggaattttcagagcacaaataataattaagaagaaataaacaaagttaaagtggttttataaaaagaaaaaccctaaaagtctttttccccccttccccctcttgggccggctcggcccacctccctccctctctctcctctcccccgcggcccatcggcctcctccccgcgcgcgcgccgctgacgggcgggcccgcccgccaccctcgctgacgggtggggcccacccgtcatcccgtacctcgcgccgcacctgccggctcgcccgtgccctagcgccgccgccgccgcggattccgccgcatcccgccgtccccgcgcgcaataaagagggggaaatcattccccgtgattccctctccctttcccccctacttttccctctctctctccctcggattcgtttggaaactctcccgcaaacttcgccggcgcatcaatggcggccggatcttccgcgaccgattccccctcatgcggccgctctctcctcctcccaacactacataaacactccccgggcctccctccttcgtttccgccactcgccgctctctctccccgtcggaatcgagctcgggccgtcgtcctctctttccgccgtcgccgccgagctccggtccgccgccgtcgtcgccccgggcctcctcccgtttcggggtcgccttcttcgggttcgccgcgtcctcgccgatctcgtccaccccttcgttttgcccgccgaccgccggaacgccgccgtcctcgtcgacccgagccgggccgccgccttcctccggttcggtc

SEQ ID NO: 26192 - DNA, 913 bp, Oryza sativa
ccttgaatagtaatagtgaagatgtcccctcagtgatgttcgaagctggaggaagaaactacatccatgcatgtcaggaagtagcaagggcgccataggagagctccgtgatcgctacagtgatcggttggatgacaccgagtatcgctaccatcctcgtctaccacatggaagtgaccgtggcaggtacattgagagtgaaggcattgagcatgatgctaccacaaggcatttagttgagatgctgtgggctatggatgaaagccgtgcagagactgtgttagcggctcaagatcgtgaagattggaatcgtggtaagatttgcaagttagaagacaaggtggatcgtttggagaaggaactagccgcgttgaagggagaagcaccaccgcagaaggccaggatttgtcttaccgcaaggaagagagctctatttgtccctcgctatcaattggcgccaaaagttcgtgtggtggagaaagaagttgccccagcagatcctccggtcatcatcataagtgatgatgaagaagaagaatccaagcgcacccattccaagattgagtgggtagcaactcaagatgatgaagacgagccgaacgagcctacaatcgacctccgatgctcggaagaactagagtgacttgttaagtcgttgtcttagatcgttgtgttagtttgcttgctttaagtttgcttgtgtgtgtctcgcatgtgatttacatcagtggtgggatgtaagtgcatgcgtttgtttgcttttgagtgttaggaagttggtgagtttagtggtgtgagagtcttcagtttgtaataatgaaactcagttaagatcaataaaagttaaagtaattctttatcctaagtagtttcccccggtttctcttcttgtgccctgccagatggtgctcac

SEQ ID NO: 26193 - DNA, 2871 bp, Oryza sativa
  unsure (1)..(2871): unsure at all n locations
gtcatcaatgaaaaccaccacaaacttatccaagtattccatgaacactttgttcattaagttcatgaagaaggcaggagcattggttaaaccgaacgacatcaccgtgaattcatacagtccgtatcgcgtggtgaatgcggtcttcggaatatcttcttcgcgaatacgtaattggtgatatccggaacgaagatcaatcttggagaatacagtggcacctttaagctgattgaacagatcatcgatccggggaagagggtacttgtttttgatggtgacttcattgagagctctgtagtcaacgcacatcctcttcgtcttgtctttcttctccacaaaaatcacaggagcaccccagggggaagtacttggacgtatataccccttttctttcagctcttccaactgtttcttaacttcggccaattcatttgctgccatacggtagggtcgcttgtacagaggagcggttcctggagcaagatctatccggaactcaatctctcgcttaggcggcataccaggtagttcttccggaaacacgtctccgaactctctgacgatgggaatttctgacagttctatctgatgaagttctgaactactgactgaggttgggggtgcaaagaaaacaaccggttgttccggccctcggtacagagtgacagtgcgtctcgcgcaatccactactccttggaattgagccaaccaattcatcccaaggatcacatccaagttcttggtgcctagcagaatcagatccgagggaaaaggaatcccctgaatttctatagggacggcagggctataatactttgctgtcataacccctccaggggtggtgatgagcagagggtttctaagcctttctacccccaactgatttctccccacgaatggcacagatataaatgagtgggaagctccagagtcgaacaaaatggtagcagggatggaatgaatgaggaacgtaccaacgatgacgtctggagttgtcagcacgtcctcggccgtcacatggttcacacgaccccgaatgacgtccttaccaccgttgttggggcggggaggcgcttggccttgctgacgccttggcttcgggcatttatccgcaaagtgcccgggctcgaagcagttgaagcacagacgctgcggaccttgagcgtccctgcggccttgaccaggctgcacagtcggtggaggaggacggggcgcacgagtcccttgttgattctgctcctgctgcggctgtgggacgcgcaccacgaattgaggtcnangcgcggagcgaggttgctgctgctgctgttgctgctgcgaggaggatccccctggatagggattggtgtagcggaccctttggttagcaccctgttggttgtggaaattcgccaagcggcgcttgtgcgactccagttccttgtgcttggcttccaagcggatgctcttgtccaccagacgttggaaatccggataatccccggagactagacagacggacagctcagggtccattcctgccaggaacttctcttgcttctcctcatcttcccgcacatcctccggagcgtaacgggccaggttgttgaactcgtgcaaatactccatcacggagcggttgccttgcttcaactctcggaattcccttttcttaagggccacgactccggcgggcacatgggttctccggaaagcggcggtgaagcgggcccatgtaataggctgtccctctggctgcgtagcctggaaatggtcccaccatagagatgcgggtccctgcagctgatgggcggcgaagatgactttctcctcatcgctgcactgcacagtgtctagctttttccccacggcatgcaaccaatccaacgcatccacggggttgttggagctagagaaggtaggtggacagatgcggaggaactcggcgagtttagagtgttggggaggtggtggtggagcattatgttgtggcggattttggaggtggtggagaaaagcagtcatcatgttggcctgctgggcgaggatttgggtgagaatggcgttggtatctggtggtggtggtggaggcggaggaggaggtggaggtgggctgccatggttgttgtggttgctgccttcgggttggttgccatcactggtggcagcatttctcctggtctcaccatctgaaaaccccacacagaaccagcaaacagagagagctgacaattaaagctaaccacccacgactaccataattcttgaatttattactgctattaaattggttcattaaagttcaagttgcttaaacaaataaaataaagacaggctccgacacagttatgccacacaccggcataaccatgccccacacaacccaacaagaagacaaacgagaaagaacacacgtgcaagcctactaactgctcgtctactgctgcgacgggccaggacggaaggtgagcaacagcgcatcctccgtgctaccaacgccggaggcttcccccttctggggaaccacgggcgtgggctcggcacgaggggtctccacgaagcaagtccacgccagggactgacgaacaagctcgggcctggaggtgctcttgcgggcggtgatcttctggctgcggcagacgcggcgacgcttggggcggcagacctctccctgggcgatcttgagttgatgcagctgcgcctccaccgcatctaggtcctttttgagctgcaggttctcctgacgcagctccaggatcttcatgttgttctcgaccatcccacgacgcaccatctgatggaagtcgatacgagccgcgtcgtacgcctccaccatgcgcgccaggtgcacgatggtagcgtcatcctccgagctagcgtcccggaagg

SEQ ID NO: 26194 - DNA, 3058 bp, Oryza sativa
tgctaacaaaaaagcttggagcaactaaatagccagggtggatggaataaggactttcgtgagcttcctgaagtatcaactgtttaagttctctgttatctggaacgcatacccgatttccgttccatagggttccgtgttcatcctctgtgaaaccagcggctttaccctgtttcatattcttgaggagtccatgcatgtctggatcattcttctgagcctcgcggatttgatcgagcaaggtaggcttggtttccaacgcagccaaaaatccgcgactaactatgtttaggttcagggctgccatctgttgattaagttccggtggaatgccacggatgttaagagtgttgcaatggctttttcgacttaaagcgtcggcaaccacgttggccttaccaggatgatagtgaattcccacatcataatccttgatgagttctaaccatctcctttgccgaagattcaggtccgactgagtgaagatgtatttcaaactcttatgatcagtatatatttcacagcgattcccaatgagatagtgccgccagatttttagagcatgaaccaccgcggctaactccaaatcatgggtagggtagttgccttcatgaggccgtagctggcgtgaggcataggccaccacatgaccatcctgcatgagcacgcaccccaatccttggcgcgaagcgtcacaatacaccatgaagtccttgcgagtatccggcaagattaacactggcgaggcaaccagcttttctttgagagttctgaacgccttctcgcattgcgggctccacacaaatttctcttctttcttcaacaactgtgtcatgggtcgagcgattttggagaagttctccatgaacctctgtcacgaccggaaataacccaacgggcgttccttacgtgcgtgcattaatccttgtcccaggaggcaaggtacaccaaaagttgatacaattcagagtttaacaagcggaagcgtaaatagttaatttattacatgggcgacgaaggcccagcacacacaaagacaaacgagaaacaacggaagactagggcgacgaccacaggcgcttgacggcaggcacgagctagacaccaaagccttcatcttgcaggaactcctcttctgggtttgggaaaaattgagcaagactgagtacaaccaccgtactcaacaagacacacccacaagtgcagaataaatgcaagggagtacaagggagttataatataaagggttagggtttgcagtaaacagcattaaaagacacttagttgctcaaagctattttgtaaacatgattctagagctatacaatattattaatcaaggccgtgaacccacacgaacctgccttaacccaaggcctacgatgattcagaccgaactggcaacccgaccctgggtcccagctcgtcccaagccaacccaggccaaccattccacattttagttgttaagcaggttttaagaattaaaacactaactttggtacattgctcggcttgcccataaccgagggcgcggctattcgaatagattatactctgatcagaggtgtagatctttacccacaagacacatcttcctcacatgtaaccacgtgccacataccaccacggtatacagacggaagacatgacatagtttccaacccatcctagccatagacaagagtaccgacccaatcccacctacggccggaacacccgggacaggcaggcaggactgagcccctagcaggaggacaccggccctgtgccatgacatctcgactaccgggccgcagctcgtgtagccttcatttgccctggagaatgtccatcgacccccgacttcatccacctccatccgtgtacttttgtttataaccagactgagccacaaactaagccttacccactagacatgtggaagtacggtagtgctttgcaacagaggcccgaagaccggtccttatatggccgaggtgctactatcaaaaccatgcaccccgagcccagcctaaaaccattttggggattttgaatagagggggaggtgtgaagccaattccacaataatccaacagttccacaagtgtccaggtgatatgaatattcccaaagtctagagttgtaaaaccacctaatgttacctaattaaaagcgaagcatctacctaaaatcatgctagtggtaccatgagtagagtgtccactagttggggttttgtttaatctagggtgaacaaagaaataataacaataacaataataaggtcataacaaaggtaaataggcatggctaaataaaacagtgataacgcgggaatttaaataaagcgataatgcaataatttaaatcaacataattttacaaactgggattcaatatgttcaaagatgatgtgacttgccttgctcgctttcccaaacgccggcttcaacttccacgaagagcggatcttccgaagctgcagcgtctacacgaccaacggaaaagaaaaggcttttactctaataaactccatataacaagcagaaacaaagcacaaaaatgggttcttgacttcttaaggaaaaattagagacttgaacggtccaattccgagttcaaatggccaagttatggccatttgaagtttatatgctctttaaatgaatatttgcgaatttctttatttaaattttaatttaaaaagggtttattgcgtcagccgagggggagggggtgcgcggaccgggtccatgggagtggggcccacgcggcagcctcacggtccacggtggaccgggtgcaccctggctcacgccggccggcgccgtgggccccacacgtcagccgcacccgagcgcgcgggcggctgacagccgggccccacgcggcagccactcggcgcgcccgagggcggccatgccggcgcggtcgacgggaggcggcttccctcgcccggagaccatcagctcggcggagcggcggccgagagaggggagggaagggggaaaggaggcgacggtccacaactcaccccgaggcgacggcggcgacggaggaggcggccagagcg

SEQ ID NO: 26195 - DNA, 1404 bp, Oryza sativa
cagcatttagcaaacatttcagaatttaataaaacagttaagtaataattaaacaatattaatccaacactatacaacataccctgttgtataggcccaaccattctatacaaccataccggctgcacagttctatctccaaaccaggaatataccattccaaaccaggagctaatcaaattattaccaattatagcatcattcactaaggcgagaagtgtgaaactaatcacgaaagacactgttagacccgcccataactgcgggcacggctattcgaatagttttactctggccagaggtgtaccactgtacccacaagacacaaccccacatcatgtcaccatgtgcctcaataccaccacggtatctcggaaaggagttgtgacaatacccctcgcataacacaatccactgcagcgcaccgttcctggatcataatcacccccttataaacaaggcatggactccccagcgacccccgtggacttctcgccacttctcagtctggcgcactataatgaatcacgctatacaaaagataaagccgttgcccacgctggcttgtggtaggcatgataaatgtttcacaaccgaaacttgtgaaccggtccttaattgtcatgagcacaaccatcaaaaccatatgctcacaacccaccttaaccaagttttaattatcaattaattaacatcgcactattaaccatcgtgagctaccatttaatgtaaccataattaataataatataacataacttataattaacccctttagtcaactaatgtttctaagcatagttaagcaaacttacatatagcatttagttgaaccaatccaatatataaggttcaagctaatcaatttattacccaaggtatcaaggaatagggcatccaatacaaattggccataacaaaggaataggttcacaccacccggtgacattcgaaaataaatgcacagttgaaataaatagagaatttaaatataggatcaacatgctcaaaggattgtgtttaggatctgtgtgacttgccttgcaataatcggtcttcaattaatcttcttgaatacttccagcgcactcacgaaccttcgcaacgacggaaacgacaagctaacacgcaaaacaaagtaaaagactaataaaaaccaaataaacaatacatataaaataaacaaacatgtagaacatgattttagatgaattatgagacttgaacggccctattctgacttcaaatgaatttaatatgaattttacaagattaaatctaattaaagcccattaaaaagaattaaataaatttaattcaatttatggacaattttaatatgtagatctttattttagaaaaatttagcaacttgaaccacctgaaacgaagctacggttattt

SEQ ID NO: 26196 - DNA, 916 bp, Oryza sativa
gacttttagggtttttctttttttataaaacctttttaactttatttatttcttaattatttttttgtgctccgaaaattccactaaaatttatttacacatttcaggcttttaggaaatatacaaaaatcctctaagccttgtttgacttttactttgcacattttaatttttggaggctttcacacggattttaattattctaggcataatttaaaggatatattttagggtcgttttgggacgtgacaaatctcaatgacaataaagagaagagacagtggacgggtcgtagaggagtataatcgcaacgtttgacgggacatctggaaattataaaaacgaaaccctatatgacaataaactctaaaactataaaatccaaattttaaaggttccagaaagaatgaatagaaatagtgatagatcgagtaagcaaataaagaaagagatgacataggaggtagcaactggtgtgacttttaaaaactatataattagaaacacgaggatgatactggtgtaacttttaaaaactatataattagaaacacgaggatgataaggtttggtctttcaaagtcttaagacaatgagatagctatttaataaattttaagtagaataatactaaaaaatatatgattttgtttgggtgctagccgcgcaattgcgcaggccacccaggtagttttgaggtatgtggcaggtactctgaatctcggggtggaattcagaaagaagcaacaacaggttcctcagctgaatggctatagtgacagtgatatggctggggatattgatgatagaaagagtacaaccggagttctatttaaattgggagacagtttgatcagttggcagtcacaaaaacaaaaggtggtagcaatatcttcgtgtgaggctgaatatatag

SEQ ID NO: 26197 - DNA, 703 bp, Oryza sativa
aactaaacaaacatgtagagctcaattttagatgaattttgcaagttgaatggctcaatttggagttcgaatgaattagatatgaattttagaagttttgagccatttaaatgaatttctagaattattaacgaattatgacgcaattattatttatttttccaaaggaaaagagggttgctgacgtcatcaaaggggaggggcggcgccggcaagcgggccccaccggtcagcgggacaagggcgccggtccaccgtggaccgggaccaccaaggcggtccaccgccggtccacgggaaccgatggcccggatcggcccaaaccgatcgagcggccaggggcggcgcggctggggcacagcacggcacaaagccagctggccaaacgacggcgcgcggcggcgcggccacccgcggcgacggccggcgacagcgcggggaggagaggagggatgctcaccaagggcggcgacggcgagactacaacgaggaagccggcggcgggctcctcggggaggcaacggtggtccggtggcgtaccacgggcgcgaggcggcggacggtgaccgggacgaccggggcgcggagagggcgatttcagtggttcccggaggcgagaagcggtggccggggtgcggctcggagttgccgatccgagggaggaaacggcgcagtccggcgtcgaccggggaggcgaggcgac

SEQ ID NO: 26198 - DNA, 2526 bp, Oryza sativa
tttatctggccccattttatattggaatttattaattaaaattagatcttcttttcaagacttttaaaattattttctagaaattccatttaaccaccaatttatataatttgaatttttagggtgtgacaaacctaccccccttaaacagaatctcgtcctcgagattcggaagaactggcgaacagatgcggatgagctgacttcaattcatcttctcgttcccaagttgactcttcttccgagtgattactccactggactttgcaaaaacggataactcgattcctggttcttctctcatctatttccaagatacggattggcttttcaacataggtcagatcctcttggacttctatttgttcaagattagctccttcggtaggtacccttaaacatttcttcaattgagacacatggaacacattatggactcctgccaaagattgaggtaactccaactgataagcaacttctcctcttctacggacaatcttataaggtcccacaaaacgcggtgccaattttcctttggtgtgaaaacaatgaactcctcgaagaggcgtgacacgaagatacacataatctccttcttcaaaactcaaatctctgcggcgattatcggcataactcttatgtcgagactgagccacacgcaatctttcttgaatgattttcaccttttcttctgcttcccttaggatatctgtcccgaaaacctgacgttctcccgtttgatcccacaaaagcggagtgcggcacttccgaccatacagtgcttcgtacggagccatctgaagactagcttgataactgttattatacgaaaattctgcataaggtagattcttatcccaacttccaccgaaatctaaagcacaagctctcaacatgtctttcaaaatctgattcaccctttcggtttgtccgtctgtctgcggatgataagcagtactaaagttcagcttagaacccatctcttcttgaagtttcttccaaaaatttgaagtaaactgacttcctcgatcagacactatcttcttagggacgccatgcaaacacacaatccttgccatatacaattccgctaagcgacttccagaataagttgtctttaccgaaatgaaatgtgccactttggtaagtctgtcgactattacccaaatagagtcatggccagatgacgttctgggcaaaccagtgataaaatccataccgatttcttcccatttccattcaggaatcttcaaaggctgcagcaaactggcaggtttctgatgttctgccttgactcgttgacaaacatcacatactgctacgtattctgcgatttcacgcttcatacttgcccaccaaaatctttccttgagatcctggtacatttttgtactaccagggtgaatagagtataaagtatcatgggcttctttcagaattgcatcttttaaatctttgttgtcggggacacagattctctcgcccaaccatacagttccgtgctcatcctccaagaaaccaatagcttttcctcttctcatattcttcttgatttcttgaatatcagaatcattaatttgggcttctctaacttgatcaattagagtgggcttcgcttctaaggctgcaacgaaacctctactgacaattcccaaatttaatctttcaaattccttgcataattccaatggcaactgtcgtccttctgtagcattgcaatagcctttcctgctaagagcgtctgctacaacattagcctttcccgggtgataatgaattcccatgtcataatccttaattaattccaaccatctcctttgtctcatgtccagatctggctgagtaaagatatactttaaactcttgtgattggtatacacctctgtacgagtaccgaaaagataattgtcgcgtcccaaatcgactctaaaatacatcctcgaaatcgtgctgagaataattaaaattcatgtgaaagccttcaacaattaaaatgtgcaaatttaaaagtcaaataaggcttggaggatttttgtatatttcctaaaagcctaaaatgcgtaaataaattttagtggaattttcagagcaaataataattgagaagaaataaacaaagttaaaaaggttttataaaaagaaaatccctaaaagtcttctttccccccccctttccctcttgggccggctcggcccaactccctccctctctctcctctcccccgcggcccatcggcctcctccccgcgcgcgcgccgccgacaggcgggcccgcccgccaccctcgctgacgggtggggcccacctgtcatcgcctacctcgcgccgcgcccgccgcccgcccgtgccctagcgccgccgccgccgccgaatccgccgcatcccgccgtccccgcgcgccataaagagggggaaatcactccccgtgattccctccctctttccccctcttttccctctctctttccatcggattcgctcggattattcccgtaaagttcgccggcgcatcaatggagcccgaga

SEQ ID NO: 26199 - DNA, 1880 bp, Oryza sativa
tctttttagctttaggaacatgaaggatatttttcaactgaatattgcgtatgggggtatgaataatagaatgaccaatatgcttaatgtccatacctgcaccgcttgccgtgtgaatctgttctttgccgttgtacttctcatgggttgtcagcttgtccagttctcctgtgatgtggtcagtggctctggtgtccatgtaccaatttgtatctacaccataggaagccgcagctgctgtttttgaatctggaatgaaattttcatcatacctgtaccagcagtctgccaccacatgtccaatcttgccacatagctgacaggtggggcgcggtttgttggagaagcgcgcgccgccaccgtttcctcgcccccggcctccgcgatcgccgcgaccaccgccacggacgcgaaacgtgctggtgttgccggtgttgacgttgttgctgaagccgccgccgcctcccttgcctcctcgtcgtgcgctgttgacggaggaaccattagcctgctgtcgcagcttggctcggctctcaaaactcaggagctgggtgtagatttcggcgactggtacagcctccgccttgccgacaagagtggagacgacgggctcataatcgtcgtcgagtccggcgaggatgtacgacatcatcttctcgtcatcgaggggcttgccggcggatgacatctcgtcagctagcgtcttcatcttgccgatgtactccgtgacactgagatcgcccttgcgggtcgtcaacagtgcaagctgcgtgttcagagcacgcgcacgggattgtgaggagagcatcgttgtgatcactctccatgtcgcagccgccgtttccagattgacgacttgggtgagtatgtcctttgatacagatgcaaggagaaatccaagcacctgttgatcgacgacaacccattcctcataggctggattgatcttggtgatgaccttgtcgcctttcttgacgtcgatcgctgccgacggagcgcgagtcgcgccggtgaggtacccctccatgcgggcaccgcgaatgatgggaaggatctgtgtcttccatagaaggaaattattccttgtgagcttctctgggacaacttggccggagagtggattggtggtggaattggaggaactcgccatttttggtagatgcgatctcacgcgtgcatgattggctctgataccatataagttggcagaagcgttctaacctcgttagaggccgctgtacgtgttaatatatgtttgggaaaagcccccaaagtggcgcatacaatggtgaagattggttacaaaacagaaaacaaaatctcttcctatcttatcatctcatgcgttgttatctcacgtaacaactctatgtaacaaacctctatctctaacaggctgcaggcacgcgatgcggacaaatgatgcagggacaggacgccagtgctgacagcgatgcacctctggtttccttcccagccgtagcggcgctggttcactacaataattttacagttaaataaatgttgccacaatcagacatactataaagggaggtcaaattggcatgtaaaatcatattgcttgtattgtttcaatcaacatgcttctctaacttccgaagctctcataaaaactttacgtgctttcaaattaatatattcatcattcaacactattagcaatttaactcccaaaaatgacatttcaatgtagagttatctaaccagcggtcctgtacttggcgtctagagccagtgggccttttagaatatcggaaaagataaatgataatacatataaacttgaattgcctctaaagtttgaggttagtcccacatttaacattttcgatttggagctatatttgagagaaaaagat

SEQ ID NO: 26200 - DNA, 1182 bp, Oryza sativa
agaaagaacacacgcgcaagcctactaactgctcgtctactgctgcgacgggccaggacgtaaggtgagcacagccgcatcctccgtgctaccaacgccggaggcttccccctcctggggaaccacgggcgcgggctcggcacgaggggtctcgacgaagcaggtccacgccagggactgacgaacaagctcgggcctgaaggtgctcttgcgggcggtgatcttctggctgcggcagacgcggcgacgcttgggacggcagtcctctccctgggcgatcttgagctgatgcagctgcgcctccactgcgtctaggtccttcttgagctgcaggttctcctgacgcagctccaggatcttcatgttgttctcgaccatcccgcgacgcaccatctgatggaagtcgatacgagccgcgtcgtacgcctccaccatgcgcgccaggtgcacgatggtagcgtcatcctccgagctagcatctcggaaggtggcgtagtcgcgggctcctccgtggcgagggtggtagcggtagggcgagtgctgcaactcgtctgggtagcgctggtgaagagtgccgatggcgaggagagcggcgctctggcaagcggcggggaaggaatctccacccgcggtgactgtcagcgaagtccgctcgggagagccagcgaggatcactgcagtaacctcccaaccagcgtggggctctgcatcgtcaccctcctgctccggaagcggcctggcctggtagtccactccatgtggataccccaaggccacgcacatgccccgcagctccaagacgaaaccagtcatgtccaaaccacgacgggtgacgctgccggccatctacaaacaaaaacaaaaagaaaacaacattttaaaggtcagattttggcgataaatgaagcagcaagacagagatagactagacagttttcacaaataacaaaggatttttatttttgaaaatattgctaaggcttgggatctacggctcgtcctaaggtcaagggtggctctgataccaacttgtcacgacccggaataacccaacgggcgttcctgacgtgcgtgcattaatccttgccccaggaggcaaggtacaccaaaaagtgatacaattcagagtttaacaaggcggagcgtaatagttaacttattacatgggcagcgaaggcccaa

SEQ ID NO: 26201 - DNA, 1384 bp, Oryza sativa
cccgtataggaatatgagaaagaatttcaatggacacaaagatacagccggacccccggcagagctaacagggatagaggtgcacaacttagtgatgggaataaccaacgagtttggaaaaaagaggaaaattggaaagcgaaaagagaagagcacatcgaaggaaaaaacagaggagcatgtggaaaaacaaaagacaaaagagaggagcatgtggaaaaagaagtcaatattttggagactaccatactggaaggatcttgaagttcgccactgcatagatttgatgcatgtcgagaagaatgtatgcgagagtttaatgggattactgcttaacccaggtactacaaaggatggtctcaacgcccgacgagatctggaagatatgggtgttcgctcggagctacatcccataaccacggaatccggcagggtttaccttcctccagcctgctacactctctcgaaagaagagaagattgatttgctaacatgtttgagtggtataaaggttccatctggttactcatcaagaatcagtaggctcgtttcactaaagatcttaagttggtaggaatgaagtcgcatgattgccacgttcttatcacacagctgttgcccgttgcaataaggaatattttgcctcctaaggtgcgacacacgatccagcggttgtgttccttcttcgatgcaatcggccagaagatcattgatcccgagggactagatgaactaaaggcagaacttgtgagaaccatatgtcatcttgagatgtactttcctccaactttctttgacataatggaacatcttccggtgcaccttgtgaggcaaacaaagtgctgtggttcagcattcatgacgcagatgtatccttgcgaaaggtacctggggatccttaagggttatgtacggaaccgttcacaccccgaggggagtatcatcgagagttacaccactgaagaggtcatcgaattttgtgtggactacatgtcagaaacatcttcaattggattaccacgatctcatcacgaagggaggcttgatggtgttggtactgttggaagaaagactattaggttggatcggaaggtgtacgataaagctcatttcacggtactacaacatatgactgaggtggtgccgtacgttgacgaacaccttgagttatccgacaagagaacccaggccgatcagagagttgggtcaggaataagcacatgtcttctttcaacgagtggctgaagaaccgaattgccaggttgcagaacttgtctagtgaaacacttcagtggttgtcacagggtcttgaatggagtgccaccacctggcaaggatatgacataaatggatacacctttcacacggtaaagcaagacagcaa

SEQ ID NO: 26202 - DNA, 5419 bp, Oryza sativa
acgacgcccccctcatcctgaacatgatatgatgaatggatgaattgcagtttggttggatgacttgcttgaattgaatggatgaattgcatgattgatgaaatatatgaggtgatgaatttgcactgtttgtggatgaaatatatgcactgtttttagtctttttgtattagatgattttaggattaattttggccttggtatatggaatatatagccagggttaattttggccttgattaattttggccctggtgattaattttgtggatgaaatatatgctactgctgttatatggccctgctactgctctgctgtttatgtttctgttgtttctgtttatgtttctgttgttgtttatggccctgctactgctgttatatggccctgctactgctctgatgtttaattttggccctggtgattaattttgtggatgaaatatatgctactgctgttatatggccctgctacagtgctactgctctgctgtttattaattttgtggattaaaaataatgactctgctgttatatggccctgctactgctcttattgcgcctacttgttctttttttttatctacaattgtttatatacatgatttatataccactgctgttgttgcccctgtacttcttattaaatggccaatgatgaattgctcaataaaattctatctatacctgttcttttctttatggataagaacagactatctacacttgttgatttatatacccttgctgtcaaggatgaatttccctctgctgttgctgtttatgtgaatttccccctgttgttgctgtttacgtgaatttccccctactgttgctacccctgtggcatatatacccctactgctgttatatggccatgctactactcttattgtgcctacttgttcatttttttatctacaataatatatgcatgatttatataccactgctgttgttgcccctgtacttcttgttaaatggtcaaggatgaattgcttaataacattctatctatacctgttcttttctttatggataagaacagattatctacacttgttgatttatatacccttgctgtctatgtgaatttccctctgctgttgctgtttatgtgaatttccaccctgctgttgctgtttatgtgaatctccccctgctgttgctgcccctgtggcatatatacccctactgctgttatatggccctgctactgctcttattgctactattatatggccatgctgttgctactgctctaatttcctgcacttgctcttttctttatggataagaacagatgaactacacttgttctattttatggataagaacagatgaactacacttgttctattttctttgggttgctttttcctcctagtagctgatttcctctttttatcccttcatgcaaatgattataattgatgcatatttctgagcaaaactgaggccatatctttcatagtataccccgtattacattggatctaatgctatttagtataatggtaggaaatttataagctttttcgcgaaaattagaccatgtcaacgcccggcgcaaacccgctctccccaatacctgcgaggatccaggaagaagcaaacccagccacggagacagttgccgaaggtcatcccgcgacaacggcggtccaacaacccaaaattcatggtaatttataggataaattttcaccacatgaccacataaattttagctagcaccccttagcaaatattggcttctgtttgtgctgcagaattgccacaggaacaacatacatcgatgtcgggcgggacaagtgcaagtaggtctagtagaaatccctagtcacaaaatatatggccgaccatagtgcaagttataagagaggttgacgctagtggtaggcccacggcgcccaggactgtcattggaagatggtctaactgctgcgggctagaggcacgtaagaacttcgggatcctccataaaaatatcgggaaggtcacagaagccgagaaagagcgagcttggacggcaatggagaaatggttcacatttccggctgaagcaaaggataggctcaagcggaaggcattccaaaagatgggcaaagcttggaagaattggaagtcgaagctcttcaccgagtttgtcaacctgcccgacaatcatacgccgttcgatgaataccctcaaataaccgaagcggtgtgggaggaattctgctctctcaagacctcccaagagtttagggaatcaagcgaggcacatcgcctactacaacagcggaatgagcacccgcatcggctgggcaccgcagggtacatcggcaaggaggcaatatgggcccaagaagatgcagccgctgcagcagcgaatgtccctgccccgttttcagacatccctgaacaaagagctcgcaactgggtgcgggcaaggggtaaggtcaacccggacggctctgtcacatttgagaacaaaagtgatgccgtcgtctatcaggaactggtgagttcactacttaacctaactaatttccgctcgtataaagtacaagttcgtataaacgactattttcttttctagttgggcttggttgctgaacaagcttcacaaagcgagggttgagtccgcgccgaagaggcgcgaagatgacatcctcacaaaggcacttggaaccaaagaacatcctggccgaactcggggaattggtagcgatgtgccctggaagcatggactctctcagtacagctcccaatacaggaaatgaaaagtctccaaggaagagagggatgctcgtttgaaggccgaacataaggttgaggtcattcaagaactagaagctagcatgaatgcaagggtggaagaaagggttaacaaggtcctcgccgacatgaatataccccgtcacaacacctgctgtgcaaccaactcctcgtgcacaacacgacgcgagtccgtcacagcataggagtagttgtgcatccacagaggtgccggcccctggtcttccgatcgcaccactagctgcagtggaccacatcgaggtaattgttgttatccgatccatatctaataaaagacatttacacgttccaatattaaattcaaactttcaccttatgcagggcgcagcacagtgtgtcctactagcgagagtccacccaactttcgctcctgaagtcgctgagggcatggctttcaagccctcggttacagacaaggtccacggcgcagacctactagctgggtatgccaaggtgtccatcgatatagtaaaggacacctggtcaggctatccgctgcccgtgcccccaaatgatgaaatcatgactttaggcgatgcgcgcaagacgttcatacaatggcccaaagaagacatagttgtgaagatgactcctcgtccaagtcgaccgacggagtttacacctcccaagtttaagctatcaattgaggctccccgtggaccggcattgtcagtacctcattctcctggtggagctgatatggacttggcagatatagctcaaagcttggctccaataaagaccacaagaaaggccgatagctccccaccacttgtcaagggccagaagcgtgaacacggcaaggggaaggtcggggagttggcgccggagccaaaaagagacaaggctgcgacgtcgatgccaaaaaggggcaaggctgcgccagctcaatttgagctaggcatgccattggtggaggacaatgtgttagccgtgatgggtattgcttgccgagagctacataaacaatacatggagctaagcaatgccaagcggaaaatgagggagtcatccatagttagacatcacgaccaccagccgttcctatcgtcgcctgcctatataactataggctttgatgacctcttcgaccttttcaggatccggaaagttggacactggtcttctaaaatgctactccttgtaagtgcataccttctatacttgtgatatgattggactatatctcctaattaaattagttctaatacgtaaatgttttaaggttgtgttggatcgagagtcgtcgccttggtaatcaggttgggttccttgatccatccatggtgaacgaggttaatttacgacagagcttcactgaggtggttgactatgtcaaccggtgtttatgggcccatcaagccaaggagtacatcatgtgcgcacacaaccaagagtaagaggacaatacccttcgtgtatattgtttttgaagttaaggttcttagtactaacactacataaccactgcgcaggcgacattgaattctcctagtcatcgtacctaagtggagtagggttacctaccttaactccaataagtccaaagattatgatttcagtgaaatcaccaaggccttaaatatggcttggggcccatatgtggaaaagggtggtaggcacaaggagggcaaggacgaactttatcatgacaccaagtttgcatgcgcacaacagatcggagaccaatgtggtttccacgtgtgccacaacatgttaacacttctaagagaggtgaaagatttcgacccttaggttgttgctaatggcgaataagctcatttcaatacctacattgctattgaaaacgtgctaattaacctcttatttattaaacagaaaggtagagctggcttcaagatctcacccatcaaccctcccgctatcagaggcgaagtgtgcgccttcattcttgcagaaataatgaacaagaaaggacgttttcatgtcaaatagactcatgaacttggctagataatttattgtgatgtaaaaagatgtttttataatttcttgcgatgtaaaaaattatgtttttatggagtgcaatgtaatttactttcatatgtgcaatatttatggtagtttactaaattgtcatcacatttgatcaactacgatttacgttgtactattcatctgttttctccttttttttcccttattgataggttgtggaggtcgagtacattatggctttaatccatttggtaagtatatatgcggttctatgagcaacgaccgaaattgtggctttcaaggggtgtgaatttgctgtgcaaatttgtggcatttgaactgcatatatgtgttgttggggatctgtgatgtttgagatggatctgtgatgttatattgggggggtgatgtatctgtgactagaatatatctgtaatgtatctgtgtttcagagggcatggctagcaaattctaagactagccaatatttagcatttatttattttttctgaaattaactcatcagtgacgggtcggaacaaaaatccgtcaaaggtaacctaacctgtgacggactagcaaataaagacccgtcagaggtgacctacttgagacgggcctttacttttggggccgtcacaggtagatcacctgt

SEQ ID NO: 26203 - DNA, 21857 bp, Oryza sativa
gtcactgcaaatgctaatgctctcacttttagaaggtcttttggggagagagaatctgaggaatggctagctattgtgcgatatcattaactctattgagttgtctgatggcccagatgtgtttctttgggggcttaataagaataaaacttacacctctaaatccatgtatcgagcaattctctttagaggagtgactaacactagaatgcagggtgtgtggaaatgtccctgccttgaaaaaattaaacactttctgtcgcttgctttgaaaaacaggattcaatctactgaacagctgaagaaaaatgggtggaagggttctgagttttgtgttctttgtgggatgcttgaaaccactgatcacattcttttccaatgcccaatggcctctttagtttggtgcatatgcagagatgcttttgactcgagtattatacctaggtcttttgaggatttctacctgatcaatggctctttgggtggggatgatctgagagttcttttgtccctacttgctgcagtttgctgggtgctgtggtccactaggaacaacatgatttttagagaaaaattagtctactcacccctatcattaatgttccaaatcaattcatttttgcagctcgggagaatccttagcagcaaggacgctgagaattttgacaagattactcggaagctcatggatgctacttcaactctgagacaaccaagatctggagttggctgatcgtctgaagtttttagttcttagtcgtttacttagcttgagagttttgatgttaagaccgtcttagagttgttttggttcctgttaatgctgttcagtttttatccccccctaatggtgttaattctggaccttttctgtgcgtgatgtaaaatgggtatccccataacgatgccgtgtttggctttctataaaaagccgggctaatggtctcagtttcaaaaaaaaaaaagatccaccaccacccgctcctcctctgccgcacttctctcctcctccctccccaccaatagtgggtccagcggttgctcattgtaacaccctgaaaattcgaccaataaaatgaaacccgaagttgagtactttcaaaaacttttaaataaattgcattgccaatgttattggttcttttgttgtgcatcatgatggatgttatggttgttattgcttgccaaactataaattgtcacaaatgaaaattaagctaaagctatacaactaagtaatagttataaaattatggtatttattgtgaaccctacaaatatttacacacaacacaacaaagcaatacaaagagaatgttaattactaatttaatttataggttaaatattaaatattggagccatgtgataagtgtctgtgacatctaagtacatatgaaatagtcaccactacaacgaccctaataattaagttgatatgtataacttgccttgaggctctcatggaataaatttcactcacataaaataattagtatgtaaataaattgagttctatatataaaaaggcttatatgagtactcgattcaatatttagactgatattgcaccaagtctcacagtgccttcatggaataggaattgaatagattaaacatatcaaaatgcaatacattgccatacaaataaactcgaccgatgtgctaatgtattattaaaggtcacattagaatattttaattaactttagaaatatcaaagccttcgagttatataggatgaatttaggatgatataaagtaaagccaatttcattttgggaaatgatgaatgaataaataaataaatattcaaatcaaatatttgaattcttaaacccaaaatgtataggttacatctcaattcagaattccaatccaagacattgtgcagtttggcccctccatcttttcctattcccttttcttccttttctctctttttcccagccgccactgttcctaggccgccaggtgctcgaccagagccctagcccaagccgcacacacaacgccacacctccgagccgcgaacgtgtcgcgcacgaccggtgcgccctcctggtcaccttgcaccgtgcgccgcgccgtgtgccgtgccacgcccgcgtgggaccgccgaccgaccgagccgccgaaatcccgcacaaaggccgcgtcaccacaagcgcctgcgtcgtcccgtctcatcgcgagtcgccaacgagctgagggataacggccgccacgttgttccgcgtcaccctagaaaatagcctgcacctctgtatcggcggtcgttaccactgcccgtcgccgctaatcatgtcgccatcgcattgccatctcgtcgcccctagctgagaccgttggataatgcgatgtttcttccccagctagtactccctcttctgaaaccctatcggctatcgcataggcaatcatgcccgatcgatgcattgaacccgaatcataggtggaggaaagcttagccgcgtcaacctccctaaacctaggccgtagacagccatcgagcgcgcctgtcgtcgaccttatcctccatgccattatggcttatccccaagccaaacccccataaaaaaaaacccatccctctctaccttcttcctcaaatacatttcatcgaacaccttaggtgcatgcgtagccgaagccggcgtagctgaccgcgggaaccgtggctcgggccgcctctgttgctgctgatgccttcgatcaacgccgggtgccgctggagcccgaggacctgctgtcgaacgcctgtgcgctcgccgccgtcggcatcctctgcttccttaccgcctccccaccgcgacgccgcgtttcgccgactcgccatcccaccttagcgtcctctaccctaatattagcacccatggccgtgccggcccggctgctgttccgccgccggcgatgtccccgtggacatgctatcccggaggcttccccttccatcttgttagaaaaacggaaccaccatacactgtagaagcttgcgcacccatctatttggttggaacctagccctaccgccctgtccccttgcaccccggagctcggccatggcggccatgccgcgccgctcgcccccgcgccgtactgcaccgttgttgccggcgggaggtcgctggagattcgcctcatcctccccggctgctgctgtgccggcctcgcaccgtcccggcatgcgcgctaggcgcatggcgcggctgcctctgcctggcgagaggtagaagacgacgggaaaaagaaagggacgagagagagaaaccgtgtggggcccacatctagtttgcgcacagtaatcctccacctaatggtgattaacccactcaatgacatgtggggtccctattattaaaatctaagtaaacttaattatagattttgttacaatgacaggcgggacccaccggagattatatggccggcttaaccacagtcaaaaaggggccggacccacctgtcaatagcacatctcatttcctttgaaagaataagataaagaaaaggaaataagaatggacccacctgtcagtcactaccacatacggttaatgctggaataaaaataaatcaattatgaatagtaacatttcacaattattggaattaattcaaatttgaatctttaaacttgcataactcactcattttaactcggattcgaatgaaacttgaacctaaatttatctaaaatcaagatctaactgttggtaccactttctcgatttaatttgtaatttttgaatttttggtgattttatttgaattctaattgaattcaaatcaaatctttcgcacgtaaatttagattccgaaggagttgctgagttaatcgaagatccgggtcagcaaatctgcgagcaaggcaagtcatcactaatctttgagcatgttggacttattgcgaacttattttgatttaaataaagtttgcatgctatttatatgtgaatgtcctaccttgttatatgccatacctttgatattgattatccatataatctttgtaatccatgatatcgtgtgtctttagtcaatatttgacaaatgcttagcccatgctaattttgatccatgcatattcatatttgtcaaaatgctttatgcttgggcaattatcttagggaaggtaattgacatacagcatgtggagacatgagcgccacattgccatgataatgatgagatgatatgtgaaagaaaattaaactgaacaaatgttttcgactagggcggctggagggcttgggtggtgtccagtaaaggctagtgccgtccctgatcagttaaggatcgagccatgaagttaagcatgaaacgaccccagtacaaccgtacttctcgaatgggtatagacctagcggagtagataggcgagcggaggcagtatccctacatagtggtttcacttaggtgtgtggacgaacaagcagtttgctggctgatacccgatacggatggccaaatggcggatacctgatatggatggccagagactgacttgtcaagattacaagactacaaggagatacccaaaagaggacagcatggattgggttcaactacaggatgcaatgttaggcttgcgtgagtttccccctcgggagtgccagaactcctctctgtgctagaaacttatgacgcttagagtgcatgaggatgtaagttcatggagcgggtactgccaatgtaaggtgtcacgcccggaatttctatccaaaattccaaacgcttacatatgtgtgaaccctcgtccaggaatcagccgaggcacacaataacaaattgataataggatacaattattactctaattaataagcgaagaaaatgtcattacagaggtagatagttcctctcaaacaataaagatctaagcagcggaaaaaaaagataaacggcgcagacggctccactccacagggagcttgaccaaggctacacctaatcctccacaccatcagcctcattgtagaactcttcctctgatgaatgattgcaaggtgagtatatgacatactcagcaagccacgcagcaaatatgcaagtgcacaggataacaaaggatggcataatagggtttcatttgcaaaagcagcatttagcaaacatttcagaatttaataaaacagttaagtaataattaaacaatattaatccaacgctatacaacataccctgttgtataggcccatccattctgaacaaccatcccggctgcacagttctatctccaaaccaggaatataccattccaaaccaggagctaatcaaattattaccagttatagcatcttctattatggtgagaagggtgagactaatcacgaaagacattgttcaacccgcccataaccgcgggcacggctattcgaatagttttactctgatcagaggtgtaccactgtacccacaagacacaaccccacatcatgtcaccatgtgcctcaataccaccacggtacctcggaaaggagttgtgacaataccccttgtacaacataacccattacagcgcacctttcctggatcataatcaccccctttaaaacaaggcatggactccccagcgacccccatggacttctcgccacttctcagtctggcgcactataatgaattacgctatacaaaagataaagccgttgcccacgctggcttgtggttggcacgataaatgtttcacaacagtagctcgcgaaccggtccttaattgtcatgagcacaaccatcaaaaccatatgctcacaacccaccttatccagattttaattatcaattagttaacatcacacgattgaccatcgtgagctaccattaaatataaccattattaacaataataattatgtaatataatttatatttaaccccttttagttagctaatgtttctatgcatggctaagcaaacctatatatagcatttagctgaaccaatccaatatataaggttcatgctaatcaaattatagcccataggaaaataaagtcatcttcggccaataaataactgggaaaggttcaccacccgatgacattcgaaaacaatgcatagttgaaataaaacaatagctttaaacgggatcaacatgctcaaagggttgtttgggatctgtgtgacttgccttgggcttccacaaacgcttcggaacctttctcaacggaaacgctctcctccggaacgtcggaaacaaaagcaaataaacaaaatcaacaaaacagtacaaaaacaagcataaacagtacatgaggatatttttaacatgtagatctcaattttagaaaaatttagagacttgaaccaactaaatcggagctacgatgaattagttatgattttttgaagatttaatcagattaaaacacttatattgattttaattgaattatgacgcaataatgaattatttttgaaaaggaaaaagggatttattgcgtcagcaggctagggtttcggtggaccgggcgcacggcggcagttcacgcgaacggacggccgagatcgatccatccaaaacagacggccgagatcgatcggtctacgaccggctcacgggagagggcgacgatgacgtcggtgatgacatcaccaccggcggcggcggctcgacagctcggacggcgcaagctcaccggcgaacggcggcgcttcggcacgaacggaggacaccaacgggtagagcgcgacgcggcgaactcaccgatgaccaaaggagcggcggaagaccaacggacggcgacggcgatgaggttgaaacggcggagctcttcagcttgacgacggcgacggtgctccggcggtctacaacgacggcgaaggggcggacgaggacggcgatgacttggcgaccacaacggcggtcttcccgagcgacggcgacgacgagaacgacggcggcgcacggcgggagcgacggcggcgacggcgacgctagggcacacggcgctagggcgtttccgacgacgagaggagaaggcgagggtggcggcgggtagaggagacaccggggagccttttaaaggggtttgtcacaccctaaaaattcaaattatataaattgttgtttaaatggaatttctagaaaataattttaaaagtcttgaaaagaagatctaattttaattaataaattccaatataaaatggggccagataaaatttcattaaatactttgcttaattctataattcctagatttttctgggatttatttgagctaaggaagtatttttaataaatggaattgcatttaagaaataatttaaattgaaaaaggttttaaaaaagtcctcttttggctttgggctgaaagtcggcccaaaaccgcttcctctctctctttccctcggcccagtccggcccagttcgtagccgcccgcgccgcgcgcgcgcgttcggtcgctgacaggtgggtcccacctgtcaggcccgtcgtcttcctcgggccgaaaccctagcgcgccgccgccgagccgccgccgccgtttccttccaaatccggccgcccctttccgtttccggccgaattgatagaggggaaacactctccgggatctcctctaccttttctcctttggaatcatcggctaaatcggtttggaaatcgagggattcgagttcgtctcggattcatttttcccgaaccttccttcctcatcgccggtcgcagtggcccttcgccttcgcctccgagcccctttaaaagtttccccgagctcttctctacccaccgccaccctcgccttcgcctctcgtcgtcggaatcgcgctagcgccgtgagccctagcttcgccgccgccggcgccactccagccgtgcgccgccgtcgttccagccgtcgccgtcgctcgggaaggccgccgtcgtgttcgccgtcgcgtcgccgtcctcgtccgccccttcgccgccgccgaagaccgccggagcgtcatcgccgtcgtcgacccgaagagcttcgccgcttcttcctcgtcgccgtcgccgtccgttgatcttccgccgtcgttttggtcgccggtgagttcgccgtgccgcccgcttcgtcctggtgctttccgttttcgtcctcgcgccgccgttcgccggcgagcgtgcgccgcccgagccgtccgctccgccgagccgccgccgccgtcggtgacatcattgctgacgtcatcaaggccgtccgccgtgaaccgccgtggacccgatcgatctcggccgtccgtttggattggatcgaatctcggccgtccgttcgcgtgaaccgccgcccgtgcgcccggtccaccgaaaccctagcccctgacgcaataaaccttcttttccttttcaaaaataattcaatattgcgtcataattcaatttaaaccgatttaagtgttttaatccgatttaatctttaaaaattcataactaattcatcttagctccgatttagttggttcaagtctctaattttttctaaaattgagatctacacattaaaaatatccacattactgttcatgcttgtttatgtgctgttttggtgattttgttcttttctgcttagattccgtcgtttccggagagtccgttttcgccggagaagagtttgaagagttccaaggccagcaaggcaagtcacacagatcccaaacaaccctttgagcatgttgatcctatttaaagctattgtttctattcaactattgcatttattttcgaatgtcattgggtggaattaacctattgtttgttatagcccttttgttcttgattactttattccttgataccttgggttattataacttgactagttgagctttatgtattggttcaactagatattagatataattgcttagccctgcttagaaacattagctcactattgggataacttatgactcactgttatttaatgatggcttaatgatagttcacgatggtcaatcgtgattagttaattaattaatgtgccaactaaaacctggtaatggtgggttgtgagcacatggttttgatggtcgtgctcatgacaattaaggaccggttcacgagtttcggttgtgaaacattaaccgtgccaaccacaagccagcatgggcaacggctttatcttttgtatagcatggttcattgcggggcaccagactgagaagtggcggagataagcccacgggggtcgctggggagtccatgccttgtttataagggggtgattatgatccaggaaaggtgcgctgtagtggattgtgttgtgcgaggggtattgtcacagctcctttccgaggtaccgtggtggtattgaggcacatggtgacatgatgtggggttgtgtcttgtgggtacagtggtacacctctgatcagagtaaaactattcgaatagccgtgcccgcggttatgggcgggtctaacaatgtctttcgtgattagtctcacccttctcaccataatagaagatgctataactggtaataatttgattagctcctggtttggaatggtatattcctggtttggagatagaactgtgcagccgggatggttgttcagaatggttgggcctatgcaacagggtatgttgtatagcgttggattaatattgtttaattacttaactgttttattaaattctcaagtgtttgctaaaagctgcttttgcaaatgaaaccctattatgccatcctttgttatcctatgcacttgcatatttgctgcgtggcttgctgagtatgtcatatactcaccttgcaattattcatcagaggaagagttctacagtgaagctgatggtgtggaggattaggtgtagccctggtcaagctgcctgtggagtggagtcgtccgcgccgtttatctttttccgctgcttagatctttattgattgagaggaactatctacctctgtaatgatattttatacgcttaataattagagtaataactgtactctattatcaatttgttattgtgtgcctcggctgattcctggacgagggtttacacacatgtaagcgtttggaattttggatagaaattccgggcgtgacagctaggaggcgacgacgaaggcccatggcggccggcgacgagatggaaagctcgagctcgaagagagaaaaaccgatccaattcgaactcgaatccaccgatttccaaaccgatttagccgatgtttccaaaggagaaaaggtagaggagatcccgaagatcatttcccctctatcaattcggccggagaaggaaatgggcggccggatttggaaaggaacggcagcggcgcgaaactagggtttcgggcggcggcggcgcgacgaagacaacgaccctgacaggtggggcccacctgtcagcgggagagagagagaggagagcggcggctcggactgggccggctgggccgaggagagagagaagggttttgggccaactttcggcccaaagccaaaagaggacttttaaaacctttttcaattaaaattattcatgaaatgcaattccatttattaaaaatacttccttagctcaaataaatcccagaaaaatctaggaattatagaattaagcaaagtatttaatgaaattttatctggccccattttatattggaatttattaattaaaattagatcttcttttcaaggcttttaaaatcatttctaaaaattccaattaaacaacaatttatatatttaggatttttagggtgtgacataaggttattgaaaggctttgccgtgacgcgtctcctgtgttgggacgaggctcatgtgttgggcagtcatggatgtcacatcctgattttcgcctcaggatttataaattatttaataaattaataatagaatttatattaaatgttcatcaatttacaagtgaagttaaatgcgggaaataaaatttcctaaataaaaagcatggatggatttaattcttattaaattctccatggttaattatactctctggaatattctcggatttttcggagctcaattattaattttaatcatacaaagagaagttcagcaattatttaaatattaaattaatcatataatgatctaattataattgttaagtgcttttcctgtttaaaatccttaaattataaattgttgtttaaaaggaattaatagaaatgattttaaaagtttaaaagagaagatcttttcttttaatttgctaaagttcaatataaaattgggttagataaaattttattaaacactttgcttgttcctctattttctagatttttctgggaattatttgagcaagggaagtatttttaataaatgaaacaacatttcacgaattattttaattgaaaaagttttaaaaatcctctcttaggccgttgggccgatttcggcccaactctctctttcctctctctccccgcgcgcggcccacgccggcccaagccgccgcccgcccctctctcccagccgctgacatgtggggcccacatgtcagggccgtcttcctcctccggccgccgccgcgcaagagcccgaaccctagcgccgtttcccgcgccgatttcgcccaaatccgagctcgattccttcgattggttgaggggttttgttcctctcgatctcctatttcttttcccccaagaatcaaaacgaatcgtggaggtttggatccgaatcgaactcgttttgttttatccctaaaaaaaccgagttcgatttcttcccgattcgattcctctcgtttgcggcttgatctcttcgatccgagttcatataaagcttctccttgatctcctcttccgtttgccccctttctcgagctctcccgtgcctcctagagccgccgccgcgtgcattaggtttgccgccgccgccggccatcttcggtcgcgtcgcgccgccgcctccgtcgtcgccgccgctcgccgttgccgccaagaggagcgccgtcgtgtgaggaagctcggccgccccttcttttccgccgccgaccaccggagccccctcgacgccgtggacccgaaccgccgcgccgccttctctcgtcgccggccgccgtcgtgcatcctttgactacgtggtgagtaccaacgggttcgcctcgttgtcctctacgcgtagatggcctccgtttccgccgtcgactttcctagcgccggcgagctcgcgaacccgagccggccgccgttgggtgacgtcagcgtgacgtcatcgcaagggctgacgtcatcagggccagggctgacgtcatctttctctctttttcctttttcccgttttttctaatagattaaaactttggaaaatcataactaaataaccgtagatccgttttaggtggttcaagttgctaaatttttctaaaataaagatctacatattaaaattgtccataaattgaattaaatttgtttaattctttttaattgggctttaattagatttaatcttgtaaaattcataataaattcatttgaagtcggagtaaggccgttcaagtctcataattcatctaaaattatgatctacatgtttgtttactttttatgtactgtttatttggtttttattagtctttttcttcgttttacgtgttagtttgtcgtttccgtcgttgcgaaggttcgtgagtgcgtcggaagtgatcaggaagattaattgaagactgattattgcaaggcaagtcacacagatcctaaacacaatcctttgagcatgttgatcctatatttaaattctctatttatttcaactgtgcatttattttcgaatgtcaccgggtggtgtgaacctattcctttgttatggccaatttgcattgaatgccttattccttgataccttgggtaataaattgattagcttgaaccttatgtattggtttggttcagctaaatgttagatataattgcttagcaaagcttagaaacattagttcactaatgggatgaattatatatactacattattatttgtggtcatatttaatggtagctcacgatggttaatcgtgtgatgataattaattgataattaaaacctggttaaggtgggttgtgagcatatggttttgatggttgtgctcatgacaattaaggaccggtttgcgagctactgttgtgaaacatttaccgtaccaaccacaagccagcgtgggcaacggctttatcttttgtatagcatgattcattatagtgtgccagactgtgaagtggcgagaagtccatgggggtcgctggggagtccatgcctctggttgtagagggggtgattatgatccaggaatggtgcactgtggtgagttgtgttatgtagggggtaatgtcacagcctctattcgggtactttccagtatcgcgacgcatggttgacatgatgttgaggttgtgtcttgtgggtatagtggtacacctctggccagagtaaaactattcgaatagccgtgcccgcggttatgggcgagttgagcaatgtttttcgtgattagtctcacacctctcacaataattattgatgattaactggtaataatttgcttagctcctggtttggagttagatttgtacagccgggtacggttgttcaggatggttgggcctgtgcagcatgggtgtgctgttcagtgttgattaaaatttctgattaattactctactgttttacttctcttaaatgttttgctaaatgctgcttttgcaaatgagcctatattttgccatccattggaatccttgtgcacttgcatatttgctgtgtggcttgttgagtatgtcatatgctcattcttgcaataataaatcaacctcagttgaagaaaaaggatccagaaggagaagacgtttggcttataccccagttgagctgcctgtgggagtggagccggagcttcgctagattttattttttccgctgcagttttcttcttggtgaggactaagtgcctcataagtaagtatttatcgttttagtttattatgatggatttgtatattaaattgtcagtttgtgtacctcggctgattcctggacgaggattttatgcacaaataagttcggaaattattagtgaatttccgggcgtgacaatggagtacgggtgaagtgtacatccactgcagtgtgagtaaaccgaatatattcgaatagccgtgctcacggttattgagcaccgggacatgtattacacttggctagactctgaactcttaaaatgatgggtgggatatgcataatgattttttgactagtggatcaacttctcgagaggcgagaaggggtagaccccagaaaaccatgacgaccagtggcgagaagctatccttgggagcacaatggatggtggacagaaccatcgctgtttaatgaactatggagataaaatttgatcagttatgctaggtcttaagcttgtgaaaagaattgcaaaattgactttatgcaaataaaccattagcctttcattgaatatcctctatcatatgcatcgttgttgtgggggcttgctgagtacggttggtactcactcttgctatttacaaatttcatcagaagccggtgatgaagtctcggatgacccacatgcttactaccaggagggtgaagaagatggcggcgcttaataggtcttagttatggtcgttgcctgtggcaatggcgtcgccgctgccttgattccgatgcttatctatttctgcttttggtatgtattccggaccgtttggtcctatgttctaagactccctgcgggtctatgatgtaataaatcgcgctagacaatctatgtatgcgcaattgatattccagcaatgtaatcgtgaataccagactacttgatccagggaaatggtactattaacacgagagattcctgttataaaaacaggggtctacactcgtgcaagcgggggcagctccggtggcggctagcgcaggtgatggctcagcgacggaggagggggatcatgaaggtggtggcaactacccgggaaggcgacgacaaggagaacagcttcaccgccgggccactgggggcacggatcggccaccaccgggctcctcctcccttgtcccaggtctagtaagcagtggtgttaacaataaaatttggtaagccccgaagagaattctcacatcgccaatagtcgaattcatgctatattcggttaaggaaattaatctattaaaggaatcttatccagaagtgattgacttcaaggaggatgtggtatgcaagttatctattaattaggaatagtttgttagtttccttttatctttagggaagtgcgtttagtgtcctataaggactttatgttttccttttatttttaggaaagtttctttcttgtcttacaaggactagtatctccccatgggtataaatatgtacactcggggtcatcgtaaactatctctcgatcaataatactctcggcgcatcgccaccctctttaccgaggttttccttatcattcggcggaacttggcacctgatgtggggttgcataagctttcgatctccggcgaaggggtaagtcctacgttccaccggccctggcaactatattggcttcatcggcgtcgttcaaggctgcctcagtacgttcgatctcttggattgctctggttcggtcgatatatttacctacttatttatcatatgtctctattaatctagtcttagcatatcaatttagctctatcggccgcttctcgctttagggtttccgctggtatcggctaaatcgtgttgctagattagattagcttagacatccaccaccctgaaaatcagttaacggcttgattgtctagatattatgtttatttttatacttagtgctgcatcagttaagtttgatctactaagtcgtgtttagaaccataatctctagcctgtttcttgactgccaataacggtttcatcgggattttagccgatgaggtatctagacgttgcatcggcctacaaggattgcatataagttggatttagccgatgacatccaaggtttttactgtttatctaatcttgtggattttatgacatcggacttccagccaatgtatgctttaaccttcagatcattgcttagtctatcatatcattattagccgattgtttctactggatattattattgttatattatatcactatcagccgatcatctttatttatatcaagtgtcatattctatatcaaacatatagccgattgttcaaaaccctattgctatcgactggtatcagtatcggctggaatcactccatcggcttgtcagccgatcggttatttgatctgctatttgtatatcttgtcagttgcaggattaaactggctggcacgtcagcatctcatcaacctttggatctgcactggagctaagcatatctcccaggcaagtgtgtgtttttcacgtcaacaggtgggtcggggcgtggaattatgcgggcagcaatgtctgcagcgaacacagcgggcgtcacacatcttctggctggcagtgcagatgcatagatttgctttgtgacttgttcttggatttgctttgcaattgtgctcattgatgtgtggatttgcattgtgacttgttcttggatttgcttaatgcaaggctgctgcatctgggcattttcaaattttgtttgaacatctttgctggcggtcagagcaaatgggtgtgctttgttttcaactttttctaaaccaaaattgaactttgcaggcggccgtcgtaagacagatgtctctgaaaacggattattgtagacggcgtgcggaacacaccgcaaacaaaaactgattttcacttgcagcccacgtaacacagccgccagcgaaaacctattgtcgctggcggttcaaatcccatcaatgatgaactttgattttctctggcctttggtcgcaggcggctagcctaaccgccagcaaacgttgattttagccgccaggaaactaatgtgtttgtagtaaatgggaatttagcaaagactcctaataatcccttctttctatataaagctatgtgcactaaacacctaaagctcagcatgcaaacaatgtatttattagcactcctaaaacccagatgcaagcataccacatcaacccattaagcacacaaagctcaacgtgcaagcatatagtaattatatctacaatttatttcatttaaaactaaacatacacatgctaaaccatcattctcaaatcattttcataatatttgaatccaaataattttatcatttctccattagctaacatatatcctgcagcaaagcgcggggcatcatctagttatagtatggagtagtatatatagtacgtatagtatccaaacataaacgtaacataacaaagttatttgttaatgaaggtgggatgtaaaaaaactccatcactactacaacatctattttcgcaagatgacccccttactgtacatatggttctctgcagcctactgcgccttttcgccaaacctggtggttttcaccacttctaacaatcttcgcccgacgaaacaatatccatctccagtccaagggttcgatgacctttcctccaacggctagcatattttctttgctttgggtatgcctagtgaaacactgccatcaaataattattaccttttgcaactgtcaatgaaccaggtgtgtccctagttgtttgcagattgtcacagtgatcggatggcagcactttatgctgagattgctgctgaaccttagtctttggttgtataatccacgtttgctgatcggccgataaccgcgcatcctcccgccatgcggcacagccacgtggtgcgcggagagggggatggcgggagggcgcgggagagggggcacgtagcggttttttctattttttcagtattttttgttttatatatacatatatatatatatatgtatacaaactttgtatacgtgtatatatttttttatacgtcaaaactatatactgttggcaactttttatgacaagtcgacaagcacgatcgcaacacctaaacgccttgtggtgatatagagtcgccaaccacctcgatctagccaaagggccaaatcaagatgggattcgtagaaaaacagctaaaccggctagcgaagccgatttagagatcaaaatcagcctctaggccgatttagatcgatatgaggataactacccgtctcgtgggcaaaacggaaggttttcaggacaaacctacaaagaggtgtcgcactctcgcagcggcggcggacggtttacggcgcaaactgacaaagatggactaaactagggtaaaatagaaaacatagtaaaagaacgattcaagtagattgtattcggggattttacaatgaaccggccttgtcccttaaataggggttggtcttgccctctacatgctcttctccacatccaactcgggatagaaaccaaagaaaacacgaaacctgccttcccgagtaaggaaacccgtcactttccaaactttggcaattttcccctatttcgtccataggtgccatatttgggtgtaaacacatgccccctgcctttttggtgaacagacgtgaacctaaaagcatagaacatgttatctccgggcgataatccaattaccggccataggacttcctaagcatcttgccaaatgctcgggaagtatttctttaagtatttcccattaattgatctctgaaaacaccgtcttgaagtgtcttcatctccctcaaagtcttcaaacgctcgtcgatgacatcttcaaaaattacttcccatcaaggtcttgtaatcttcaaccgacaagtcgccttgcttgaaataccgaagagagccaagatttacctcaactggcaaaacggcaatttcaacaatgttttgttactcgactcggcttatccattagcccgagcgtagtaaagagaagaactcaacaacttaatatcataagattcggcaaaacttctcacttccttggacataaaagaagctcctttaatgttttaaggaataccgaatctatgaacgatatgcttcaaaataaagtcaattacttccgcataagtaatattctcgagcgggacaaccttggcccacttagtgaagtaatccattgcaactagcacgaaccaatgccattttgatggcgaaggataaatttgacccatgaaaaccaaagcccaacctcggaacggccatagtttaatgataggattcaatacagcggtaggcgttaattgaacattgccgatccgttaacaagcttcactctctctatagtatttagaacaaaatcatcaattaattgtcggccattgaaaccccactctcctaagcaaccaatttatcttacggccgattgatgaattccacaaatcccttcatgaacttctctcctagcaactttagattgatcattatctaagcatttcaacaatactccatctatttttcggcgatataatatttgaacatttgccgccgaatcttccgatcaatcttaagtgtaggatctttcaaatatctaatcaaaggaattcgccaagctatttctatctcatgggcacaaatgtccgaattcacaattaattcggccttttaatcaattgtaacgtgccccccagcctcctgtctgggttcggtcagaccggccacgcaatgccggtcagaccaccctgtctgcccggtcagaccggccatgcagagccgatcagaccgcgggtaccactggtcagaccggccgtgcaatgccagtcagaccacccctagtctatgactttgccaatttcgtccaaacttttgaaatcaagcatcggcctttagtatataattttttttttcacataatagctagatgcttggtatatcaaattattggaccaaaattccttctctatagacatatgaaaaattataacattcaactaatatgtctagatgaatactaattcaattggcttttgaaacaataatcatcatgacatcaaaacacttagccaattgaagcataatcaataatgaatcaccaaagtcatatgtgtcacatgcatatattccaataaactaaaaatgtaagtaatcggcttgagcatgtatgcaaaatattaacaatgccaatgttcctaaagaaaaccactctagagcaaatcatcacattgaccattgacattagccgaattactagtaagcaaaactttcatgatgcaataaatatgaaatctatatcttatatggtgatccataaaaacacatatgatttggctttaaataaatattaaagagtcatgagccaaatcatacttcaaacaaattatatgccaacctaccaattctactacctagaactggcatttgcaacatgtatgtataatatcaatttgataagcaaaaacacacatgtgctagatagtaagcaatattctaacatggcataggcatataatgataaacacaataaactcataccttgccttagcatccaacaaatggcggcacaaagatgtggtattgtatccatcgccgttcatcttcccttggttccctcatgagcatattaatgtcttgccccacaagcaaaatcgcctttctcgactgcacgatttcgaaggcaagacgaacaccgcaccaacatcaatagcatcatgcgaaagagacttatctctaatgaccgatgattcttctctcatcaaattggatttatcactactactatgggaaatcaccggtctcttaacttttacttctttagatctccacatttgcttaagtgtcgttcgaagctctaaaatgttacatgttttgttctccacatctttggcctccttttatttttgacctatggcccgaagacgctgtagcctcctcttttgagagcgagataagccagaaggtatccacttcggctgtggttgttttccaggagctaaacaatgattcttgatattttttgttgaagtgaagctcttatgttgctctcaattttcctactcttctccaatgccccctggtcaggccagcctttgggcccggtcagaccggccagtaaggtcggtaagactgcgcgtagactggcggttagaccggccacctgtcccggttagaccaccaatgttgacagtcacggtgtcgtcttcgatctcctttgcttgcgtggtttccaccgcatctccagtaggtacataaacatcttgagactcctctttcatagcaatgacctccggagcgttggcttctttcctcacccacaccttcttcacctttttcacttttttcacctttgatccaccggaccgattcttttgtgggaaacggtcctgccttgggttagacgaatgatttagcactgtcctaggtgattccttccatccttgataatacggcataggtggttgaggcatccatggcatataatacataaaaggatacccatatagtgacattgaatatagataccatggcatcacaaccggaggtttgtatggagttggtatggttgatggctccgattgctttgatgtttgaccaaatctcttcctacgagatgatcttggtctttttgaatcactagtttgattatcaactcgttgaccagctaatcctttcttgtacttagccataagcatctcaaaagtgagcttcagttttttggtcttttgggaactagatgactcatcctttgcaactttacgatcttcggccttcgcatttttgatcctattcttgggccgaggatccccaataataacacttgtccctttctttttgtcaacatcaatagaattaatagggagaggatcactaccaatttcgatcttagccatagatgtaaccgaaatagtttcacaagtgccgatgaagtatcaatcggtctttgctccatt

SEQ ID NO: 26204 - DNA, 1008 bp, Oryza sativa
agggtgctaacaaaagggtccgctacaccaatccctatccagggggatcctcctcgcagcagcaacaccagcagcagcaacctcgctccgcgcctggacctcaattcgtggtgcgcgtcccacagccgcagcaacagcagaatcagcaggggactcgtgcaccccatcctcctacgccaactgtgcagtctggtcaaggccgcagggacgctcaaggtcagcagcgtctgtgcttcaactgcttcgagcccgggcactttgcggataaatgcccgaaaccaaggcgtcagcaaggccaagcgcctccccgctccaagaacggcgggaaggatgtcattcggggtcgtgtgaatcacgtgacggccgaggacgtgctgacaactccagacgtcatcgttggtacgttcctcgttcattccatccctgctacaattttgttcgactctggagcttcccactcgtttatatttgtgccattcgtggggagaaatcagttgggggtagaaaggcttaggaaccctctgctcatcaccacccctggaggggttatgacagcaaagtattatagccctgccgtccctatagaaattcaggggattccttttccctcggatctgattttgctagacaccaagaatttggatgtgatccttgggatgaattggttggctcaattccaaggagtagtggattgcgcgagacgcactgttactctgtaccgagggccggcacaaccagttgttttctttgcaccctcaacctctatcagaagttcagaacttcatcagataggactgtcagaaatccccatcgtcagggagttcggagatgtgtttccggaagaactacccggtatgccgcccaaacgagagattgagttccggatagatcttgctccaggaaccactcctctgcacaagcgaccctaccgtatggcagcaaatgaactggccgaagtaaagaaacagttggaagagttgaaagaaaagggatacatacgtccgagta

SEQ ID NO: 26205 - DNA, 1515 bp, Oryza sativa
gtgtgccctcattccatagcctttcgaagtcatcgattatcgggtcaaggaacacatcgatatcgttgccaggttgtctcggtccttgaatgagcatggcaagcataatgtactttcttttaaaacacaaccagggaggaaggttatagttaacaagcagaactggccatgtactgtgacgactgctcaaatcaccaaaaggattaatgccgtccgtacacattgcgaaacgcatgtttcttgggtcatttgagaattcctggtaaatcctatcgattgtcctccactgtactgaatctgctgggtgcctcagcatagtatcgactttccgttcttaggcatgccagcgcacaagcttagcttgttccttgttcgcaaacattctcttcatgtgctccgcaattgggagataccacaccacctttcctgggcctcccctctttgacttactttattcaccttcactctttgctcgtttgtatcttgatgccccacagatagggcagacatccaagtcagcgtattccttgtaatacaaaatgcagtcgttcggacatgcatgaattcttctgacctccaggcccaacggacataatacttgcttcgcttcatatgtcgtctgaggtaaattgttcccctctggcaacagatcctttaacagctcaagaagttctgtaaaactcttgtccgaccagccattacaagccttaagcttcatgagttccaacacgcatgacaacttgctgtgcttcgacttgcattcatcatacaacggcatctggcaatcttccacccaacttactaaacttctcaaaatctctgtcgttgtcctctgcgtcttcaatgtcatgcaacattgtagatagacattgagtgtccaaatctatggtctctccacctaaaggagaaggtacgaacatgccttctcgagctgcggcggttttctctacatcctgatccaacacttcttcagctgcaatatcaggcgcctcttgctctccatgcttggtccagcaggtatatttcttcatgaatccattcattatcaaatgagcatgcacttcatccttgtcttcgatcatctgttcattcttacagtccctacatgggcacaacatgtgcatgctcatcctactttttctgtcattatccgcaaatgtgacaaattcagtgaccccctctctatactcggtagacgaacaatgcgcatagtacatccatctacgatccatctgaaatcaacaacatacgaagaaaaataaatgataatcgatatgttgagaatgaatggagaataatgtgttttttaccttgaattttagcaaaaaatcgccccccttgccctcccaaccgatttgtgaacagtaaaatggtcgggatggaaagcagttggcagtttgaggggtatttatagacccaacacacctcaaacgggttagataaaaaaagcccgtcaaaggtattggtcatacctttgacgggcttctattcagaggcccgtcactggtatcccct

SEQ ID NO: 26206 - DNA, 1709 bp, Oryza sativa
atccattttcactggcagtccatagccccccaccccttagagtattttcgctggcggtgatcatgtatagccaccagagaaaaaaaataggttgacggcatgaaaaatcgtaagcccgttctaggattctgaaaaggctatcaattagaaagagaatcatatagaccatcaaatttatgtataacttgtgtaacctatggcttagattggatttataatgagacaatgcatgaaccacttatgaaaatcttattgaaatccgttataaacacggctgtatggatgatctaaggtggctgagcctacattaggaaatctcatacaatgtatatataagttttattgtgaatgttgagtgccatttcctttaatattatgtgctttaacttaggattctagaaaaatacacaggctatgtttgggaggtgaatttggaacttaccggaaagaacacagctatagtagagtgtaaaatttcaatttttgctcagatgaatgatccgagaccatggatgactagagctcatcaaataatgtgaaatatactatatgcacatttgttgtaatcagagtatctagagtttgggtgaaattacggcacaattgaattaattagttcggatcatccgatttccattattaagagccataattcttttgcaacaaaaagaagagagagaaatacagagatgctggagggctcttgcatgttttattaggatgaacaatggtcacccggttggctgctcatgtttctgcacatgcccatgtgcctgagccgtcgataccaccggtcgcagacatgcgctgcatgtcacatcaggaaattaccatggatgtatctatcaggacgcatggcagttggtctcgccatggctgggtctcactaactagttttgccagctcccaaccatgttggtgctcatggtcgtgaacgggcaatatggatgcccgatgcctccgaagcctagccacatcaattacttgttcgtgagatccatggctgaaaacaatgcaggcgagctgcttatccgcttccccaggagtacaacgcatggctgaaaataatcgacctcgacagatctacgcacgggttcatcgaccacgtctccttcgcttcgactacatcgactatggcacaaagggctatcatccgtattgagcattctcgatggttcattggtggagaaaccatttatactctcggttggtaaccccttttagtcccggttttccaatagggactagcaatccgggactaaatatacacttctttagtcccggttagtgttaccaaccgcgactaaagagaaggtatctttagtcccggtcttttttttcattgtttcttttgccatagtttaatccctgtattttctcccaaatcgagtgggatgcatatcccaaatcccaaatcaaagtaacatcccataacattcacatcacagatcttaagttacttatacacacaaatcaaatacatcacaaatcttaaaaaaattacacacaaatcaaacacatcacatattatacattttagatccatgcaacgaatcacaaaattatacatctaagtgaatcacaaattgaaaaaaaaagagaaaggatgctggcagtggctgccccctgccgccgttcgccactcgccacaggcgcggccccgctggctgcctgctgcgtgtggtcccgccggccttcggatgggaagg

SEQ ID NO: 26207 - DNA, 9446 bp, Oryza sativa
ttaagttcgggtggaatgcacggacgttaagagcgtgccaatgactttttcgacctagagcgtcggcaaccacgttggcctaccaggaatgatagtgaattcccacatcataatccttgatgagttctaaccatctcctttgcagaagattcagatctgactgggtgaaaatgtatttcaaactcttatgatcagtatatatttcacagcgattcccaatgagatagtgccgccagatttttagagcatgaaccaccgctgctaactccaaatcatgggtagggtagttgccctcatgaggccgtagctggcggaaggcataggccactacatgaccatcctgcatgagcacgcaccccaatccttggcgcgaagcatcacagtacaccatgaaatccttgcgggtatccggcaagattaacaccggcgaggaaaccagcttttccttgagagtttggaatgccttctcgcattgcgggctccacacaaatttctcttctttcttcaacaattgtgtcatgggtcgagcgattttggagaagttctcgatgaacctctggtagtatcctgccaaacctaagaaactgcgaatttgggtgactgtcttgggttgcttccaatcggtgacggcggtcactgcttcggggtccacagcaactcctttagcagatatcacatgccctaagaatttgacttcggtcaaccagaactcacacttgctaagcttggcatacaattgatgttcccgcaactttcccaacaccaggcggagatggtgctgatggtcttcctctgagtgtgagtatatcagaatgtcatcaatgaaaaccacaacaaacttatccaagtattccatgaacactttgttcattaagttcatgaagaaggcaggtgcattggttagaccgaatgacatcaccgtgaattcatacagtccgtatcgcgtggtgaatgcggtcttcggaatatcttcttcacgaatacgtaattggtgatatccggaacgaagatcaatcttggagaatacagtggcacctttaagctgatcgaacagatcatcgatccggggaagagggtacttgtttttgatggtgacttcattgagagctctgtagtcaacgcacatcctcttcgtcttgtctttcttctctacaaaaatcacaggagcaccccatggagaagtactcggacgtatataccccttttctttcaactcttccaactgtttcttaacttcggccagttcatttgctgccatacggtagggtcgcttgtacagaggagtggttcctggagcaagatctatccggaactcaatctctcgcttgggcggcataccaggtagttcttccggaaacacgtctccgaactctctgactatggggatttctgacagtcctatctcatgaagttctgaacttttgacagaggttgggggtgcaaagaagacaaccggttgttccggccctcggtacagagtgacagtgcgtctcgcgcaatccactactccttggaattgagccaaccaattcatcccaaggatcacatccaagttcttggtgtctagcagaatcagatccgagggaaaaggaagcccctgaatttctatactttgctgtcataacccctccaggggtggtgatgagcagagggttcctaagcctttctacccccaactgatttctccccacgaatggcacagatataaaagagtgggaagctccagagtcgaacaaaatggtagcagggatggagtgaatgaggaacgtaccaacgatgacgtctggagttgtcagcacgtcctcggccgtcacgtggttcacacgaccccgaatgacatccttcccaccattgttggagcggggaggcgcttggccttgctgacgcctcggctttgggcatttatccgcaaagtgcccgggctcgaagcagttgaagcacagacgctgcggacctgaagcgtccctgcggccttgtccaggctgcacagttggcgtaggaggacggggcgcacgagtcccttgttgattctactgcggctgcggctgtgggacgcgcaccacgaattgaggtcgaggcgcggagcgaggttgttgatgctgttgctgcggctgcgaggaggatccccctgggtagggattggtgtagcggaccctttggttagcaccctgttgattgcggaagttcgccaagcggcgcttgtgcgactccagttccttgtgcttggcttccaagcggatgctcttgtccaccagacgttggaaatccggatagtccccggagactagacggacggacagctcagggtccattcctgccaagaacttctcttgcttctcctcatcttcccgcacatcctctggggcataacgggccagattgttgaactcatgcaaatactccatcacggagcggttgccttgcttcaactctcggaactcccttttcttaagagccacgactccagcgggcacatgggttcttcggaaagcggcggtgaagcgagcccaagtgataggttgtccctctggctgcgtagcctggaagtggtcccaccagagagatgcgggcccctgcagttggtgggcggcgaagatgactttctcctcatcgctgcactgcaccgtgtctagctttttccccacggcatgcaaccaatccaacgcatccacggggttgttggagcttgagaaggtaggtgggcggatgcggaggaactcggcgagtttagagtgttgtgggggtggtggtggagcattatgttgtggcggattttggaggtggtggaggaaagcagtcatcatgttggcttgctgggcgaggatttgggtgagaatggcgttggtgtctggtggtggtggcgaaggcggaggaggaggtggaggtgggttgccctggtggttgtggttgctgctttcgggttggttgccatcaccggtgttagcatttctcctggtcgtcaccatctgaaaaccccacacagaaccagcaaacagagaaagagctaacaattaaaactaaccacccacgactaccataattcttgaatttattactgctattaaattggttcattaatgttcaagttgcttaggcaaataaaataagacaggctccgacacagttataccacacaccggcataaccatgccccacacgactcaaaaaaagacaaacaagaaagaacacacgcgcaaacctactaactgctcgtctactgctgcgacgggccaggacggaaggtgagcaacaacgcaccctccgtgctaccaacgccggaggcttccccctcctggggaaccacgggcgcgggctcggcacgaggggtctccacgaagcaggtccacgccagggactgacgaacaagctcgggcctggaggtgctcttgcgggcggtgatcttctggctgcggcagacgcggcgacgcttggggcggcagtcctctccctgggcgatcttgagctgatgcagctgcgcctccactgcgtctaggtccttcttgagctgcaggttctcctgacgcagctccaggatcttcatgttgttctcgaccatcccacgacgcaccatctgatggaaatcgatacgagccgcgtcgtacgccttcaccatgcgcgccaggtgcacgatgggagcgtcatcctccgagccagcatctcggaaggtggcgtagtcgcgggctcctccgctacgagggtggtagcggtagggcgagtgctgcaactcgtccgggtagcgctggtgaagagtgccgatggcgagaagagcggcgttttggcaagcggcggggaaggaatctccgcccgcggtgactgccagcgaagtccgctcgggagagccagagaggatcactgcagtaacctcccaaccagcgtggggctctgcatcctcaccctcctgctctggaagcggcctggcctggtagtccactccatgtggataccccaagaccacgcacataccccgcagctccaagacgaagccagtcatgtccaaaccacgacgggtgacgctgccggccatctacaaacaaaaacaaacagaaaaacaacattttagagatcagattttggcgataaatgaagcagcaagacagagagagactagaggattttcacaaataacaagggatttttatttcgaaaatactgctaaggcttggggtctacggctcgtcctagggtcaagggggctctgataccaacttgtcacgaccggaaataacccaacgggcgttcctgacgtgcgtgcattaatccttgtcccaggaggcaaggtacaccaaaagttgatacaattcagagtttaacaagcggaagcgtaaatagttaacttattacatgggcagcgaaggcccagcacacacaaagacaaacgagaaacagcggaagactagggcgacgaccacaggcgcttgacggcaggcacgaactagacaccaaagccttcatcttcaaggaactcctcttctggggttgggaaaaattgagcaagactgagtacaaccaccgtactcaacaagacacacccgcaagtgcagaataaatgcaagggagtacaagggaattataatataaagggttagggttgcagtaaacagcatttaaagacatttagttgctccaaagctattttgtaaacacgattctagaactatacaatgttattaatcacggccgtgaacccacacgaacctgccttaacccaaggcctatgatgattcagaccgaactggcaacccgaccctgggtcccagctcgtcccaagccaacccaggccaaccattccacattttagttgttaagcaggttttaagaattaaaacactaacttgggtacattgctcggcttgcccataaccgagggcgcggctattcgaatagattttactctgatcagaggtgtacatctttacccacaagacacatcttcctcacgtgcaaccacgtgccacataccaccacggtatacagacggaagacgtgacatagtttccaacccatcctagccatagacaagagtaccgacccaatcccacctacggccggaacccccgggacaggcaggcaggactgagcccctagcagcaggacaccggccctgtgccatgacatctcgactaccgaaccgcagcccgtgtagccttcatttgccctggagaatgtccatcgacccccgacttcatccacctccatccgtgtacttttgtttataaccagactgagccacaaactaagccttacccactagacatgtggaagtacggtagtgctttgcaacagaggcccgaagaccggtccttatatggcagaggtgctactgtcaaaaccatgcacccctagcccagcccaaaaccattttagggattttgaatagaaggagcggtgtgaagccggttccacgataaccagaccattccaaagtatccaggtgacttgaatatttcccaaagtctaaagttgtaaaaccacctaatgttacctaattaacttgcgaagcatctacctaaaattaaactagtggtgccatgagtagagtgtccactagttggggttttgtttattctagggtgaacaaggtaatattaacaataacaataataaggtcataacaaaggaaaataggcatggctaaataaaacagtgataacgcgggaatttaaataaagtgataatgcaataatttaaatcaacataattttacaaactgggattcaatatgttcaaagatgatgtgacttgccttgctcgctttcccaaacgtcgtcttcaacttccacgaagagcggatcttccgaagctgcagcgtctacacgaccaacggaaaagaaaaggctattaccctaataaactccatataacagcagaaataaagcacaaaaatgggttcttgacttcttaaggaaaaattagagacttgaacggtccaattccgagttcaaatggccaagttatggccatttgaagtttatatgctctttaaatggatatttgcgaatttcttcatttaaattttaattaaaaatcggatttattgcgtcagccgggagagagggcgcgcggaccgggtccacgggagtggggcccacgcggcagcctcacggcccacggtggaccgggcgcacgcggctggcgtcggccggcgccgtgggtcccacgcgttagccgcacccacgggcgcgggcggctgacggccgggcccacctggcagccgcgggcgcgcccgaaggcggcctcgccggcacggccgacgggaggcggcgcacccgcgccccgatggtcgccgccggcgaccaacggcgcggcggagcggcacccgagagagaggagggaagagggaaagcgaacggcggtccacggctcaccccgggacgacgagggcggcggaaatggcgaccggagcggaggacgacggcggcgcgggctcgggtcgacgaggacggcggcgttccggcggtcggcgagcgaagcggaggggcggacggggtcggcgaggacgcggcgaagccgaagggggtgacgccgaaacgggaggaggtccggagcgacgacggcgactgaccggagctcggcggcgatggcggagagagagaacgacggcgcgggctcgattccgacgggaagagtgagcggcgagcggcggaaacggaggagcggagctcgggaagcgattaaatagcgccgggagagggagagagcgcccggaggggaaggaatcggccgcggaaatctcggccgccattgatgacgccggcgaagatcgcgggcgcgatttcggacgaatccgagggagagagagaggggaaagagggggaaaaaagggagggaatcacggggagtgatttccccctctttaatgcgcgcggggacggcgggatgcggcggattcggcggcggcggcggcgctagggcacgggcgcggcggcgggcgcggcgcgagaaaggggatgacgggtgggccccacccgtcagcgagggtggcgggcgggcccgcctgtcagcggcgcgcgcgcgggggaggaggccgatgggccgcgggggagaggagagagagggagagggggaagtgggccgagccggcccaagaagggaaggggggaaaagaagacttttagggtttttctttttataaaacctttttaactttgtttatttcttctcaattattatttgtgcgctgaaaattccactaaaatttatttacacattttaggcttttaggaaatatacaaaaatcctccaagccttatttgacttttaaatttgcacattttaattgttgaaggctttcacatgaattttaattattctcagcacgatttcgaggatatattttagagtcgatttgggacgcgacaaacctaccccccttaaacggaatctcgaccccgagattcggagggactggcgaagagatcgggatgggctgccttcagctcatcttcacgctcccaggtagcttcttcttcggcgtggttgctccactggaccttgcaaaaacggattacccggttcctggtcctgcgctccatggtgtccaggattttcactggcctctccacgtaggtcaagtcttcgcgaacttcaatttgctctgagtcggcctgctcggatggcactcgaagacatttcttgagttgcgacgcatgaaacacatcgtgcacgttgcccaaggaggcgggcagctccagctggtaagcgacttctccgcgccgggcaatgatacggaaaggacccacataccgaggtgcgagctttccctttgtctgaaacctgtgtacacctcgcaatggcgtgactcgaagatacacaaagtcacccactgcgaattccaggtcacagcgacggttatctgcataacttttctgccgggactgtgccacctttagattatcccgaatgattctgactttagcttcagcttctctcaggatatcagtcccgaacacttggctttctccaacttggtcccacaatagtggtgtccggcatttgcgcccatacaacgcttcataaggtgccatttgtatgctggcttgatagctgttattgtaggagaactcggcataggggagactcttatcccaggtcttcccgaaatctagtacacatgcgcggagcatatcttctaggatctgatttagacactcggtctgtccatctgtctgcgggtgatacgcggtgctgaaatttaatcgggtacccagctcttcttggagcttcttccaaaagtgagaggtgaattggcttcccctatcagatacgaatttcttgggaacgccatggagactcacgatcctagcgaagtagagctcggctagcttgttccctccataggtggtcttcacaggaataaatcgagctaccttggttaatcgatccacaactacccatatagaatcatatccaccttgggtttttggaagtccggtgatgaaatccatcccaatttcatcccatttccattctggtacttggagaggttggagaagtccggccggtcgttggtgctctgccttgacacgttggcacacatcacatagggccacaaactctgcaatttcccgcttcatgctaacccaccagtatttctccttcaagtctaagtacatctttgtactgcccgggtgaatggaataaggactttcgtgagcttcctgaagtatcagctatttaagttctctgttatctggaacgcatacccgatttccgttccatagggttccgtgttcatcctctgtgaaaccagcggctttaccctgtttcatattcttgaggagtccatgcatgtccggatcattcttctgagcctcgcggatttgatcgagcaaggtaggcttggcttccaacgcagccaagaatccacgactaactatgcttagattcagggcttccatctgttgactaagttcgggtggaatgccacggacgttaagagtgttgcaatggctctttcgacttagagcgtcggcaaccacgttggccttaccaggatgatagtgaattcccacatcatagtctttgataagttctaaccatctcctttgccgaagattcagatccgactgggtgaagatgtatttcaaactcttatggtcggtatatatttcacagcgatttccaatgagatagtgccgccagatttttagagcatgaaccaccgctgctaactccaagtcatgtgtagggtagttgccctcatgaggtcgtagctgacgtgaggcataggctactacatgaccgtcctgcatgagcacgcaccccaatccttggcgcgaagcgtcacaatacaccatgaagtccttgcgagtatccggcaagattaacaccggcgaggaaaccagcttttccttgagagtttgaaacgccttctcgcattgcgggctccacacaaatttctcttctttcttcaacaactgtgtcatgggtcgagcgattatggagaa

SEQ ID NO: 26208 - DNA, 763 bp, Oryza sativa
tgttgaactcatgcaaatactccatcacggagcggttgccttgcttcaactctcggaactccctcttcttaagagccacgactccagcgggcacatgggtcctccggaaagcggcggtgaagcgagcccaagtgataggttgcccctctggctgcgtagcttggaagtggtcccaccatagagatgcgggcccttgcagctggtgggcggcgaagatgactttctcctcatcgctgcactgcaccgtgtctagctttttcccaaggcatgcaaccaatccaacgcatccacggggttgttggagctagagaaggtgggtgggcggatgcggaggaactcggcgagtttagagtgttgtggaggtggtggtggagcattatgtggtggcggattttggaggtggtggaggaaagcagtcatcatattggcctgctgggcgaggatttgggtgagaatggcgttggtatctggtggtggtggcgaaggcgcaggagaaggtgaaggtgggttgccttggtggttgtggttgctgccttcgggttggttgccttcaccggtaacagcatttctcctggtcgtcaccatctgaaaaccccacacggaaccagcaaacagagagagctaacaattaaaactaaccacccacgactactataattcttgaatttattactgctattaaattggttcattaaagttcaagttgcttaagcaaataaaataaagacaggctccgacacagttatgccacacaccggcataa

SEQ ID NO: 26209 - DNA, 19778 bp, Oryza sativa
cctttggttgtgcttgttggcccaatctccgtccttacaacaaacacaaacttcagtttcgctccaaacaatgcgcttttcttgggtatagcaacatccacaaaggttttcagtgtcttgatatatcaactggcagagtttacatctctagagatgttgtatttgatgaaaatatttttccctttgaaaggttacatgcaaacgctggagcaaggctgagatccgaaattcttttgcttccttcctccttatatcaaaatattgcaactaatggggttgaacataatgaccgcatgcctaatgtccctgagcaatctaatgtgcctgttgagcatgtgacagatcaggagatacaattcggagaaggttcagaaaatacagcacaaaatgatcacagttctgcagcaaatattgaaggagatgcaccggatctggatgccacagaagatcctgaggacatttttcctggcagcagcgatcccgagggaggatttcagccctcacctgtgcacacgcctgcactgtcttttcccgacgatgaagaaatcggcgaaaccggtggcttgacgtctctgcagcagggggagcagtcgcatgcagccacgtcgtcaagcagccatcatgatggggggagcggcagccctctgaccggcggatcgtctgcacccgacacagccgtggctgagcccgcacggccggtcactcgtcttcagcgaggtataagaaaacagaaggtttataccgatggtacttgaaggtatggcatgctgacaactactggaccccacaaccctttttcccccatgctgacaactacaggagaacctcaaaacctagatgaagctttgactgataaaaactggaaagatgctatggatgctgagtttactgctttattagaaaataaaacttggcacctaattccacctagtcatggtaaaaatgttatagactgcaagtgggtctacaaaattaagagaaagtctgatggtagtctggatagatataaagctcgtctagtagccaaggggtttaaacaacgctatggtattgattatgaggacactttcagtcctgtggttaaagcagctactatcagaactgtcttgtctattgctgtttccaggggatggtgccttcgccaactagatgtgcaaaatgcttttctgcatggataccttgaagaagaggtatatatgaggcaacctcctggttatgaaaataagagtaagcccaactacatttgcaagttagacaaagcactttatgggttgaagcaagctcctcgagcttggtattcaaggttaagtactaagttgattagccttggcttccaagcttccaaagctgatacatcattgttcttttataacaaaggaggtgttacaatttttgtacttatctatgttgatgatataattgtggctagttctagacagaaggcagtatctgctttgctggcagatttgagtcaagaatttgcactcaaagatttgggggatctgcattacttccttggaatagaggtcagtacggcaggtgatgatattttactgaaacaagaaaaatatgcctatgatttgttgaaaagagcaagtatgctagattgtaaacctgttagtactcctctgtctgtatcagaaaaactgtcagctcatagtggaactgctctaggagaaacagatgcaactagatatagaagtatagttggagctcttcagtatctgactttgactaggcctgatatttcatttgcagtaaataaggtctgtcagtttttacatagtccaactatagatcattggatggcagtgaagaggattttaagatatgtgaaattctcagttgatcttggtcttaagataagtcgttcatcatccactcttgttagtgctttttcagatgctgattgggcaggatcaattgatgacagaagatcaactggaggttttgctgtgtttctggggtcgaatttggtttcctggagtgcaagaaaacaggctacagtatcaagatcaagtacagaagctgaatacaaagctgttgcaaatgcaacggcagaggtaatgtgggttcaggctctacttaaagagctaggaatagattcacctgaaactgcatgtatgtggtgtgataatctgggagctacttacttggctgttaatcctgtgtttcatgcacgaactaaacatattgagatagactatcattttgtcagagaaagggttgccagaaagcaattagaaatcaagtttatatcttcaggtgatcaagttacagatgggtttactaaacctctcggtgctccacaacttaggaatttcagatacaatcttaacttagataagttatgattgagggggagtgttagagatagaggtttgttacatagagttgttacatgagataacaacgcatgagatgataagataggaagagattttgttttctgttttgtaaccaatcttcaccattgtatgcgccactttgggggcttttcccaaacatatattaacacgtacagcggcctctaacgaggttagaacgcttctgccaacttatacagccatcccagtaagatcccgttaatcatgattcacttggggggaggcaaagcaggaggaagatgatgccaaatttgcattcattttaatagatgttgataatttgtttcacctctctgctggaaaagtttaagaagcattcaatgtttaagaattaattttcttttgaaaagaatcagataattaactacgagcaaagaattcagcaaacttcatgtcttcatcttaacaagccagcccaaagtttttagatttaattgatcaagatttcattctgtttttgtttttaaattcactgaaatatttgtttttggttgtatgcatatatattaggttcagtttagtagaacaatcctatatgcctggagtttcgaactttcgatggcgacatggcgtgtttgcagtccacaagctttcctgcttctgcttgtatggtttgcttttgattgtaacgattttggagcaaatagagcactgaccatcgtgtacagtactgagatccgcggaacgaaccaatgaggcgcgcatcggcaatggacctctcgccctcttcaacaccatcgccgccgtcaaggtactgcaatatccacgatccaacaggatggcagtgagttgggcttgctggatgggatcatgtgaagcttcccccacacatgtttttcctacatctctattcattgcaaaaaaaaaaaaagtgggctaccttggcattgaattagcaattactagatgttattatgagaatcagagagcgagaaatgaaattatccttagcaatattgccagttgactgacaattctaattgtgaatgaaggaagtaataactgaggcgtacgtgctgccatgtatatgaatattcatgtagtacatttccatttagtttatattttttgaaattttgatatactgcatttggaaccaagcttcttgttttatttaacaaagagattcaagaacagtttctgttttatttttgacataacactcagtaatattttgaagaacagttatatcactgtcgttatgaattggaccttatcaaagtaacaacaatactcggttatttgcctcggtataagtgagccgtaacactgttgaatctttcctagttcagtagatttctctcagttcctgtaaaacttttgattgaatactctggtgatgttcactgggcaaagagctaacttccccataacctaccttggaatgcccctcacgatccacagactcagaaaggtccacgtgcagtacctcctagacaggattaaggcaaggctcgcttgatggaagaaaaaattactctcagcagggggagaagagaattagtcatagcagtcttaagttcaatgccgatctatatcatcacagcgctcaagatccacaagcagctcatccaagaaattgacaaagctaggagaaaatttctttgggacagaggcgatgagatccatggaggcaaaggcaaggtgaactagaaaagggtctgcaggccaatcaagtatggtggacttggaatacctgatttgcaaaaaaaacaggacacgcaccctggctgcgatgtctatggtacgagcggaccagcccgaacaaaccatggataggcacgcccacaccctagatgaacaagataaggagctctttgctgcctccaccgaggtcctcgtgggggacggccgaaaggcactcttttgggaatcaacctagacctcgagcaccccccccctaagaacaattgcctcaaatctatacaagcactcaagaaggaagaagcgaatagtggcagaggccctaggaggagataaatggatggatgatatcagacacaacctgaccacaacactcgtcactgaattcttcaaagtgtttgaatgtctgtggaccacaaacaccatactaactcaagggactgaagacaacatccgctggaagtggacagaatcaggggaatactctgccaaatcggcataccagatgcaattcctcgacggagttccctcgatcacgacaaatgtggtgtagaaatgttgggcaccaactgcaaaatgcaagtccttcacatggctgctccttcaaaacaggatccggacgacagataggctccaacaaagagaatagcccaatgaatatttttgtcaactttgcttgagaaaccttgaaacggtgcaacaccttttcaacgaatgcccgatgaccaggaaaatctgggatgtggtggcaacgcggatgacctcccacagctgaaaaccgcaaaactggttcgacacgtcatccctcgaggaatggtggtgccagagtgtcaaggctgcaacaaaggagaaaagaggggggggcatcaattagatcctcatctcctaggaaatatggagagagcggaatagtcgcgtcttcagaaaagaagaactgtcgctgcaacaaataattgaacggatcacggatgagatctggttatggccggcagctggtgcaaagggcatcaagtgtctgatcccaaacacccaagacgctatcagtagcctgtaacaaaacatatgtaattttaggcatgctaggcatcccgtggtcgcccttccctcctccctcctctttttctttccttccttcttttaatgtaaccttctagcccttggctattgtacagtttttccccctaccttaatacaaaatacaagtacaccccgacggggtttaaaaaaaataccctggtgatggtagtaagattatgccctttctattttggattgagatgaacatatgcttgatcatgttcacttcaatcaaaacaggtgaaatgtgtgggatattgtgtgagaaacaactttgaatgtgtacataacttagctttccttgaatttaactttattgagttttactatggtgctcaaatctcttttttcatgccatcagtggttgtggacatatattatgattaaatatgtattgaagtgattacacataattgtgatattaaataaactttttcaaacaaaaatatgatatgttttacttttccttaaatatatttcatattatcatatatgacccaaatcaagtaaagctcatttggactgattagagaaaaattaatttgactaacatgcaaattaatagtataatttattagccaaaatattattgtgtgtagtgttagcacagtatattaatagtcacaatgtaaaatgtgacgacgctagcatagttttaattttgtacgaatttgaatatcatgtacatgaatagatgaataataatgacgctatataaatgacatatttgtaattgcatggattaaatgacatatggaccatccctattttttaatcacccaggtagacatccacacatttattcagtggcggagctagaaccaaattgagggtggtgcactgcttcactatatagatggtggcaattactctaaataatggtttttgaccatttatagatatctattgacaccaaatcattgagtagcaagtaaaagtgtttacagaaatttaagatgaaagaaaccacgaatggaaacataaagaaagatatacatcctcgacattaaagttgtcaatgtcaatatcatcgatagttcatagcctacaataataccagaacataagttagaaacatcttaattttgaactaaaaatttatatccaatgaacatgtaaaaaacataaaaataaatatgtttagggtttagggtttatgttccaatgaacacaaaaagatattgggactatcgggcgctttcctcttgagatacttgtccataacatgtcaattaaataattttattatgttagactatacgtgcactgtacaatagaacaatgtacgcttcaaaagcaatgatagtttgataatagcatagtgtcacagtgtgcttacaattttactagtgatggtcccttcaagagagatgatcaattaaaactgaaacatccagttcttcaaactttaaacggtttaaacactagcttatataaatctggacaattgaaaaggcagtatatgtcaacaggttacaaatctaactaatcaacaagttacaagagaggaggataaattcaaagtttagaactaatcaagagaattagagaatgaataatgataaataccttcatcaatttcaatttggctgtgctgctgtgcattgctcggctgccctagtgccctgctttgcagtccagctgctactgcctgctgcgagcctccgctgctccctgtctccctgttgtctgtcgatgcacgcagccacgcagccactgcgatggcgcgatgcacattcacccgccactacctgcggcgctgctgcctgtcgatggtgcagctggctagagagactaggtgggcgacggcgatgctgcctgctagtgcggcggaatacggatgacgaacagacggggtatcgtggagacgcggaatcgcggtgggaaaaagaaaggaaaaatataaaagaaaaacgggagacgaggagttcagaggtgcggtgatcgagcgagcctcgcgggtcgcggcgcgtcgctcctgggtgcgtgaggtgcgccgtgcgcctcccagctttcctcatgggcctaaggccttcacttgttcgctcatgggccatgggtggtgcacgatcttgagctaagaggttagtccacttagactcccttaaatgtcggccgaatctaaatcgtaacccttaaccaaccggataaaatgactctccgacctattgaaaccggtgcaatttgactccctgggtggttttgcaagcggttttggctgacgtggcgcctacgtgacggtgttgacccggtcttcgtcccacatgtcgtcgacgtgtcgcttacgtggaattagagtaaaaataaaaaaacaaaattctgtaggccccacatgtcattcacacaaaaaaagtgggacgctcgtcggcaccaccatctcctcctcgtcgtcgtcgagcaacacctccgaactccggccaaggagagctcttccagagcaagagtcgacgacgacaccatgcgcgtgctccatcgccgcctccattggtgacgatgtcctgctgcttcatcgccgcctccagcgcccacgccgtcgggccgctgcggggagtcttggcggcatagccagcggacgaaggaggcggcctcgcgagcgcggcagcgcaagaggaggtggccaccgccgctctagcgcccacccccctgcccgtcgcagttgccgccacgcccgacccctctcttcctcttgcagactcgcacgcaacaccggccccggaaggtaaagagaggggggccactgccgccgtcatcaccaccactccgcccggccttcgccaccaccgccgctagcactggatctggaagttgcggggctacggcggcgcaacgggacgaggaagctgcggcggcgaggggcggcgcgagaggacgtggccaccgccgctctagcgcccacccccctgcccgtcgccgccgctgccacgcccaacccctcttttcctctcgcagactcgcacgccacaccagcccccgggaggaagagagagatgagggggggggagacgccgccgtcgtggccaccaccaccgtcgccatcaccaccactccgcccggccttcgccaccgccgccgccaacaccggatctcgaagccacggtcaccagcgcatggcggagggagagagataagagagagagagaaagggagggagggaggaggaagaaggggaggggaggaaggatgacatgtcgggcccacatgcctgtgggtcccttttttgaatgacatgtgggcccataattttttgttccacgtaagcgacacgtgcacgaaaaccgggtcaacaccaccacgtaggcgccacgtcagccaaaaccgcttgcaaaaccacccagggagtcaaattgcaccggtttcaatagttcgaggagtcattttatccggttttctggttaagggttacgaattagattcggccgacatttaagggagtcaaagtggactttttcctctggtaaaaatagaggggtaagtactaaaatataaaaattgggctgggtgtatgtgaacccccttaggtttattgggctccgcccctgcatttattgcatgttatctgaatgattatgaaaaaaattgacaagatagatcaatatataatatatcactacacaaatatgcaagttaaaattcaacatctacaaattgtaacaaaagtaacaaaataaactcaaattagtaaggtaaatttgcagttaaatttgttgtttttattataacatgtataagttaaattttaacttgcatatctgtggagtgatatattacatattaacctattttatcattttttttattttttttcataaatacaccatcattccaaattgatcatgatatatatttatgcaccaaacccaaaaataatttaaatcacatcaataaagacaccatgcacacattctctcacaatgcatgtatcgattaaaacaccatgctaattacatcttagcatatacacattctcccattgctatattatctgtattctgatgaaatccgtatccatatgattatatgatgatcaatttagaaaggagagagtatttagttgacatgtaataaactggtgaaaaaaaaaattggatagaagaagatagagctgacacgtgggttttaggtattttggttaaaccagtgaaaccaaaatatatggcatcagtggagggtggaacggcgaacaggtcaagctccatggacacgcgttgcgcccgcgcgcggcgaaggcgagttttcctccgcaaagctacatggagtgcgcgccgccctcattttcttctcccgcggcctttggagagagagagagaggcgacacccttcttcctcccccaaccctttcacccgcccaaactcatccatccatcgatcgccctacctagctactctcgatcgatcgaccgcccgcccgccatggacgtggagtacgacgtgatcgtgctcgggacggggctcaaggagtgcatcctcagcggcctcctctccgtcgatcgcctcaaggtggtctccttctccatctctctctctctctctctctctctctctctctctctctctctctctctcccgcccggatcgatctagctagggcatcgcgtcatggatggaggattaatttccatttctaattgcttgatcaatcgatcccctcccgtttctggctaaccaatcaaataccctttcgtcctttgtgatgccatttttggatttttttttaccgggtaaaattattcgaagaaacgacagatctgatcgtgaatcgctttgtgatctgattaacaatcacaaattcacaaataatgatgtgaaacaaaccagcaattttttttatgttttttgcgagtgatcttgaatttgtcattattttgtcagcgaaaaaaaaaattctcatcagaaaatgatgaaaaacgtgtcccatttctgttttgtcaccaggtgctgcatatggacaggaatgattactacggtggagactccacatcgctcaacctgaatcaggtgacaaggcttcaccctccgtagcaaaaatttgccaacattatcttacctacctgtctgccaacttctgttttcctgacgtgctaagggatgttagaaatttcctcatcaatattagtttcagacaaatttgtgtgaggttggttacctatcagatgaaattatctgatcaagctcattgtttatgtatgccagctatggaaaaggttcaaaggtgaaggtactcccccggcgcaaattggggctagcagagactacaatgtagacatgattccaaaggtcaggcccggctccaatttatatttgattatattctggagtttgtgtgtagtttgttgggcttagatggcactgctctactttattatggagagtggagacatacacaaaaacttattggaacttgggttttaagtgtcgcacagttaaatattcttcgcatgcgcatatgcaaatatttataggaaattctttttagattgtgtgatgattaatttcaccctacttcctttctagttactgacatattgtgaaatgctattttgtctagtttatgatggcaaatggtacattggtccgtgtacttatccacactggtgttaccaagtacttatcattcaaagctgttgatggaagctatgtcttcaataagggaaaggttggattctaattctaatgcgtgtagatcactccataactcaattggcaaatctataatacaattttgtacatgatatttggatcacagatccacaaggttccctctactgatatggaagctctcaagtctccattgatgggattgttcgagaagcgcagagcagggaagttcttcctttttgtccaagattacaaggaaaatgatccaagtacccacaagggatatgaccttaacaaaatgaccaccaaggagcttatctcgtgagtacccatgtttactgctgcttttctacctttttttttatttcacgaagaataagtgcttaattttattttcagatgtaagtagttgatttggtttgtttgtgaaatttatatttgggtcccatatggttcctgtatgtactcagtcgtatcttcagtgtacatttataccacctaaatgatccatgcacaaaggaattgtatggttttatttgtttatatacatatataataccttagaatcaacaaaagtcctgtcaaaaaaaaaagaatcaatgaggggcctcaattgcttttttatatgctctgttcaataaatctgcaacatggtacagtactacagtggtactcacatacggatacattcaggccaacacatacagatacatcaatttaattcctaaattttcataatgtacatccacatggatcaaaaatagctccccttcattgaaatatataaaaacaattatgccagttccgcagctgcacttattttatcatcacagagccatccttatacggtacacttcttcagttcatttatagataagcataagaattaggtgaattttattcattagcgatgaattgacacatcaaacttattcatacaatctgatttatgtttcatatatattttctgatattttggtctatcatactatttgaagaacctgaagttgtagtgcctcttaatgattcaatttattgagacttctctgctcccctttatttttttccagaaaatatggtttggatgataatacaatagactttattggccatgcagtggctcttcataaagaggataactacctgacagaacctgcaattgacactgtaaagcggatgaaggcaagtattgagtctttcaacttcaaaatattagaaaagaagctcggatcaaactagtcctgacagtctgatgaaattccacatcacactttggcgtacatacatcgaatagaacatcagctgggttatctgtggacaaaactaaagccattttagtcacaatatattgctggaaatcacaactatgaacatgacgtgtctctgtcaaccaactaaaccacttcttccaacccgttcgaaactagacattttactgctgttcccatgctatagttagcatatatggtcacttcactttcactcccagatattgccttttacctaacacttctttgaattattgcagctttatgcagaatcagtgggtcgttttcaaggaggatcaccatatatttatcccttgtatggcttaggagagctgccacaggtcattactattaaactgtgtcatcaattccagcaatcacagagatcataaatggttgattttctaacttgtttttatttgatccagggttttgcaaggcttagtgctgtctatggtgggacatacatgttaaataagccagagtgcaaggtataatttgtgttgttattgtgagttgaaccttccaaataatttctttggtgatttgggcatggtgatcacaatgtgaaatgaaaattttaggattttaaggtgcaaaagcaagaaaaaaaatttgaggggggagggcaggagatctgccaatttcattaaggaggatagaaatgatacaagttcgcctctcaaaggttccatagaagaaaaaattaggaatatgatgattattgctttgaaaaggaagaatagatcaagctgtcagagtttgacaaaatatattatgttaacataatccaggcttggatttcaccagttgtatgcatggtagatgctagtgctaatgaattgtggcatgacaatctaaaaattgttctagaagctgtaatgttaaatccatttcagtggtaaatatgtgattttctgatcaaacatacatgggcatattcagatagaatttaatgatgaaggaaaagtttgtggtgttacgtcagaaggggagactgcaaaatgtaagaaggttgtctgtgatccatcatacatacctgataaggtaaaacacttttttttcatacaaacaaatagttgccctcaaagggagtatatcttagtgattaccttcctaattagttaattatactgtacttttcttaagattatttgaaggagacctactatgtctgataaataaattgtcctttgttgcattaaatttatttattacttattcagaatcaaatagaagtatgatgcaatttagtgtctctcatgttagcctcctcagctcttctgtaaatataagtcatcctagaacattgaagtacttctatacagtatctttttcacttttgtcctatatatataaatgatactgttctcatggataaatgacttatcttttgcattctgaataacaatcaagggtgagttatttagttaatttctaagtcccagttctgtttttcaactccaaacttcaatttcctcgttttccgttagcacgcttttcaaactgttaaatggtgtgtttttgacaaaaagtttttacatataagttatttaaaaaaacaaataaatctatttttaaaatttataataattaatacttaataaatcatgtgtggatgatgtttctcgttttgcgtgcaaccaaaatctgtctacaaaaccccacattgaacggggccttagttcctattcacaagtccaaaacaacttatgcttaggattagaggacgtagaagtttacaaaatgttggtactgattagaattatctgctgttatatcaggttagaaaagttggaaaagtttttcgggcaatcgctatcatgagccatccaatcccaaatactgcagattctcactctgtacagatcataataccacaaaagcaacttggacgcaaatcagacatgcaagtattctgtatatcacctctggtttttatccattactgggcattacacctatagattactcttggtctacttgtcatttctattattgtaacaaaagaatgttcactggtgcatgccaggtatgttttctgttgttcctactctcacaatgttgcatcaaaagggaagttcatcgcgttcgtgtcagcacaagcagagagtgaaaatccagcggcggaattgaaaccagggatagaccttcttgggccagtggatgaactatttattgatacatacgacagatttgaacctactaatgacccatcttcagacaattgtttcatctcaacagtaagtcatcgcagaaatatcaagtgtatgtaggttagacatatgaccaaaaaactgcatttgaaataaacatttaattcgatttgcttttcagagttatgatgccacaacacactttgagtctactgtgatggatgttctttccatctatacaaagatcaccggaaaggtacatttgttttctgttcaacttttaatggctgcactagagtacaaccccaaccttctgaattgaaccttaccagcactaattgaaccttaccagcactatgagttcaacattgtttgcacttgtgctattctaatcttgtattccacgtggcaactataatcaatctattctatcatgagaaggaaatgggcttttcaattccacagatacagtgctttataaaaaggcagctagttgagtagcaaccttgtaagaatatcagtatataactcttagcatcatattcagactgtatcaatcagagtaacttacattccaggatcgcaaagtgataattgaactaatattgcatttttcatgatcttgtatcaacctaaaaaaacgtgtgtttaatgttttaaatttcctttgtctcgatagtgatttcctagttgcttatgctaatcgacatgccattttatccagacggttgatctcagtgtggatttaagtgctgcgagtgctgctgaagatgatctctaatagttattggactgtcctttggtgcacagaggaaaagatttgtgcgttgtttttccattcatattaggtttatatatgattttttttcttttattccaaactatagtggctgagttttattaataatttgataatgctgtatattctaggttcatagcaatttagcctgtgagtaaacagctgtttttgttgttcagtttacttaatttcacctttaaatgttgtggatagtgctaatgaacaccgaactggtacctccaattattttgaagaataccttgtaagatttctataaaatatctttgcaaaacatgttttgagatgcaaattgtcacgtaagagctatgagatacgcgaccatggcatcaattgatcattactatttgtgtcatgcatgtgctcaactgctcaggaaaatcataattactcattccatattgtgaaatatcaggaatttagcatgtgcggtataaattgcgacttgatttccaaaaaaaaaaaaaaatagggcttcagctgaatccccataccccttgtttggtcctcctcagtacgtactgatgagctttatttacagtttactatcttgctttttctccattccatttatctaacatcaggctacatttttatttttgaaatttcatattttcagcgtagttgcaatagagaaactggggttcagctgaaccccatacggtcataccccattattttttttatttatcgtcgacatgactatggtctgatgtccaatctaagccgatttattgaaaggtcaaatgttcactgaggctgtgctcctacgtggagcgttgcttcgttgcgctagcgggaagattcattgacacgtcggcaccatgtgcgtcccaactgagccgctcgggccttcgatgggggacgagttcctcgctcgcgctcaaggacgtgcggcgaagaaacgaggatgcgctaggcagaaataacttggccatccgtattgtagaggtcctgccctggcatcatgtttccatcacatcgtgcgtcagactatgcagaggaggtcacatgcactgtgaagtgcatggcatacggatgcttttggtttgatttcattgcacataccagctagagacacgcgatgcatagtttgcactgctactgccctaagagcaccacgcaacaaaggtgaaacatactggaaacagtaagatacaaatatagtgaagatatgttccaccaaatgtgatataaaaaaatatcgtgcgacttaaaaaaacgtaaaatatctcaaaagcaattggtgatgagcatcgatgtcgtcactacataccacattattgtgattgtgctggtcaaatcatttccattatggtggttttgcaattgtgttgtggtcttcatggaatacatcatcgtcaacacgaacatgaacataggtcgttgcattaccaaaggtcgttacatcacccttgttatttagccttagttgtgtgattactcttcaccatcgtgaatgctacctagcaacatgctctagtcttatatgacttataacaagagagcagttcttttctccaacaaaaactaggtaaacttttagataaaagtggcacgctttttaaactgctaaacggtgtgtttcgtatgaaaactttctatatgaaaattattctaaaatatgatatatatatatatatatatatatatatatccatttttcaagtttgtaataattaaaactcaattaattacacgttattaccaccttttttgcgtgaaacacttacaaacaccacctaaaggtgtgttggagaatactacctccgtttcaggttataagactttctagcattgcccatatttatatagatgttatatgtctagattcattaatatctatatgaatgtgggtaatagtagaaagtcttataatatgaaaaggaggaagtagcagtaatgggcatggaggattgcgctctagtttgtcttcgtcgagaagaaatatcacttcagcgaggaagtgagtgtgaacataacttttgttcgactcaactaaaaattgtctgatcggcttaagtaaaagtaaaaaacacttggttaaagatagcaaatatattattatattctgacatgtttaacttataggtctatctttatcttgcgacttatacattatgatactatctccgtcccataatataaggatttttagaatagtgctaaatcaaacattttttttaactttgactattactagtgaaaacataaaaaaatcaatcatataaaattgataaaattgatgttactagatttatcattgaacaaactagattccgtaattctatttcaaaaaagagtgagactcaatctccttatgccatcccaaaattgatgctactagatttatcattgaacaaactatcataatatgcaactctttttatttaaaacatctcacttttatatatattgttagttaaagtatacctcgaaaatcgtttcaaaatttaaaaatacttatattttgagacgaactaagtacatttcaaatttttacgatcacccggaagatttccctactccaaaatcttacaaaattttaaccatcagattggaatccaacgtcccacatccatccgccgccactcgtctcgtccgtctctctctctctctctacgaaccacgcagctcgactcgcgagctctcgccgccgccgccgcctcttcccccaccgcacgcgcttccactccgccgccgccgccgccgccgccgaggctccagcactgccgttctccgcctccagttcttccctcccccgtcatcttcgtcgtctcgggtgtccggtgccaccgcgccgccctcctgctccatctccggcggctcctgctgcccgccgcctccaccgactaccccctcctccgccctcccgatctccgttccccgcgccaccgcccaccgcggggcctccgccgccccggccgcttccgtctaaccctggatccccaccacgaaacctaactagtaagcgccggagccgccgcctcctccgcctaagttcgctacactcgctggagatggagaatgttactggagaaggaatctcggatcagatagagaggttagcgattattaagattttgccaccattttttttcagtcgaatgttgtgtagcaaaccgattgattttcctcttttttctttcagatttcaaacacagctacaaatggatgggcgagggagaaagcacaggattttgatggtgtcagatttcttctttccaaactttggcggcgtggaaagccacatctattatctgtcgcagtgtctccttaagcttggccataaggtccctaatctcctgaatggtctatttactgccttgttcttttcatgcataattttagggactatattagggtctagatcaactcatggatatgcttttgattctgccccagctcacttgttatatgtagtttaaatattggatttaatatctttctgctataatgagttgatgccaataatggttagaggatttttgttacatatcttatccaatcgttaaatgataggcagagccacacaacggactaaattagtgctactgattttgttgcgaatgtttagacaacttttttgtttgattcccaggtgattgtcatgacgcatgcatatgggaatcgttctggagtacgatatgttacaggtggcttgaaggtttattatgttccatggaagccattcctgatgcagaatacattgcctacattattcttgacatttccgattgtgaggaccattcttattcgtgagaagatctctgtggtgcatggacatcaggctttctcaacattgtgccatgaagcactgatgcatgctaggacgatggggtacaaagttgtcttcacagatcactcgctttacggttttgctgatgctggaagcattcacatgaataaggtgctgcagtttactcttgcagatattgatcaggccatatgtgtctctcacacaagcaaagagaatactgtcttgagatcagggatatctccagagaaggttttcatggttcctaatgcagttgatactgcaatgtttactccctctccagatcgcttgagctgtgatgaaattgttattgttgtgataagtagattagtgtatcgaaagggtgcagaccttcttgtggaagttattccagaagtatgccgtctttttcctaaggtgagtcacaaccatagcactctttggagtcatgcatgaaataaaaagggtgaactatgggtatggtagaatcatttcgttatatgacatatcaacataaagcaaaatgcatacacaatagttgaactctccttatattccatcataactttcccatcctttttaatgttcacaatgttttggatttagtaaatggtcatatttgatcaagtaagcaactgtacgaactgtcaggttcgctttattgttggaggtgatggtccaaaacgtgtgcgaattgaagaaatgagggagaagttttcccttcaggatagagttgagatgttaggagctgtgcctcatgctcaagtgcgatctgttctgatatctggtcatatttttttgaacaggtagctatttaatattttcattgctttatgttgaaacttttttatttccttagttcctttttttcatcagggattgttgatacacgtaagactgctttctgtctatccctttaaattaaatatcatctttcataatacataatgttaactagaccctaatatcattacaaacatagaagaggacatatccggtgaaaatgagctaagtgttgaaaactcgtgaaaatcatacctaaaagtttcgtaaatttatgaaaaaaatactagagat

SEQ ID NO: 26210 - DNA, 21240 bp, Oryza sativa
ttgagtttgaacttgagatttggtgagaatgtatttcatatctacacctatctctagtatttttttcatgaatttacaaaacttttaggtatgattttcacgagttttcaacacttagctcattttcaccggatatgtccccaacatagaaatgaacaagtaatatgatatgatattttaacgatggcaaaagttcaactatatggatgatccacaattacgctgaaatttaatctttgccattttagttcgcttacagaggccttttgtatagccattttggaagcagcaagttgtggattgttgacagtaagtactagagtcggtggtgttccagaggtatgtgcatatatgtttatacatttctcttgtagaaaaccctgtactgtagttaattaggaaatttggagttgctgtcaaataactttttcctttttcaggttttaccagatgatatggtagtacttgcagaaccagctcctgaagatatggtacgagctgtcaggaaggctatcgatatgcttcctggcatagatccccaagttatgcatcttcgagtgagtctcaactcttgcatgttgcatgaacttgctgtgcatctgcagtttaccgtttcagctatgggctctgtgcattacatttcctttttttttctttagtttttagtggaaaagtgatttgcaagttcatttatattgatttggttgtttctaatatgtatctagatgaaaaagctttatagttgggacgatgtggcgaaaagaacagagattgtgtatgatcgtgcaatgcagtcaccacaaacagatttgctagaacgccttccacggtgagtatattgcttttgaaacattaacctatttttgtttacaatttttatgcactggggcatcaaatatatagggatgcagtccatctgatttttctacaatggtgtagatacctcagatgtggagcttgggcaggcaaactgttttgtcttgttatgatcatcaactacctactatggtgcctcctagaatatctgcaggtgaatttctgcccatacttttatcatcttctggagatctggaggaaatctaactagttcttttcccctcagcccactgaaggtattgaagaggtcccagatatcaggccagtacatgctcgtttagaatcagtagatgatacatgtgaaactcaaggaaaaggaatttagaatttgccattatcgaatcattgaccagcaccctttcctggtctgtagaatttaccttctctttttaattttacttgccctgaagcccaggaaacattttcgacagtagagtacccatgacctagtcaccccacatttggggaaatcctttgacatgcttttgaaagctatgttgtttgtaaatatcagtggtaacaccactattttgttatgtaagtggatgatccatgctcttgaaaactatgctgttaacgatcaatcgacaacatcctttggatttggaatacatgtactaatatttgttctttgtatgacgccaaaagcaccaaaaaaacaatttggagcgacctcaaaaaacttatcattaagaaagtcccattttgtagacactatgcataatgtcattaggaaaaaattctccagctttgatgaaggctgattgtctaagcacccaattctatgataatcaagattgtaccaacttcaatgatccttccctacgcctgccaattcgaagggaaacgaaccaaacagggtgttcaaaggcaggcaaatgaccggttggaagtgaacaattcctcagtctatatgccccagctagaacggaacaagctataataatcagattccaattccagtggaaaccatccaatgatcattttaaaccagagagtttgatcaaatgttgctgcaaaacattaagaaaattactgcttttggtggacgtagcggttacaaacagattgtttgtgacgttggaactgttaagatctgtgtaacgcaaaacacccgcttgcctaagagccaaattggatggcttatccgtcgatggataagttgatacaaacaaccctaaacaactgcctcaggccagagtgagcatcttcctgtaaagtgcttgctgcaaaataatgttacacttatcttgcaatttgaacgctaaacctaatagtttgccaacatataaatataatgttctatgccacaactcatcttgatttctcagcaactaagtctaagccaatctcaggtacaaccaaaactgacagcacagcaccccgtggcatatgcaattgaagccagtgctcgcacaactcacattcgcgtccttcgtctgatacccatgtcatcatctcgttccacctgttccatacaaaaaaaggagtgtaaataaagcacgtagtatgcccacttatcactaccaattagttttaacataatggaataacaaaatctcaagggctgatgctactatcaatagtagaggcaggtctaacgcaggagacaatatgtataatgtcctcaagaaacagtattgagattgtggtggttgctagctctttacctcagtgataagcttcttggattttttccctatatttgatctcaaatcagaacctcgccctttaggtttctttgctaccggttcatccaaaagatcatcttcatccgtctcacctgcaatcatattttagattctttttcttagtgaaggtcaaattggaaatgacaggctattaaccattttggctggtaaaaatccaacagatgtaacatattagcttgccaaggcatatcaaaatttccttcacatcatcacagtactctgaaatatgttgaagttgaatcggaacaaagggaagtaattaccatcattatcatcatcttcatcatcatcaggaaggcctccaaaatcttcaatgtcttccatgtcatccatttcatcatcaccttcaacatactccacctcttcctgtgttaacaagtgaatccatgataaatggatagttcatgcaaggtgagatgagcaagtctgcactcagtaacaatgcttacttcttcctcttcctcagtaggagctacatcatctttttccatttcaagaatagtgtcaaattctttgaagggatagttatagatgtcaccatagacacctttcttcaaccgttccttcaattcactttcaatattctgcatgacaacaggtacatgttcaataaggcaaaccatcaaagggcgtggatagcatcagaaataataaccttttccaactgagcggccttttcagctttatccattcttctgagatggcgctgagtctccttcctgggcattgtcatcaccttctctctgataaggggagaggaatatgattaatctttccattgcatcagagagaacagcagaaagttcacaaaaagagtatacatcaacaagcaaatcagattataatgaaactattacactaaattataccaccaaagtagaaacttgtgagatattgctaccattattattttttccattagttttaaaaagttctgcaacaatgtgaacacagtgcatctaatacaatcttaagaccatagaacaagtcaacaaaatgtgcaacttcaaaattctgtaattgaatataaccaaacactgagccagttcttattcttaaatcctagtacacaatttggcactgacagtagcgctggttgtggcagtatgaaatacatagaatgcctataagacaatcaaccaaaatcggatccccacccccatctaaaagcaaacctataaatcaatagagttcaatctacagaaatctgttactttatactactatgtttcttttttaatgacaccctacaatccgcatcttcaacctttcaaaagttttactgctaatatatttggaactactgaaaatcacatcattaaatttgtaattaggaatactttcataataatataattttattattatacttaatgcaaaagtataaaaataaatggtcaaagtcacatcttgaagacagaaaagtaaaacaacaaacaagtaaaaaggaacaatgccctttgcaaccaaaacatgctaaacaggtaagtacttcagcaaccatcttcccacatggcatgtatctcagaacagttgtcccagatttaagattttcaacctgatgagttcagcactctaatagaattttatcgtgttcagcttaagaccataatgaaaacactatggaaataaacctaagagcctacctcactttcagttgaagcttcctcattcttatccgatactgagtcatttttgtcaggcgctgcttaattttgtgcacaagtaacttgggccaaaattcctacataatgaaagaaagacaagctatgagacttaaaataaaagttcacatccagatcgaatgacaaagctcgaagtgcatacaagatgcttattgatgacttccattgctttctcataatttctgggtagtttgaccctctcccataatttgttcggaagatgggctctttcagctgttttcatgtataggtagaaaatacctgcaaggccagaaaaaagagagagaaatgaaacagaatgtaacaaaaaaaatattaagatggtatacataagttgggaaagaaccgggagcaaaacaatgtgcttaacaagtatgcttagactgcaatctgtatccttggacgaaaggattctgaagccctcatgtttcatccagagagcaccacataatacagcgattcactcgtaaaaatgtaactttctgcagtaccgagttcttgactttaaaattaactaatgaaataagcttccatggtagaccgcattatcttaaaacagtcattggttgtgtttgaactgagggtttatcccatccatagactcacaatatcatcttgatggcagttaataataacgatcacagtcacgactaaataatttccctcgaataaagaccaatcgtctcccaataacaactgtaaatgtaacccaatgtttccaatagcaactgtaaacataacccaatgcttcctaaagctattgccacaaagggcgacacagtgcatcatcgaaacggttgagctaaaaagatatttcgccccgaaaaatggaggaaagtgcggggtagtagtactcaccgtcatggtcccggatggtggcgtagcggctgttggcgagagggcaggagctccggttgcatattccggtggcgttgtacgggttccggcagaatatccccgtcgtgatcctgccgcaaaaccaaaaccaatttatcgtcagaaatcaaagaacaccacagcgacgagagaaagaagataggattgctgctcgcatacgtacttggccatgaagctccagtggttgtgccggatgcagtgccatatcacgtcgtcgctcatcttggccgccgccgccgccgcgggctcccctccttcctaagatgctgctattggtactagaggctggttaggcgagagagaaaagcttccagatctacaagggaggagtgagcaagaggatgggcgtgggtacgggtggtcacctcaccggcggctggcggcgcggcgcgggatgcagtgggaaggcggcgcggcgcggcgggcgaacgagacggggagtcgagggcgcggccgaggagaaggggacatgacatcatcatcatcggctagggcaaattaatactgacaggtaatgggctttggcccactcaaggcccatttattcttagagcggcccaaatccaaccctaggccactatatgaaggaataagtccactttgaccataatctactctgtgatcatgcaccacaaaactagatatcttgacccctatatggtgctgacatggctaacacatgacacctgctttgcttctttctgtctcttgctcactcctccattgtactacctccgtcccaaaaaaaattgcatttctagctctaaggctttgtcccaacaaattgattcatctagataagtttccttaagttctctcagcttgtaatttaggtatgctaattatatgggttaattctctaaacttacttttaatcatttgtatatatgaaatatgtgcatgcaatgggttcattaaataaggtcattgtggtcatttttcaatcctactgttttgtcctaaattagctagaaatgtaatttttatgagacggagggagtattataataggaaaaagtacaaattaattaccccctcccgaactatcacggtcgattaaattacccccttaaaacataaaaccagacatctcaccccaactatacaaaccggacaaataaccctcctaagtactgttttgagttgttttcgacttaaacttgcacacgtggcgctaacgtggcaatccagtcagcaaataaaattaaaagaactcgtggacccagctgtcatccctctcctctccctaatccctgttctctctctctccctctcgctcactcgagtggccgacagcggaggcaaagcttaggcggcgggcggtggaggcagaggcagagagaactcgggtggccagcggtcgaggcggggtgagctcaggcggctggcggcatcacgggagggcgctctgcggtgggcgaagggtgcaccgaggaggacgttgaaggcggtggcgtccaacaccttgctgtcggcgacgggagggcttctccacactgatgtgcttcacaataactatgtgcttcagattagtcattgaccacctgatgtggttgacattgttttagtgctagaaaaggattttcttttatttttaaccttatttttaatttaaaaaaatgaaccctttcaaaacttatttctaaaatttgaaacttttcgtcacaccaatcgacatggcgtgtgaaaataatactgacactccacctgaccatctgagatggatgtgtatcaaggataggggtggatatcgagctgggtcggctcggctcgttatcctaacgagctaaagtgttggctcggctcggctcgtgtgtcagctcgagctagctcgtttagctcgtgagacagaagaaggaaaagagtagcggcatatgccatgggatggggaggaggaagagggcaaacgctcacaaacaaacagattggaaaagaaaatgaatatgatgatacatcacgagcttgcactgatcgatcactacaaagcaaatgtaattgagtggccggattaaaccagtactgcaacataaatcaggggcattccagatctaaaaatgcaaatgaggaatcaataaagacaaaaattgctataagacatcaaaagattacggtctttgctgtgagacatccaaagatcgtgaatcttttcgtggacaccgtaaaaaagtgataactagctgttggacacttctcacattattttattattttcagttaaatggagaaagaaagagttgtgtaagtaccaaaatactccagatctctcttcttttcttttcccttcttcctcgcgcttgctactgccgagcagaggtgcaacgcacgcggccaacgcggccggcccgacccgagaggtgtgacgcgcgtggccaacgcggccgggccgagccgggacggctcggccacggcggggcggcggcgcatcgccgggttcaccgccgacagcgacgacgcacctgaagctgccgaggagctcgttgatggcgagcacgatgtcgttgccatcattcgccatcacgccaatttccggcaatccattacatcctaaattttttccctacccatagaggcactgcacccaatcaattttaaaaattagacgaagatgccttgccagtccaaactcaattgggctgccgtcaagctcatcatgggcacacaaccccgacattgctttgtcctgcaatcgttggaaatcgacttcccaaagttcctagacaccccgtcgtacttactgcttggtcaaattgaagctgcgctatatttcccctttgcaacccagtctcccgcaccgacaccctagctgtgcggctctctcgtggcgccgctgacgggtggccaagctccaggcctacctcctccaaccagctgccgcatgctctgccccagccagcaactgcacatgctctccattgccgctgctgtgcacacgcatgagagagaaggtagcagcaggaagaagaacatgaacagagaaagctagatatgtgtgattgacaagtgggcctatgggtaaacttgtctttaataaatatttctctagatataataaaataataccgtaggtgtccagcagctaattaccagtgtcatctaacaaaaacgtattctttcagtgtcctctagcaaagagcacagtctttggatgtcctagcaaattttgccatcaataaaacatgcaagagataatcatcttggaagagatgtacaaatgttggtttggctggtctcattgactcgttcaccttcctagctccttcttcatcgatggtgtagatgcactggtgccgacgaagccacagaggcaagggccggcagcggggccgacaaaggtgatgccgcgagggccggcggtcggggccgactgaggcgagggcctaccaaggcgagggtgccactaccgcctacgagcaatcgacggcgcgacctcgtcggtgcgtgagaagtggagagcgagcgatgctagagtagaaaggggatcgggaattcaaagtgcgagagacaggtcatgtacgtgtctctccatctagggttagtatttttctttccttcatgggctttttcttgatgggccagcttggtcgcttcatattgctgctggccaactaggtacttgagctgttgtgcttggctcgtttggctcgcgaacagctcacgggccagcttgatctggctcgttataacaaacgagctaaaaccctggcttgggttgttaataaatccaaatgagccaagctagataagagctgagtgagtcaatgagacacgagcttttcgtccagccctaatcgatggtgttttctcttaaaccgttttgtaatttgcaaatccctgtggtggagttgttccttggtttgtctagtttattctgtaaagtttgcaactcaatccaacggttggtttaagagaaagcgtgtttttaccgaacctctatcgtgctgtttttaggctgacggtcagatcgcgagaggacctgcggtcaaaccggccaggctttggttagacctaccatagtaggtcggatagaccaccgaatgtatattccattggtttttaatgttggggtgtgttttgatctatcaagattcgattatttgactttcgctggcgtaatctaccactcacccttttctagtagacttggttacttatgtttgatcctatataagaggaccttgcttcatcttgttttgagtttgcaacataagagtgtgtggacgtacctgcactcacccaccaaatgtaatcttggtgagcagcgatctgctcatgctcgactaagaatctcatattttcgcttatgcttatacttttcaactaaaatttgatttttcaacattaaatttgaagttgattttaaggtttttttatcgaagtttatttttcagtttttttcttttaaatcgctaagaacacgtatataaaaattttatccataaattaattacttttcattagaataagcgaaatgatggggccgtttcgcttaccattgcaattttggatacttcggcaaatataagttcatcgtcactctttagttgcatccgatactactttgtaataaaaaaaaaagttgaggttaaggtagataatgttcgatatggtggaagcgcgcagaataaactagattccccgttcctctcaggcctacaattggcgggtctttcttgcagttattggcgaagccaaacgttgacatgtaaaaatgtaccctgtgtcttctgctccatatatatgtgctctagcctcccactttgctccatatatcttcagctccataatagtaagaatgtctccagttggacctttcttttagtgttcctaactcatggaattccatttctgtcattacatgtcacataatgtaattctcttatgagtaaattgaaacactgataaaagaacttggaatgtgggtgcggtttaatacagcaacttgaaaagttcctctcagttaatgaactcatgatgatcgatgacattacttggtatgtctcaaacgagaaatcccactcaataaaatattgcgagctttgcaattgttgttaaattcagttttcaaagcagcagtattaatttgatcaggaatcacataaggctgagcaaccttttgccaaacatcataatcttcagccatcatgtaagattacatcttgtcacaccaataagaaagtttcaatccatcgaaaacatgtggcttagttgtaaacttgttaaccatggctaaaactttagatcggttaaaatccaaagaagaaaacaaggctctaatacccacttgtaagatcgaacaacaagaactagcccaaccaggagggtgatcggctgtagtactaaaaaaccaaaatttttaacggaattaaaagttaccctcaattttgatgacatgcggtctaaccagagtatatgcacccatctgatcgtctagaaatctccggtctgaccgaggtagtttctccggtctaaccgccgaaacctgtcaccgccaccggtctaaccgccgtgtccccgccggtctaaccgttgcaatgccgtcggtctaaccactagtgtcccaccgcttggagtgctgaacccgagaaaacacaaatagaagatctctcaaagtagattgaaactttattacttctctatgtgtttacaaagggcaacaacatcactcgtcacgaaaattttgactaaactcgaaacgctaacttttctcttggctcaactctctctaaagcgataccaggaggccacaccctccctctctatttataccctagtagacagcctaaagctacgaagtaaacttgtacaagaagtcctaatcccctaggaaaccttcccatacaagaaacaaattttacaaactccaattgtactaaacttggactctctccaaattcgactcctcatcccatatgcacacaatatctccatcttataccatatggaatcttcaccaaccacttgcattgatctttagcctaagcatcccgcatgatatccagattgttcggatgtcatcttctcccaagttgactcccgatccatcaccggcaacgctctcccgagacatcaagaccacctacacaagcatcaaccaagaaaccatatccgagcataagttctcactaacttgtctcattgttagcaaacaacagtattacatacgcatagtattcatctcgaagtcataaacacgaattatccacggatatcgaacaaatcaacccgaaacctaaaccgacacagagtcggccggtcagaccgtgggctagccagtctgaccgctcacatagctccggattgaccggcagcacctgcccggtctgaccggtccaaataaccagcagtccctgttcatcacttgtaaaatccaatcatctctaaaaccacatcgccaataatctccaaatatctaaaccaataatctcatatgccaattgtttatcatagaataataatcaaacacacgttgatttgcataccatggccacactctttttcagatgtacgctatgactcaccttagaatagagcattttaagatcaatgattcatcataaatcatatcatttattactataaagttataacccactaatactatagctctacatgcaaacataccacctcatcatccattagtaataattacatacaaaacttatgtaagcatgaaacatcatctataattcattgaattctataaatcaacatccaatcatcttgcttcatattttttttcacaatatttttaacatatatacatccatcatttttataataattaacatatattcatccatataatcaaagcgtgggatatcatattttatctacaatcacatacatactactaaatttatttctctcctaacatatagtttgacaaaccagttttatttgttaataactaatatcatttttagttttagctcaaatattaaaaaatattaaaatttacttagtaatttccgcagcaaagcgcggagattcacctagtaggctagtactattagaagatatgcgcgcgcgcgcacaagcttctctcccttaaaaaacgctcatacaactttaagaagaaaaacatactggcattaagacttaacattgtggtagtgtaattagtaagcattcacatgaaaaatcagttgcatgacactggtaatattaaatcgcaagaaaagctgaaacacacatgcaggagcaaaacaaaaaaaaaaagagcaacaaacaggaactaagtgatcttgtaagtatcacgtcacacattttcatccccagccaaggtaaagccatcctcagagaatggagcaacaacatgttgatcaccgttgtctccgttagcataagaagtcgatggtccagcaacctgctcttcaccagaggactctctaacatggaatgtccgcaaattacctgagtgtcctctgttttggaggtctcctcttgccagcttctctgccaaggtctccatccccatgtaatgcaagagtagccaaacatagctcaggaactccacgcctgtaccgaggcccttagcatgcaagtaccctcggcatctggcagcagaaaagcaaagcatctccacccatacgccttcaatcactctccacatcttctcgtcatcttctaacttcaggagctcttcagcaatggaccaagcatcttcaatgagccctcttttactggatggtgacttatcttccccagttatctcctcgagttgttgctgcacctcggcgattattctctctgcaagttctctttcatccagtggtggattcttttccttgacgacacccttcagttcgttgtaggcgtctgtgaataggtttcgccttgtgcctggcatcaacatctcaggattgacaaacagtaggtacgtcatgtaattcgacatttctcggcactgaacagcatttttatggtgaatagatttttcgcaccaagtagggcaccgattattgaggccagaggatcgctctatgcacattgttgtggcatgttcacggccatgagatggactgatatggtagaagcacaaatccgtggcgagatgccagagaaggacactctcatcgaaagctccctctaagctccagcctaatccctgaaagcaaccctcaactttgagactccattgacccctaatatcattgaacatcctgtaggtgaaaacatcagttatgtgatccttccaccaacgcttcacatgcccaagaactacgtttgtaatgctgcgcgatgaaaagcaggacttcattcgccaacgtcggtcaagatagtttctgcacccaaagaatcccacaaagttcattatcgtagaatgttttttgttgcgaacaaagtatcctaataggttgtattgggaaaccatgtcatcttgatgttggtaaaggtagcgttgccttggcctttgactgagcttggaaactgagcttgatcgttggtttagtgtcacacttgtgaatacctttacaaaagggttgtaaaactctatgacagcagtacagcagagcaatgcataagtaaccttgacatctttatcattataagattttctgttactctggtgaaataggccgatggccgtaaatggtagaaacattgctaattcacgtattacagtaccaaaaaattcactgagagagctaaatagggtataattcaactgtttgtataattcaacaaaatgatgaaggccagtctcaagttcttcggtagggggagttttaagggacatcttttcttttgtatagagtagatcaaaggtgtcggacaggttgttctgtaacaaataatatgcttcgtctccacaaagtgctgagaatgacattagttttcttacgcgattatcagtacaaggagatgcaaggtctacaaataactcatcaggtgtaaagtccgctgatctacttggtttctccagatgatcatttccacaaaaaaatccccttgcacttcgcacaaaatcttcgatcgaatcaatctgcttgccttgcctgttaatcgtcctacggactttctcgtcaaaactcaccaggctattgatgctagctctattgagagcccagggcttctccaagcatttgagaatcccaggcacgaagagcaagattgccgactgcaacaatctcctgtcccctcctggccatgatttgcaaaagacatagatggctacggtgatctgggacagtgccgtgagaacatgtcgcatccacagctcattgtcttcaatattgtaggcagttatgctatcctgtccaccaaggtgaatcagtaggataggagcccaaagaatctctaagacatcgttgttgtgtgtgtgaccaacatcctgtttcttgtgacggttaaatagggttgcaagggcatatattgctagggcatcgctaccgaggtatacaaaccagataaaggatctgaggtaggatcggataggaaacttatgccgggaggctgtaatgaaaaggaagtactggaaagcgaggctgcccaagagaagaacccggagctgccactcctcccaccattgcagagcatttgagatacccattctctctccctgtccctccctctgtctatttatatatttatatatagtggcatccggagcacactctcaatgtcaatgaatttaatactgcgtccttagctaaaaaatcatataatatgatgagtattccctccgttaaaaaaaaacaacctaaatctagacatatacactatgtccgtattcgttgtactagaatgtatcacatctcagtacttagattgtgttttctttttttttacggagggagtatatatactattccatattcgttgtactagaatgtatgatacttccttcgtttcacaatgtaagtcattctagcatttcctatattcatattgatgttaatgaatctagatagatataaataaaacagagggagtatcttggtacttaggttgtgttttctttcttttttttttttcggagggactacatgacctataaacagtaactgaaagtctgcggtcatcacatgcccgctggattccttatatcattgtttatgtcaataccttgcacgactacttatgtcattgttcaagtccgtactcaatagcatggccaggtcactaaccgtggttgagtctatttattttcttgattcaaccaaatatttccattgacttctgttaatttatctctttcctgtaaacgcataaaatcttagcgtgtcatactttacaaatgaaatgatttcaagaagcaatcactgccaacaaggcaatatggcacacagaaagacaagaaccatgatctcaacactcaagcggccaagttgtgtctattttttttttacttcttctagacaaattctctccatcccatgataactttatttttcactcatctaatttgtaccataaatactccagggatgtttgattgccagccacacttaaccatagtttgctacattgatctaaaattaggctagtttgatcaacttgacagatatttggttacagcaaccgttgtggcaatattatattccaataaattaaatccctacatgtcaatgacttaaaaagaaaatcaagattcccttgcacttagcgcggtgtggcaaaaaacaattgattgcaccatgggatgtttgtttgtatcaaaggaattggtgggataactcctaactaaatattaaaatttagtaagtacacacaaagcttaaatatacgctataggaaatttcatgatattgtacaaaaatccattataaaaaattcaaaatattgcactgaaaatccaaaatattcaacgaatgtgatcaagtgctccacatttaaagcaacgagtttgacctcctcttttcctgtacctgacattgttcatagcttgagaaatcttgttagcagccaaagcccagtcctcctcctcgaattgttcgagttgctcatcggacatgtcattaattaaagcaagagcggtagaatttgacgatgaagcaccaatatccaaacaagtcgagggagaaaccaaagcatgcactagacttagaatcaactttgtgagaaagaatattcatctcatgtgttttgagttttgtataaagtgaatccaaagtcaaagtggacatatcaacagactcttgaatagatgtaaccttcatctcccaaacagacatatcaagaccattcaaaaagtggcgaggaatcttagattgtgaataattagtgtcataagcagaatcaatggatctttttaaatgtactccttttttaaaagatctcgatgaagttatttaatgtttgtagttccttgatgaaagtttttcaaagcattccaaatctcattggcggtttgaagatgtgaaacaggatcaaaatccgaacgagaaatcccactcaataaaatattgcgagctttgcaatttttgttaaattcagttttcaaagcaacattattaatttgattaggaatcacataagtctgagcaaccttttgccaaacatcataatcttcaaccatcatgtaagattgcatcttgtcacaccaataagaaaaatccaagccatcgaaaacacgtggctacttgtaaacttgttagccatggcaaaactctagatcgattaaaatccaaagaagaaaatgtaggatcgaacaacaagaactaagccaacaagagaggggtgaatggttggagtacccaaaaactaaaacttttagcggaattaaaagttactctcaattcgatgatacgcggtctgaccggagtagatgcaccggtctaaccgcctggaaaccgttggtctaaccgcagtagtcgctccggtctgactgccgaaatcacttgtcgtcacctgtagccgccaccggtctaaccgccgttactccaccggtctaactggtccgatgccatcgatctgaccggtggtgtctcgacggttagactgccgaacacgagcaaacacaaatcgaagaactctcaaagtagatgacaactttattacttctctctgtgtttacaaagtgcaacaacagcactcctcacgaaaatctcgattaaactcgaaaccctaactattctctcaactcaatgctctctaaagcgataccaggaggccacactctccctttctatatatacccgaggtagttagcgtaaagccatgagccaaacttgtacaagaagttctaatcctctaggaaacattcccgtacaagaaactaactttacaaactccaatcgttccaaatttggacttcctccaaattcgactccgcatcccatacgcacacaatacctccatcgtatgccatatggaatctggactaaccatgtgcattgatctttagcctaagtatcccacataatatctgaccgtccggacgtctccttatctccaagttgactcccaatccgctatactatctcgaggcgtcaagatcacctacacatgaatcaaacaagaaaccatatctcgagcacaagctatctccaacttgactcattgttagcaaacaacagtattacgtacacatagtatccatctagaagtcataaacacaaattatccacaaatatccaatgaaataacccgaaactaaaaccgacacatagtcgaatggtcagaccgcgggctggttggtctgaccacacgtatacctctggtgtgaccggcaaaccttgaccggtctaaacggtccaattatccagtagtccctgtttatcatctgcaaatccaatcatctctaaacccacttcgccaataatctctaaataccaaaaccaataatctcatatgccaattattcatcatagaataacaatcaaacacactttgatttaacaaagtatataaaagtttttttcacaaattacttttcgtttgcaaatatgatgtttcgcttattccgcgaataggcaaaacgaagaaagtgttatcatttgagtatttttcagtccttcgcaagataccttcttagcataaaggaactgcaagtacgttaggatggaccttgtgctacgtaccttcagctcttcaagtaacttttgggctatgaacatgaaaaggcttgtcgactagaacatgttgtaaacatttgttaattaacaacctcatttagttagtttgtttgcaatatgttatttctcgaagtattagagaagtatacctatcagcatatgttcgaatcacacgacagtgaaacttgactagagaggagtgtaaagttcacttgtagggctagtttgtttctttctctagtcccgtagctgaagccttgtggacatggtgagcaataccttcgtaagtgtagacaatactgaacatcacaaccagctcccacttagatctctctgagcctacgccaaccaaaatttcagataattaatgagcagccaaatggaatcttggtgagcagcgatctacccaaacggcaaagcctgatatcgacgtgccttatcatctatttctgcaaagaaagggtcacaatgtagttgcatcctacttgcaatgctaatctgttgactgatgtagcttatgttgcagcagttgcaattaactagattcccagtcaccttcaagcctaaaattagcagaacaatggtgttttcagcccaccctatcatatagtacactatgctctcatgggactcgattttgttcattatgccatatatatagttatatacgtcttcaatcgaactagtcgtttattacaccatgacatttcacacagatgacactagaaatgtagtgcctttatatcactgcacgtctgcacacgctataccattttctgtccatggttctctttataaacccagatggcaggagttctgcctacaattaagaaggagaatactacaattagtaggtctttcttgcaactgttgaagaaaccaaatgttcatgttgctatgtaagcaccttttttgtagtcagctccatttgtgtgcattctagcttcctgtatttctcgaatttatacatctaaaagcaataatgtctctctatccaaacctttcatttagtgaacctaactcatgggattccatttaatgtcattatatgtgtagttctcatttgagtaaattgcaccttggatacaagaagttgccaagtgggtgcagtttaatacaagtatataacagctagcttgaaaagtttctcttgtagttgtgaacttggcaagctcttattactgaaacatattataatttagtagtgaatcggttgtgttcattctgctggagaccaatctgttggctgttgctatccaatctctacttctctagctatttctcattacccaattggttgtgttaatgaggcaccacgcatattaaggtagaggaacagctaattaacactagctagcaactgtggaacaacatgtaacttccacataaggtcagagaagaccctcaataagacaataactagctagaactcaccatgaccaatttacagattaagagaaactgatctggagaggaatgtaaagtgaaatttgtatggctaatttgtttgttttctggttaagcgtggtgcgcatggtcggcaaatgactattagcttcacaagtgtactaaacaaaagaaaacatcacaatcagttccgaggtcatggagggtcactgcttaactccattgctccaatcaatttgagaccgtcagaagcaagacttcggatgtgcattgatcacccatcaacacacgggatctgggtgagcagcgatctactgattcgggagaacaagtggattttttgatacttgtgcaaataagttcacggctatgttgcatctagggatgaaaatggtacagcgggcttattttcgaaaacggaatttgtcggtcagaattattttggattttttcggaaattgaaacgaattcggaaatattttctcagaaacgaaatcgaatatgataagggcagtttccgtcggaactcggattcggtcggaaactttccgaaaaatttctcggaatttctggaattataaaggcccataccatagtctataattcctccccagcccaacctaattcagtatcctaattcctaagtcactcaattcagcccaacccaatatactcaattcaaacttgatagttggattttcgtccgttttcgtaccattttcatccctagttgcatcctacttgcaatgcaaatctcttgcctaagctagctaaagttgtagcacactagcagttgcaattaactagattcccagcaccccccccccaaaaaaaaaccctacaatcaatggatctttcttgcagtgtaccttgtgtttttagctccatctaagcgctctagcttccagcttcccacattgctcgaatttatacacctaacctaagaacaataatgtttccggccaacattccattcagtgcaccagccatagggattccaattcagtcatttttcatgtcactgagcaatttccttaattacccaatagatgttttaaattagatgacaccatacacaatttaaattagaccgcataatgtgttattgctgtttttatcgaactgtttcaattctcgcatgccacattcactactgcagaaaccttttattggtgccagtcgggagctggttaaaactaccggtttccagtcagaaccaatttaagagtagggatgaaaacggtcggaaacggtcggaaaaaccctctaccatttccattttcattttattttctcgaaaatggaatcggaacggtatactcggaaacggtaacgatatcggttatatcggtatctcggaaacggaaccgtcggaacgggaatataccgatatcggacggaagtcgaaaattcatgtcgaaaacaacgaactgtggtatcatcccgcatttaactatgtatgaagatgaccttataatttcacccttgcatcattacgctgccacacaaccccgttatatgatgattaataagttgacaataagattgataaataatataaataaagttcaatgatacttcaacatcaatgtggctaaagcatacaatgtggcttacatgataggattacagcataactaatat

SEQ ID NO: 26211 - DNA, 750 bp, Oryza sativa
atacagacggaagacgtgacatagtttccaacccatcctagccatagataagagtaccgacccaatcccgcctacggccggaacccccgggacaggcaggcaggactgagcccctagcagcaggacaccggccctgtgccatgacatctcgactaccgggccgcagctcgtgtagccttcatttgccctggagaatgtccatcgacccccgacttcatccacctccatccgtgtacttttgtttataactagactgagccacaaactaagccttacccactagacatgtggaagtacggtagtgctttgcaacagaggcccgaagaccggtccttatatggcagaggtgctactatcaaaaccatgcaccccgagcccagcctaaaaccattttggggattttgaatagaaggagcggtgtgaagccaattccacaagaaccaaaccattctaaaggatccaggtgatatgaatatttcccaaagtctaaagttgtaaaaccacctaatgttacctaattaaattgcgaagcatctacctaaaattaaactagtggtgccatgagtagagtgtccactagttggggttttgtttattctagggtgaacaaggtattaataataacaatacaactattattttgggcataacaaaggaaaataggcatggcttaataaaacaggggtaacccgggaatttaaatgaagcgataatgcctaatttaaatccacataatttataaactgggat

SEQ ID NO: 26212 - DNA, 1101 bp, Oryza sativa
tggccataacttggccatttgaactcggaattggaccgttcaagtctctaatttttccttaagaagtcaagaacccatttttgtgctttgtttctgctgttatgtggagtttattagagtaaaagccttttcttttccgttggtcgtgtagacgctgcagcttcggaagatccgctcttcgtggaagttgaagccgacgtttgggaaagcgagcaaggcaagtcacatcatctttgagcatattgaatcccagtttataaaattatgttgatttaaattattgcattatcgcttcatttaaattcccgcgttatcactgttttatttagccatgcctatttacctttgttatgaccatattattattgttattgttattattattaccttgttcaccctagattaaacaaaacctcaactagtggacactctactcatggcaccactagtttaattttaggtagatgcttcgcaatttaattaggtaacattaggtggtttttcaactatagactttgggaaatattcatatcacctggatcctttagaatggtttggttcttgtggaattggcttcacaccgctccttctattcaaaatccccaaaatggttttaggctgggctcggggtgcatggttttgatagtagcacctcggccatataaggaccggtcttcgggcctctgttgcaaagcactaccgtacttccacatgtctagtgggtaaggcttagtttgtggctcagtctagttataaacaaaagtacacggatggaggtggatgaagtcgggggtcgatggacattctccagggcaaatgaaggctacacgagctgcggcccggtagtcgagatgtcatggcacagggccggtgtcctgctgctaggggctcagtcctgcctgcctgtcccgggggttccgggcgtaggcgggattgggtcggtactcttgtctatggctaggatgggttggaaactatgtcacgtcttccgtctgtataccgtggtggtatgtggcacgtggttgcacgtgaggaagatgtgtcttgggggtaaagatgtacacctctgatcagaggaaaatctattccaatagcccgccc

SEQ ID NO: 26213 - DNA, 5093 bp, Oryza sativa
agttctaggatcgcgtttacaaaaaagccttgagcaactaaatgtctttaaatgctgtttactgcaaccctaaccctttatattataattcccttgtactcccttgcatttattctgcatttgtgggtgtgtcttgttgagtacggtggttgtactcagtcttgctcaatttttcccaagcccagaagaggagctccttgaagatgaaggctttggtgtctagctcgtgcctgccgtcaagcgcctgtggtcgtcgccctagtcttccgctgtttctcgtttgtctttgtgtgtgctgggccttcgctgcccatgtaataagttaactatttacgcttccgcttgttaaactctgaattgtatcaacttttggtgtaccttgcctcctgggacaaggattaatgcacgcacgtcaggaacgcccgttgggttatttccggtcgtgacaataatgacgccaaattttcaacgcatgaactactgcagctaactcaatatcatgagtagggtagttcttctcatgcggacgtaactgacgagatgcataggtaaccaccttcccatcttgcatcagaacacaacctaacccaagtttggatgcatcacaatacacctggaaacccttttttggatcaggtaaaatcaagataggagctgatattaagcgattcttcaactcttgaaaactctgctcacattcttccgaccacttatacttcacatctttctgtagcagtcgtgtcatgggcttagtaatcttggaaaaattctctataaacctccggtaatatcctgcgaggcctaagaaactgcgaatctctgaaactgtctttagttgtttgcagttggttacggattccacattactgggatcaacggcaactcctcctgctgagatgacgtgaccaaggaacttcacttcagacaaccaaaattcacacttgctaaacttagcatacagttgatgttctcgtagcttctctagtgcaaggcgaagatgttcttcatgctcttctcttgttcgagagtagataagaatgtcatcaataaagaccaccacaaacttatctaggtattccataaacaccttattcatcaagttcatgaagaaagcaggggcattggtaagtccaaaagacataacagtacattcgaacaatccatacctagtggtaaaagctgtcttaggtatatcttcctctttgattctcaactggtgataccctgatcgaagatcgatcttagagaaaacagtggcacctttaagctgatcaaacaaatcatcaattctgggtagtggatacttattcttgatagtcacatcatttaatgcacgatagtccacacacatcctctgggtatgatctttcttttccacaaaaataaccggagctccccatggagatgaactcggtctgatgtatcccttctgaagcaaatcatccacttgcctcttgacttctgccaactcattggctgccattctataaggcctcttatgaatcggagttgttccaggtaccaaatctattctgaactctatatcccttttgggcggcataccaggtaaatcatctgggaacacatcgggatactcccggactataggaatctcttccaaagttatctggttcagtcttgaccttaaagactcagaagataatgcatgaacagttacaactcgaccatcactactggtgagagttacttttctgttagcacagtctataacacctttatgtctggttaaccaatccatccctaggatgacatcaaggtctttggattctaacaagataagattggccagaaatggtactcccttaatttctattctgacagaggggctacgttgcaaagagagtgcttgattacttggggtactaaccatcaaaggacgtctaagatcttctacttccatcccatgatttcccgcaaaactcatagatagaaatgaatgtgtagcaccagaatcgaaaagcactgttgcatgaactgagttaacagggaacgtacccaaaatcacatctggagcgtcttgagcttctgcagctgcaacatgattgacacgggcctttgatgctggtatagtagagttgctctaggcagggacaaccttcacgcgtcggggctttggacacttgtcagcataatgtcctgggtctccatagttgaaacacaccacgggcttgctgccttgctccctcttggcaggcggttgttgtgttggagctgcaacaggacgtggagcttgattacggatgttgttgccagcattgttgttgaagaactgacgctgcggacgaacaacagatgaagaacctccatgtggcatggactggggtacaaaagtaagacgcggcttctgattattcccctgttgtatcttgaattgagcaatccggcgtttcttctgctccatgcgattatacttgtcctcctgacgaatagccttatccactaatttctggaaattagaataatctccagtcatgagtgggtaagaaagctcatcattaagtccttccaagaacttctcctgacgctcttcatcattgcgcacatcttctggagcataacgagctagacgattgaactcgtgtagatactccgtaacagagcgagatccctgggtgagcgacctgaactccttcttcttgagagacaccactcccgatggtatatgcgtcttccggaaagcagcggtcaattcaagccaagtgataggttcagcagtagtcctattcaggcggaagtgatcccaccattcagaggcagggccaagcaactggtgtgatgcaaatgagaccttctcctgatcagtgcactgaagcaaatccaacttcttctctatggcatgcagccaatcaccagcttcaacagggttagtggtactagagaaaataggcggcctcacacgaagaaattctgctaacttattctgaggaggtgcatggttatttccttggttctgctgattctgaagttgttgcatcatcatgtgcattagctgagtctgttgagcaagaacttgagcaagggttgggttcccttcattgttattgttgttgttggggttgttgaggttgggaccattcccgttgctgcgagtgttcaccatctggcatggacagggcacaagaagagaaaccggggaaactacttaggacagagaattactttaacttttattgatcttaactgagtttcattattacaaactgaagactctcacaccactaaactcaccaacttcctaacactcagaggcaaacaaacgcatgcacttacattccaccactgatgtaaatcacatgcaagacccacacacacaaccaaacttaaaacaagcaaactaacacaacgatctaagacaacggcttaacaagtcactctagttcttccgagcatcggaggtcgattgaaggctcgttcggctcgtcttcatcatcttgagttgctacccactcaatcttggaatggttgcgcttggattcttcttcttcatcatcacttacgttgacgaccggaggatctgctggggcaacttctttctccaccacacggacctttggcgccaattgataacgagggacaaatagagctctcttccttgcggtaagacgaatcctggccttctgcggcggtgcttctcccttcaacgcagctagttccttctccaaacgatccaccttgtcttctagcttgcaaatcttaccacgattccaatcttcacgatcttgggctgctaacacagtctctgcatgactttcatccatagcccatagcatctcaaccaaatgtcttgtggtagcatcattctcaattccttcagtctcaaggtaactgccacggtcacttccctgtggttgacgaggatggtaacgatactcagtgtcggccaattgatcactgtagcgatcgcggagctctcctatggcgatccttgccacttcctgacatgcatggatgtagtttcttcctccagcttcgaacatcactgatagaatgtcttcactattactgttcaaggtgactttgactcggcacctctcttcatgacgatcatgaggaatctgagcataaaaaggggcagtcccaaatccaatgacaaaggacattgtacgcaactcctggacaaaaccctcaacaccaaacaagtactcaggcttgtagcgcggcatctaaacacaagtgaaaggagggagttaagacatctatccaattaatatcacaagtttttggattaatttgaataaagttttagaaattcaaagtaaaaggtaagtaaacaaagtaaaccaagtttgcaagataagttgaaacagttggaaaccaggttacaagttttatacttttgaataacaggttccaaaagaaataaaagaaagttataaaatcaacttgttaaatttattttattgcagcaagattaaatgaaacaacattgtaaaatttttgctggaaaatgagccattagtacagtaatagatgtacagtactaataacactggaataaattttgaatgagaaccattaaaagagattatgaagtgcatgtgccattagtttggtttaattaaaagagaaagggaggagaacagttctacttttccaatatttttagagggcttctatgggtaaccatttggcataacctagggtcaagggagctctgataccaacttgtcacgcccggaatttctatccaaaattccaaacgcttacatgtgtgtaaaccctcgtccaggaatcagccgaggcacacaataacaaattgataatagagtacagttattactctaattattaagcgtataaaatatcattacagaggtagatagttcctctcaatcaataaagatctaagcagcggaaaaagataaacggcgcggacgactccactccacaggcagcttgaccagggctacacctaatcctccacaccatcagcttcactgtagaactcttcctctgatgaataattgcaaggtgagtatatgacatactcagcaagccacgcagcaaatatgcaagtgcacaggataacaaaggatggcataatagggtttcatttgcaaaagcagctttta

SEQ ID NO: 26214 - DNA, 962 bp, Oryza sativa
tatagggcgaattcgagctcggtacccgtccgattttgcaggagaagactttgaggaattccaaggccagcaagacaagtcacacaaatcccaaacaaccttttgagcatgttgatcccgtttaaagctattgtttctattcaactattgcatttattttcgaatgtaattaggtggaattcacctattgtttgttatggcccttttgttcttgattactttaatccttgataccttaggctattataatttgactagttgagctttatatgatggttcagctagatattagacataattgctttgtcatgcttagaagcattagttcactacggggataacttatgattcactattatttaatgatggattaatgatagctcatgatggttaatcatgaatggttaattaattaatttgccaactaaaacctgataatggtgggttgtgagcacatggttttgatgatcgtgctcatgacaattaaggaccggttcacgattttcggctgtgaaacatttaccatgccaaccacaagccagcgtgggcaacggctttattttctatatagtatggttcatagtagagcaccagactgtgaagtggcggagataagcccacgggggtcgctggggagtccataccttgttcataagggagtgattatgatccgggaacggtgcactgctttgaattgtattatatagagggtattgtcacaatctctattcgggtacttgtcaagtatcgtgacgcatggttgacatgatgttgaggttgtgtgttgtgggtacagtggtacacctctggccagagtttgaactattcgaatagccgtgcccgctgttatgggcgggtctaacaatgtctttcgtgattagtctcacactttacactctaataaatgacgatgttaatgacttgattagctcctggtttggaatagttaattcctggtttgg

SEQ ID NO: 26215 - DNA, 711 bp, Oryza sativa
ttgtgggtacagtggtacatctctggccagagtaaaactattcgaatagccgtgcccgcggttatgggcgggttgagtaatgtttttcgtaattagtctcacacctctcacaaataattattgatgcaataactggtaataatttattttgctcctggtttggagttagatctgtacagccgggtatggttgttcaggatggttgggcctgagcagcatgggtgctgctgttcagtgttgattaaaatttctaattaattactctattgttttactactcttaactctttgctaaatgctgcttttgcaaatgagcctatattatgccatcctttggtatccttgtgcacttgcatatttgctgtgtggcttgttgagtatgtcatatgctcaccttgcaataatcatcaaacctcagttgaagagaaaggatccagaaggagaagacgtttggcttataccccagttgagctgcctgtgggagtggagctgaagccatcgctagaccgttaattccgcagctgtttttcttttcttttgtaagtatgtaacgttattattatgatggatttgtatattaaattgtcagtttgtgtacctcggctgattcctggacgaggattttatgcacaaattagttcggaaattacttgtgaatttccgggcgtgacagtctatataaagcacccctgttccctcctctctcttttt

SEQ ID NO: 26216 - DNA, 539 bp, Oryza sativa
ctatagggcgaattcgagctcggtaccccaccagctagctacggggaggctatacgagctgctactcaaagctaaggggaagagatggagcgaggagggagaacggagggatgccctaccgagacgaggcggggcgctgtgacgagaggccgacggcacgggagtgatctctccggcctcgggccggggaagagaaagaagacgagcgcccggagtccccttcacgcgtccttcgcacgcaccggctctcccggtgctttggcgacgaacggcggaggtgcaagcagggcggagcgacgatggtgcggaggagttggaaggcgaaaacaagggagtttgaaatggggaaggggctcggatttataggggcgataatgtcggtttgggagggaggaaccgacattgggcggtcaagccagcgagctggctctccggctagcggccaaaacggcgacagggaggatgacaccggcgggggaaaaaagaagaaaagatagagggaaagaagacttgcctcttgccactttgggaaaagaagg

SEQ ID NO: 26217 - DNA, 1738 bp, Oryza sativa
ttttataatttctagaagtccctaaaaaaattgattttttgtcaaattttaattaatatcgtattgtattcttttaatatttttattttttattttcaaattcagttgtttcaaaattgtatttctacttgaactctcttttttttataattttggatattgttttattttttttattttgaattttaattaatctcgtattgggttcttatatggattcttctttcaatattgcttatttttaattctgaattttagctaattctaaattgttttcttacttgaactcttctttcttttttgctaatttcggattttatttttatttttattctcaattttaattaatctcgtagagggttcttatatagactcttcttttaatatttcttatttttaattccgaatttcagctattttaaaattgtattcctacttggacaatccttttcttttctaattttggattttattttatttatatttcaaatattgattaatctcgtattgggttcttatatggaaacttctttcaatattgcttatttttaattccgaatttcagctatttttaaattgtatttctacttggagtcaccttttctttttttttatttttcttcgattaatgtgggaatttctagctcccacagcgaatgtggtacctcctttcaaagctgttttaataatataatagatagatagattgttcaggtgatatatgtgttgccacggctcatgtttctagattcacatgagcatgagttaagtttgagatgttgtagatctttagccattttgtcaagtctgctaaatgtgtaacacatctggtcgccgccttcgagtggtttgatgggcacatctcaggctgaagttgactgccaggctaaaggctcagcattgtctccaatattattctctcgaggcgtcggatgtttcattatgcttgtttgatgacttgaattattcacttcatctctcaaatataatggaaggtccggagagcctaccacaatcacataggtattgtttcaccttgtgcatgttgaaaattatactctggcactggccttcccgtaacacctcgtattttcatatattttgctgaaaaattgcattccctagacaagtttgttcttttgcaaagttgcagtgttttccagattttcctctgtgctcaagtctggtagcttctgtaggtctgttctttcccgtgcagttgttttgttatgttgattcatgccactaaaaacatgaaaagttactgctgcgatagtttaagaatctaaatgatttgtacttataatcgttgtcctattgcgggtgtgctgccacaagcaaagatgctgtctggactgaagggagtttctactaacggttccttttctgtgcgtctgtgaatgagcaggacaagtggactctcttattgaaaacctggaaaaacttttgccagatgcaattttttgtgtggttggatctcacgaactgcatcatttgtatcttctgggttgaagccttagaagactaaactatccattcaagttgcaaagggaatgaaagagttagagaatctacaattagtaatgcaagatatcctgaggcgtaatgttccaggtatatatatgccagaagttatcactttatctacataagacgtgaacacgttttttttgttaactacatgatctgtctgatttgaaaattgaaatgtgagcagcaccagcagcattggatccca

SEQ ID NO: 26218 - DNA, 712 bp, Oryza sativa
atgtgttacacatcaggaagacttgacaaaatggctaaagatctcaacatctcaaacttaactcatgctcatgtgaatctagaaacatgagccgtggcaacacatatatcacctgaacaatctatctatctattatattattaaaacagctttgaaaggaggtaccacattcgctgtgggagctagaaattcccacattaatcgaagaaaaataaaaaaaaagaaaaggtgactccaagtagaaatacaatttaaaaatagctgaaattcggaattaaaaataagcaatattgaaagaagtttccatataagaacccaatacgagattaatcaatatttgaaatataaataaaataaaatccaaaattagaaaagaaaaggattgtccaagtaggaatacaattttaaaatagctgaaattcggaattaaaaataagaaatattaaaagaagagtctatataagaaccctctacgagattaattaaaattgagaataaaaataaaaataaaatccgaaattagcaaaaaagaaagaagagttcaagtaagaaaacaatttagaattagctaaaattcagaattaaaaataagcaatattgaaagaagaatccatataagaacccaatacgagattaattaaaattcaaataaaaaaaataaaacaatatccaaaattatgggtaccgagctcgaattcgccctatagtagtc

SEQ ID NO: 26219 - DNA, 1454 bp, Oryza sativa
ggacagatcccgagctcacaactgcattacaaaagggaaacggaagccaggacttggaccaaacaacacaggcgcgacttgggaactaggccggaaccctaaaaagcatcgtagccggcttgctcctggaagaactccttaacagcaggatccgcttcatcttcttcagcaactggggggattatttatatagagcaaaggtgagtacgagagtactcagcaagccatgggaaataagtgtttaatgcaggcttcagagaaaggctgttgtttttgcaattgattttatttgaactcttttctaaaaacaactaagtgagtgcttctcaaacgacgcggatgagacagtgcgtctcgtccggtcggagtatgtgcaacacccggccaacagcttttcaaacggccactcgggccaacaactttcaaacggccacctgggcctagctgatcccatcagctgcagatttttcaaacatcgaacccctttccacaacagcaatttcacaagcagtagtcaaccaaaactacgctaggaatcacctcacatccgcccatgaccgtgggcacggctgttcgaacagattgttaacctctgcagagggggcacactttacccacacgacattactaacccggatcacctagcccgtggggatcagccacgtcgggagacctccaagctttcatgacaaggcatttccaaagccgacacaggtttaccatatgccgacgagaggggtcccagaccaacaacaggttaggtcccagaccatactgtgccaggaagcccaggggtcctccccgacaccaccccggcgaatccacatgtctctcggcatcaaggctcccctgataagctagttattcagccaggggtgtcccattccacccatgtggtcgtacttgtcttatgtttggatgaaattccaaggaaaggggtccttaagtgcaagagcgggaaaccgtacacccggtacgttccccggtccgcggttttgggaaattcatttagttcgcaagcaccgacccaggtgtcgggttttccaagtcttttgtaaaacccaagttttacccaagaagtttttcagattttaagtttgaaggcggccgtcgatactcgtgcagagtgcacgatttccgaggcacaactgggtggttacaagggaacatggtataacaattaacaaaggaaggatcaaatgcaacaaattaggtaggtccgccaatctgccttgcagacgggacaaacagattaagtgcgatcctatcaatgcataatatttttcaagcaacataattaaatttcaaatataggctcaagatgttcaaaggtggcttgccttgctcgagatccggagcttgatcctcgaaatcctcgcactgcgggtcttcgggctccgaaactacacgcgaaacgggacaactcaacaaacggcgaaaataaagccctatta

SEQ ID NO: 26220 - DNA, 3552 bp, Oryza sativa
  unsure (1)..(3552): unsure at all n locations
cactgctgaaactgaaagcaagtagcctactgaagcattagatgttggattctagcaaaattagtatcagtacttgaaaaacacaagccgtacaggcacgggaaacctgatcaagactgcacgagatgtacataggaaaaaaggcaataccgaaccaaatgaatttacaagtgttgaattatgcttgagaaaccagaaaactgacctctgggatattctcaactctcagtctctctcacttaattcagaccaagagaagaaagggtgtgagtgccaaaaagatcaaaggaaaaaaaataaccaagaagttcttgctgcatcaactattgtgtatcaagtcaaccggagaaaagagaagttggttagaaataaaaccaaaagttgcagcggcgcccacgctgcaaaaagcactactacactcctagcccaaccaaaaaagatgaccttaaatgcattcatcaacggcttaaagaacgcattcaccagcacaacgctttgttgcaccttttaacacggccaaaatggaagcctaggcacaagaacacgtacaaaggaaacaagaaagttgaaaccatcttttctcaaagactcaagcaagaggcaagcacaaaacaaactttacaacataaacccaaagctgtcaattaaaaccaagtgaacctatgctcgtttcgtttgcatggtcactcgaaggctgaaaagaacaaaagtgaactaaagatgattcatcattgagtagaagtggagagggcatcagattcctcacctcagagctcaccacgcagcatccaacgccggcctgcaagctaagcactgtctcctgacctcccaacacagagcagaacacctcttgttgatgagaagagtgtgcacttgcaacaaaaaccttgggaaacagaaggaaaatggactaatgtgaagtgtacaagaacaggttaaagagcaagaggactggaaggttatataagaccgagcaacacccccccttgggaaagaatagccntatgactcaccaaccgaaggaacaaaagaaaaacaagattaggtgaagaggacttaggacctaaaccaagatatcaaagggaccaaggaagaatcaagccgatggcacaagagtaccacttactagaatggataagaagagacaaaacagtcagctttttgcactagtaacaatcccccaaaactagcaatcagagtatcagacgatcagacaccaccaaaacccaaagggctccaggagaaggaagaagaagaagacgatggagatggagatggctggccgcttgatcgatttccagaacggagaggagcacacggagaggcgttaaggaaaaagctgtcctctttactactcacgctctcttttccatcaattcgacggcaaatgagctgcctctctctcggcaacgcgtgaggcgtaggctacagtttccatccctgcctgcctgcaagccaaggaacaaccggctcgcgaaaggatcgaaacgcctaccaccaccgcatcagatcagcaaaacttccataactgggcagcttataactcccctccaccattaatggctcatcaagaacggcaaggagtaattgcgagaagaagagcagcagagcgcgaggacaaggaaacaggtgcagaattcagggaagctactactactcccacaagcctactacaacttttggcgcagaaaaggcagagacgagacaggggaatggcaagattacccgggattgtagtggagaagaagaagaagaagaagaagaaaaggctcggttcctacgcgcaggccgccatgtgaagaggacgactagactagcgcacaactagctgcaactagactactgcatccaagaaacggttttttcactaaaataactcggattcggctaattcttttttgggttcagttcttgacacgcgtgtgtgtttccttgattacttctaggataggttctaaattctctcgagttgtaaagggtttgtgcggagatttattccccacttcagtcggaagctgaattggttagttttttctatcatcgtgctcctggccgaacgttacggcacggacttcggccactcgccgcagtggagggacggacagggacaagagagcttggtcacgagcggcggccaagtaggaaaagaaaggagcttttctttttgcatgttgcgcctttggaaattctgctgactaaaaaccaatgttccctttggcatttttctgtctcatggttttagtttttctaaattttctttttttcttaaaaaataattgaaatccgacctctacattcacaccggattaccacagtcaattcattttaaaaaccgaaccttttcatccacaccaaaacgaagagaaacacccnttgacaactgatcaatacatngacatcagtaggagtactgatcggtctttttgacagttgaaactgaggcatgaaggtacatgcagtacatttactgtgagtttattctcgatatttttgttggatcagagcaaataattttcttctaaaggaaaagaacgagtcctctactcctctgccgtgttgcctatgccgtatcagtcactgacatgtggggcccaaagcacagtgagggggaagggggtggcatacgtgtacgtctagtaattcattcactcgtaccagtagctcgtctgttcctcggcgcctcgaccggcgcgacgctaacggccatctcctcgtagctgttcaactgttttcaccccaactgctgcgcctacgttctctttcagattttggtactactgtctttccagctctcctcctctgcatcttctgagcacggcgacacgcccagggaggagaatccagagtaaaaagtctcacaccttggattatctcgcagaatctgtccctaatattcttctatccccttgtgatcggtaaaaattatgcacggagagtagttctttaaaaaaaaattcagcagcagggttttttttgggtgaacctgaagaaatgttgggcaggagccaagagagtccgttggacaggtgaacggttcagcgggaaactgtcaacgattttgaactagccctgtctggttgatgacttgtggcactttggctgttcagatttgagactgttgcttgcaagtggcgcggtagaggtactagcatgaccatgtgcaatctctcatttcttcagtttttttctggggaaaacactgttgatgatgggtttcactttgaaattttggtcgggtggatatgattctttaatactcttaacaagaaaaaaaagaacaattgcataaggtgcctaccaccaatccaaaattccaaagtggggcgaggtgaattgtgatgttaggaggagaagacagcccagacaatccatggtgattttgcccatcttttgtcttcgtcacagtgcatctgcatactgcatttccctttcaaacaggaggtgctaatgcaatctcgacatggaaagattcaaaatttcactatgaatcaacgtgaggagttggctccccatttccccaacgttcactgcaaggcatgacgaaggacagtg

SEQ ID NO: 26221 - DNA, 663 bp, Oryza sativa
caaatgtgctaccttcagtctgaatggaggaatccaatcttcctcgaagaccatctgcttgaaagagttcccagagaggtacaaatattttaagttcagtaaacttgaaaaatgctcctcggaaatctgtccggtgaaattattccaaccgagatttaggtaaatcatgtttctaagtgctccaaaacccacaggcagctcaccagtcagtgtgttgtgtgagagatcaacaaaatccaggctgctcaactttcctatccaaaccggcagctcaccgctcaaattcgtagaatgcaggtccatctctcgcaacttattccatgaacacctcggtaatctctccatgaattctgttgcgtccccatcaatatagttgtcatataggctaacaacctgcagatcacacagatgctgcagggttgtcggtatggtccccattaggttgttgtggccaagatccataacctgaagtgcagacatgttaccaaatgcgtccggaatggacccaaaccaatggccttctgtcagatagagctccttgatgcctttgtgatcccaaagccatttctgctgaatcgaagcattgaatttgttgactgaaagatcgaggacctcaagacgtgtgaggttgaaatgtgacatggtagagatggcactctcaag

SEQ ID NO: 26222 - DNA, 1753 bp, Oryza sativa
cttataaggagggacttggatcgatccatgacaagccatccgataagaccacaatgcttcggccaatcgagtatgccactgccgaggataatctgaaatctttctcttaatcaatttgatcaagctcttgttagatgcctcggcctgcccattagcttgtgcataatatggtgaagaattcaacaatttgatacccatgctatcggcaaactgaacaaactcatcggacacgaaaattgaaccttgatcggttgtaatggtttgagggataccaaatcgatagattatatgttcttgaacaaattgtatagcatccaaagaatcaatattcttcaaaggaatcgcctctacccacttggtaaaataatcggtcgccaccaatataaacttatgtcctttactcgatggtggattaattatgccgatcatatcaattccccaacctctaaatggccatggtttaatgataggattcatagccgacgccggtgccctttgaatcgctccaaatttctgacaatcttgataccctttgtaatacctgaaacaatcttctagcattgtcggccaaaaataccctgcacgccaaagcaaccacttcatcttatgagccgattgatgggtaccacaaatcccttcatgaacttcgccaattgcaaccttaacctgattggcactcaaaaacttcagcaacaccccatcaatcatcctataatagagttcatctccaataaagtgtacttcaacgctttataccttaatttccgagaagccgattgagatggattttgcagataatgatgcacatcatacctccaatcatcggctgttaatgtggcaacttctattttgacatacttcatcatcggcttgtaacccgatgcccctttagccaaatcattagcttcaacattctgttctcgagatacatgcttcaaagtcaccagccgaaattctttcatcaactcttggcatttctcattgtaaaccattaatgtatcatttttgcactcatattctcctaccaattgactgaccactagcaaggaatcacccatgatctccacagcatcggcttcaacttccttgagtaattgcaaccctttgagaaccgcttcatactcagcctgattattagttgcataaggtttaatagtataagcaaactcaaaacttgccccccgaggggaaattataaccaagccgataccgcatccatgagtgcacactgacccatcgaagaataaagtccagggcacaacttcaactgagccgattgagtcatcacgatgatcaacgataaaatcagctatagcttgccccttgaccgccttcggtgattcataccgaagatcaaattccgttaaggaaaatatccactttccaacccttcctttcaaaatcggagccgataacatatataactacatcggccttgcatataacagtgcattcattggacaatagataatgccttaaccttgtacaagaaaaatataagcacaagcacaacttctccacaggagaatatcttgtttctgcatccaaaagccgacgacttaaatatagaacacaaccctttcttttccttcaagctcctgaatcaaaaccgagccgattgacttctcaccggctgatagatataacctaaaaggtattcccttctgtggaggaatcaaaactggaggagagctaagatattctttaatactatccaaagccttctgatgctctgcccccaagtaaatttttg

SEQ ID NO: 26223 - DNA, 746 bp, Oryza sativa
cctccgatgccgccgccatggggtatgccatggggatagtagctgtagctaatgtagcacttctcgaggtacacctggcctgatggcgcgcccccgcactcgacctcgacgtgctggacggcctgggtgacgcactggccgcagtcccccgaggagaggtcgccctcgcactgcgccatggcgtacacctgctggtagctggtggcgtagaacccgccgtttcccccgccgacgctggcctccatctgcgcgaaggcggtgtcgcggcgcatctcgaagtcggtcccgccgccgccgccggtgccgcaggtcttgaacagcatctgggtcccggacacctgggggaacccggatatctcgtagagcgcgaggcagccggtgagctggacacgggcggcgacggaggcgccgcaaacctcggaccaggatgacatggcgcgggagacgcaggcggcgcagtcggagccggagaggtccccgcggcactggaagaggccgaagacggaggtggaggaagccgaggatgacgacgaggtcttgtagaacttggcggaggcggactggtccgagagcgaggaggagagcgcggcgactgtggggggcaccgcgccgccggggaagctctggttggagcagcccttgtagacgagcgcgtacaggtcggcggaggacaccggcagcgaccggagaacgacgacgacggcgacgtggagcagcagcagcaggagagctctgggaatgcccat

SEQ ID NO: 26224 - DNA, 735 bp, Oryza sativa
  unsure (1)..(735): unsure at all n locations
aatgaatgacatgcgacaccaccnnacananggngnatggcgactacctccgccgtcggattgcgccgatccagcggcgcgctcggggcgcctgggagtacaccgtgttctaagactgcatgaggacccaccagggagtgagatgggactgggctcctgaggactttaagatattggtccaaccgatgctgaatatcaactacgtggaggccgccctcattacccaaggaatgcttcccctctgcagcgatccaaaccgcgccttcatattgaccattatgatggcggtcggggcctcagaggagcgagctccaaagggccactacggcgcaagcaggaaccgccggggggaacaatctaccccgagagagggtcgtgcttctgtgtcccggggcaggggcccggggagcaaacgtcctacctacgcccggtggaagatgaagcatggaggaacaccttccccatctgctttccgagggggcggtgcagagcgtgccagcagaaaagcgccatatgtgtgccccccagcataagtacccgagggggagcgcaagaagaaacggtccctcaagatggaggagacagaaccatctctgggaaacccttattccccttcaaagtgggcgataaccgacccccttgatgttcgcctctaccctcgtggctgatttattctttcacgcaggttttaattacccatcctggtcgcttctggattttatttgtttgacaaga

SEQ ID NO: 26225 - DNA, 2005 bp, Oryza sativa
  unsure (1)..(2005): unsure at all n locations
actcacgtacatcagcccctttgtcagtgacacggttactactccttggtaggcgagcataccacgtatcctcatcggagacaaattcatcatgtccatcgtccaatatccaattatgaagggcacaacaagcgataaccaccattgcttgggctttcaagggtatgaatggcttattcataagaatcttgaagcggttcttaagagcaccaaaagctcgttcaattgtagttcgaagtgaagaatgacgatagttgaatagctcttttgggcattttggaccttgagggccacgaaactcttttaggtgatatcgaacacgacgatatggcggcaatatacccggcctagcagcatatccagcatcagccaaaaaatatttccctacaaccatcaatcatgtcatatatgagcctaatgttatcttcttacaacaaggctaattacgattctttcaaaatgtttaattaccttatggtattttaagaccatttgggcgcgacaatgcatcttgcaagacaagagaatcatgagctgacccctcccancctgatagaatatatgtgaacctaaggtcaaagtcgccagcagccaatacgttttgtgtggggtatgacttgcggcctctaaacctatccaccttcttggctggcacacttgccttgatgtgtgtgccgtctagtgccccaatacagccctaagtgcagacaaaataaaaacatccgagtgaaataaacaaaagttaatggaatatgaattattgtctcttggtatttagagttcccccaaaatatggatagaatttgtttgggttgctggtgatcttagtatgtgtatcggcagacctgacataaatgagttctcgagctaactcacacatggcccgcaacacaatatgaaaatacctactcactgtctcaccagatcgccaaaatgagaatcctacagatggaactgaatgatgttgtccacccttcttcagaaacattgccacttgctcctctactgaaacatgaaaggtgtcaactagtagtcccttgttcttaagacgagaacagagcctgtagaataactgacggggcattctcaattgttgtgtgcatatcctatctgaagtgtcgatcaacctaattaattcacttgttctccatacatccctatggatcaggggcccataccgtacccctttgcatttacttcttttaccatttttattcctcaaccagacgaggatcaaaaccagaagtatcactacagccttttgcctcaacaagaagcaatgcacatattgctgtcgattgctctccatctggaagcagattaccagtttgaaattactttagaaaatcaaatactattgtgccaacatacagatttatccaaaaaaaaggagatattcacttagatgtaaaaggacacactaataaagtacaggtgaaataagcatcaacactaaactagtaagatgttcggccaactaacttttattactactagtacataagatgctagggtaccgaggcagattatacatcagaaattttattatcaacacaagtgggaaagcattctatggaaggaatggttacctttgtgtgatggcacttgagcgcgacggagtcagtagagctgcagctgaaatcgcggcgcccgtatgccgtcctctgtcgcctgagcagaacccttccgcctcactctcgtcccctccccagcagatttactccaaaatttctaccccatttgatcagctcttatgggtttgattgtttgagaagatgactatggatggcaagatgggcttctgtgtcttctagctcgggattggaggagctataggttgtggcctgtggctagagaagatgatgagcggtaggtggatgccaataaatgggaatatctgcttgtgtactactgtgcagcttggatatggagcgtcatccgagcccgcgcaagagtttaaatttcacgcctacgttttggctcttgtcaatggcgtgacctattg

SEQ ID NO: 26226 - DNA, 1550 bp, Oryza sativa
attcatgcatggaatgggattaattagctgcccttgctacccattgcccataaccacttgcaattaattcttcatagctacccgatcagattatcttcacaaaactacaaataaatacttgtctagataacatgcatcatgtcatgaaattgcgtttgtcggcaccagctgggtgagaatctttcgaactcactatcttgaaaattgaaaaatacatattttttctcttgagaaaaaagacaaattctagatctttcacgttgttccacggagctcccggtgccgtttgtgcttttgcttcgactacccacaagctcgggattttcagcgagttcaacgggcctctcgtgatgtagaagtcaccggccatctacacatttcttttttgtttttacttcacttttgcttctgattgggagggaggccatgtgatacaccgacatgtgggatatgagcttgacacgaatcacgctggatcccacatgtcagtgacctgtagcatttctctcggcaaaaaaaagagagaaaaaacccaacaatcttttttgtggccgtagtatatacgtaatcgtgtgaacttgatccattttggacggtggcgctgcccccggcgtggcgtacgaccagcgctctgcatgtgacccatcacgagatctgtgaccatgtcctcgtgtcaggacctggcatcttgcagctcacttgagcttgctattttatttccggtccatgtgattaactgacgtgatcgttaattaacggaacttcattcacggagtatttattaattatgtagataagatttgctttggccattttaagcttatgctgattgatgtgtgtttgttgcagtataccacttccgaaatgggtgttggaggagatggacaaggaccaggacctggcctacacggatcggagcggccgccgcaactacgaatacctctcgctcggcgccgacgccatgccggtgctcaagggccgcacgccggtgcagtgctacggcgacttcatgcgcgccttccgcgaccactttgccgccttcatgggcaacaccatagtcgtacgtccacgccccccactccgacgaccgattctttcttgattgattacctcgctgttaattaatgccacttctctgacttgatctgcaggagattcaagtcggcatgggtccggccggtgagctccgctacccgtcgtacccggagagcaatggcacctggagattccccggcatcggcgagttccagtgctatgacagggtatgcctggctgcatgctcgtctcccatggcggctagctttcgatcggtttctctttaatttcttgatttggcggcgaactgagtgagagatgatgtttcggcgatcgatgtgcagtacatgctgagcagtctcaaggcggcggcggaggcggtgggcaagccggagtggggcaacgccgggccgggagactccggcgggtacaacgactggccggaggactcgcccttcttccgccgtgaaggtgggtggaacactccctacggtgagttttgggtaccgagctcg

SEQ ID NO: 26227 - DNA, 19986 bp, Oryza sativa
aaatcacgaatcttttctatcttcttaggatcaatctcaactcctctctcatgcaccatgaatcctaaatattttcccgtcgacacaccaaaaacacacttgagtgggttcatctttaaaccataccggcgcattctctcaaaagctaaccttaaaacggccatatgtccctccatgccatccgatttgacaataatatcatcaatatagatttctaagataatacctagtaaatcatggaagatcaaattcattgccatttgatatgttgcaccggcattcttcaatccaaaagtcataaccacccactcaaataagccaataaatcccggacatctaaaaggcgtcttgtacatatcctcctccgctataaagatttgattgtagccggcattaccatccaaaaagctattcaccttattactcgaggcatcattaatcatcatgtcggctataggcataggatattcatcttttggagtagctttatttaaatctctaaagtctatggaaacccttcttctccaccgggactatactagatacccactccgcataacgacatggcctaataaaccccgctttcaacaaccgatcaatctcctcgacccggtcatatagcaaagaattgaaatgtcgaggtggttgtttataaggcctaaaacccggtttaattggaagccgatgttcgacaagatcacggctaagacccagcatctcatgatacttccatgcgaagcaatccacatactccttaagtagctcgattattttaaccttataatcagctttcatgtttttgttacaaaagtcggccttggcttagttccatcacctatgtctacttcctccaaaggatcggccgatgtaaacccttgaccaagcttctctacttcatcaaaatcttcaatggtttcaccaatatcgttctttgtagaccgaaattcttgcaccctcttttgcaaccactctaaattagcttctttactcattacataaagtaatatggcctaaccgtgctacactagccagctttacagagataggtatcaatttgccatcggaaatactaataaaatcatagctataaagatccatccccaataagcattgaatattcccactcaaatgttgctttggccattgcaacctcagccgatgtatccgcttgaacaatttcaatatcatcgccgtcccgttgaattaaacattgatgcaaggtagaaggcacacaaaaattggcatggatccaacaatgacccaaaataacattgtagttaccttgcacatcgacgatgtagaaagcggttggtaatgtcttgtttcccacggtaagctccaccgaaaaaatacctttcgcctccgttggttcaccattaaagccattgagaatcatgttagtcttcttcaactcgtcatctccacgccccaacttcttgaacaacgagtacggcatcaaattcacggcggcacctccatctaatagcatcctagagaccagcttcccatcaacatgacctttgagataaagaggcttcatatgacgatttgattcatcgggctttctcaaaaaccgcatctttaggacctagtgaaaattgagcaactttggcttcatccatagcacaagactccataggcaacatgcacaccatgttgacatccatgtcttcctttggagatgattcgtccttagtaaccgattgttcttccttctctttttgcacaacaaccgattcttctccctctatggatttacgcctccacacctttgtaggcggtggtcgcaactcgttgaaccttctatccctccgctctttggcttctctctgttttaattcttgggcccgaagacgttgcaacctcctcttttggatagtcgtcaaatacttaggcatccaccttggtttcggctccgttccaggaggtaaataatgtcccctgttgattctacccgaagacaatgaagcccccgagctaccctttgtaaacctctcatcaaaccagcgctggagcccggtcagaccggctagaaggcccggtcagacaggcttgagaccggccgtagggctgcggtccgaccggccagagggcctagtcagactggccgactgcgacaagctggtcctggcttcggatttgttactcgaagactccccaacttcatctccagatggtactggcacatcatgagatcccactttaatagttatcacctccaaagtcctcgtctccaccttaacgcgctttccttccctctttccttcattgacccgatttttaacataaaactggccattgtttggtgaagacaaatgctcacaagctggcctccttggtcctccccatcctaggttgtattgcattggaggcatatgattgaacattggcggtgttgtcccccatggcatgtagaaaggaaaaggataacccggtggcggcattggataagaaccccatgatatgtaggtgattccgaccgtcttggtgaatgaccaaatcgctttctaggaggtgatcttggtctttttcctttattgcgagctttctcaccaccttgcttctcatacttactcaaaaacatatcgatggttactttagtcttcttaggagctttagaacttgaagcttcactcctattctctttccaaacaccaacctctggattctttggcaccatcatctttggcctaggctctcaaatgatcactcctttccctttagtagattcggcttgctccggccgaatctacaccttcttatcaatgaaattaattgtgttcaccagaaaaagatcactatcaagcttcatcttggaaccatcggtgaatttcaatcgtccttcatctatggccgattgaacttgtcgtcgaaacacattgcaatcattagtagaatgagaatgagaatcatgccatttacaataagctcaacgtttcaattcctcttgagatggtatgacatggcctttaggtaatctaatttgtttttcttgcaaaagataataaaaaatcttatcacatttggccacgtcaaaactatacttaatctcactttgccgatctttacgaggagtcggcattagattagaacaaacaaaaggcttatttttgttagtccatgaccactcagcaccatacatcccatgatcaccctcatcatcagaatcactagcctcagggtaatcaatcaaattaaaattatgctttttctcatagggtctaacaaatttcttactatccttaacccggttttcctgatccagagccttttgcatgagttgattaacatcaagaaattgttggccttctaatctttctttaataggaacaattaaaccattaaaagcaagatcagccaaatctctatcagttatattcaagctataacatcggtttctaacatccctaaatctcttaatataatcaatgacagattcattgtatttttgcctaaccatgtcaaatcagttagcctaagttcagtttcaccagtatagaaataatcatgaaatatttgttctaattgaggccaagtatgaatataatttgccggtaaagaagtaaaccatgtaaaagcagtaccggacaaagataaagaaaacaagcgcagtttaaaaatatcagaactactagcctcaccacattgcgctaagaattgacctacatactcccatgtggtcctactatcctcaccactaaatttggtaaatttgggaactctataaccacgagggtatgggatgttgtcataataatcaggatacggcttttggtaaaccttagcacgattcctagattcaacccgaatttatccctaataataccactaatcgattcctccatattctcaggcctatgttgatttggtggtgggtttggtggcctaattggttatggttgcggcgcaattaattatattggccatatctagtatcgggaggatatcctctagtaggatcattgtaaacattagggatatgtggggcagcagtagatacatggggatcgtgggctcggacaaggtataaaagcccgttatttgccattggatctaccccctgtattgtgataattgcgctggtctgaccggtccagggcccgatctgaccggcatccagaggcacggtcagaccggtttggggtccggtctgaccgccgggggaaaacccggcctgaccagccatctggccggtctgaccggcggtgaatgcgcggtctggctggccatttggcccggtcagaccgactgattgcgcagccactccctcgccggttgtttgcatattcactccaccggttttgctatatatttgatatacaggaggcttgctagtagtggtagaggctttatctttggatgaaaaatcggctaagaaagaaccgaatttgttcctcaaaaaatcatcaaaacgagatttaatagatgcatctaatttactatttagagtagcaatggatgaatctattgtacttgctatttgttgttggataggaagtgatacctcttcagtacttaccacatcgaaattaggtttaggcaactgtccaggcttgagcaccacaccttgacgagtcctggtgcatgttctcatcaatgcctcctgtgtgatcgtcttaatgtactccttcatggccttgcgcgcttccccatcaagatcctccaatgagattggcaacatattagatggttccacctccgccttggttgatggcggctttgtcatggcggcgtcaacgttgagatgtcgttgagcatatttccccagcggagtcgccaaaaatcgtgttggcaactttttgtgacaaattgacaaccacgatcgcagcacctaaagctttgcggatagtagagtcaccaaccaccccaatctagcaagcactagatcaagatgggtttttataagctaaaccgacgagcggagctgatctagatgaaaccgtagataactatcctctcgtgggcaaaacggaaggttttcaggacaaaccttgaaaagggtatcgcactctcgtagcggcggcggacaatttacggcgcaaatcggcaaagatagacaaactaaactagaactagaatcaaaagtaaaatgacgattcgattgattgattgtagattgattagttacaattgaaccggcgatgtcccttatataggggttggtcttgccctctacaggccctcctccatgtccaacttgggatagaatccaaaagaaacccgaaacatgccttcccgagcaaggaaacctcgagacccgatgaaatagacccggactcggactccgccggtaagaccggccacacaccgccggtctggccgaccaattgtcggcggtcagaccagccaaccaacggcggtcagaccggcccaagcagaggaaaactggcagacttccaaactttggcaattttctctattttatttctaggtgctaaatttgggtgtaaacaggattcctatagtactgtttggggagtcgataagttaattcatatggatgtctacttgctgggctggtgtgttgttcggcctgtggctgagtttagttaccttcaaacttctaacttttctgtcacatcaaatgtttggcatatgcatggagtattaaatgtggacggaaaaaaaccaattgctcagtttgcatgtaaattgcgagacaaatcttttgagcctaattacgccatgatttgacaatatggtgctacagtaaacatttgctaatgatggattaattaggcttaatagatttatctcgcagtttacatgcggaatctgtaatttgttttgttattagtctacgtttaatatatcaaatgtgtgtccgtatacgtcaatttttttttgccaaaacaactaaacacggcctgtattgtcatgatgaggacacaactagctcggatataaccatgactaccttatgtattaatcaaccaaaggtgtatatattttaaattagatttacttgttatatatttgaacaaacgttgctacacaatgagttatgtgtgttatcatttgcagagttacttgcttgggtgaaagaaaagagaccgagcataaggaatgcatggatgattgaagaagtttattggggaccaaaccaagaccttctccaagtcttctttcatctcaccacgtcacttttggtccatagaagacaagagataaaattctatacgttttggattcggattcgggcctcctgacagcatcaacttcaaatggacctagctgctgatttagaaggaattttggggcccatagtacttgatggaaagcttatggagtctactttcagatggttttggtcccacgtcaaaattcctaccgagctgccaggaatctgcaaaacaagccacgtatctcattcagtccgaatctgatttaagttttgggccttgtaattgtgtcgtgggcttagcccaagggggtgtgcgccctagggcaaccctaggacatccctaatcatactaaatcaggtggtgccacggttccacttctacctatttggtaaaatcaggtggcgcggggcatgtttgacacgcatccaaggcgtcatcagcgctaatgactcagtgctggtgtcttgtccacgtcctttcaaccctagactggctagcgctccccataaacctatttcatttatggccatctccttagccggttttgaggtcgcgcgctcacgctttttgccccataaacctatttcatttatggccatctccctagccggttctgaggtcgcgccctcacgctttttgtgatgatagttcatctgttcttaggcgagcttctcgaagatgtctttgatgaattgataatgtatttaatttgtatgttttgacttgcagaagaaagtggaaactacaaggactaaggtgtgcccagatcttaggacggggcagtgtgacttataaggactaaggtaaggtgtgcccggatcttaggactgggcggtgtgcccagatcttaggacggggcagtgtgacttataaggactaaggtaaggtgtgcccagatcttaggactgggcggtgtgacttataaggactaaggtgtgcccgggacccaggataagtgtaacagcactctctctagaaccgaatagctagcacatccgacgggcgggcccacttacacataccactccacttacactttcgtcctcgctttgtgtaaaagggttaacccaggagtgatatggttggagtgaagaggtcttataagttggttccactcgtgctaaactagcaaggttgtactaaacatgcacacacagctcacatgggccacccaggcctcatcctaattgggccaggttatcacatacacccccctcaaaggactcgacgtccccgtatgcccaacttacccatgtagccacacaagcatataggcaaatgttcaggaacacgccacttcttagcgcacgtccgtacatctagtgttggcactatatgccatgccatgtgcctcacacagagtccacatgtgccatgcgccatatgtccgcacgctgacccatacacgcaaccgcgagggtcagctctgatacaatttgtaacagccctccctccagaaccgcatagctagcccatccgacaggcgggcctacttacaaataccaccccacttacactttcgtcaatgcttcatgtaaaagggttaacatgggagtgatatagttggagggaaaatgccttataagttggttccacccgtgctaaactagcaaggtggtactaaacatgcgcatataactcatatgggcgacacatgccggggatcctaatagagtcgatatgcaggcatgctcgggtctgaggcagaccttagtatatttctcttaagatgtagatcttgtatgtctctacgcccctctgaccaagtagcgcaggacttacaagggccaaggtgagcccggaagccaagacaagaccgggtccgaggcagaccttaggttacattcttaagatatagattttataggtctcaacactcctcttcacagagcagtatgtgacctagatgagctaaggtgagcccgagacctagagcaaggtcgagtctgaggcagaccttagtctacattcttatcccgcaaacagataaaggtgtgcccctagccacatcaccctaggggtagctttttatttttagggatggtttaagtatgccatttattttacttctaatcgttttgccgggtgaatgggtaccctggttcccatttcacctacagatgcacaatcccaaacattaaatctataatgaatctaagtaaaagagactcagggcctgtttggtagagctccagctcccagatcatcttaccttgagcttgagcccaaccaaatggtccagattaaaaaaaaatgggagcggtgtggggtagagcgatctgaaaaagtgaattagagtgatggagcggggttagtccagctccactactccactccgaacctaaagatagcgctacacatccattttctcataaattacagcaaattaccatcgaactacccttccatccccccatccaacaccgtttcacatgaacccttccccgaactcgctcgaggagaacaggaggcggagagaggggtgctagggcaggactcaccgacgctggcggaggaaccctccaccccggtttttcccacctatctcggctgtggctgcgcacggcggcagcggagtaggtgccctccctccctgcgtcttcctacccttttcctcccaatcccaatgacccgtggcccaggttgtcatgctgagtgaggagcacacagggcggtggcggcgcttggctgcgaggctggaaatgtttttattttttagacttttttatgttttaattttattaatagaccattcccaaaagtattttcaaactgaaccttttggccacaccagcccgtctggcgtggccaaacaactctatcacgccacacttagctggagtggcagtgctgccctgccacgctagcctcttgtcacaccaccactgctggcttcagttttcggaaatacttttgggaatggtctattaataaaaataaaacataaaaaagtctaaaaaataaaaaaaattcgcgaggatgttcaggacgagcatgacgactaaggttgcgagcataataaaaaaaccggactaggactgggccagcggtccaaccggaaaaaaccgaaccagcactcccaccggttcggtttgctttaagaccgctcatgcaatcgacccggtgtcccggtgtgaaccggacggtttttcgaaaaaccggcgacccgagctatattgaaccgctggttcgcgaagcagatgggctggcttctaaaggcccacttggattgttgtggcccaactaccttttattgtataaaatgagaaaaatggtgcgccacatgggatcgatgcttggctgatgggatagaagagcatcaaccacaccaccaggctaaattggtaaccttgtttaagcaaaataatgtgtaataaatgtactgtccggtttaaaaattgaaccggtcgacccgccggtccaaccggtgacccggtgaaccaagagctcaagcggttcagtgcccggtccggctttttctactatggttgcgagcggcgctcaaaggttggtttttctgatcgaatcactaattttttgtttgacataaatcaaattctaaattttcctcacatgttgagtttcaatcgggctcatttatgtatgaatgattttacattttgatttattgcttggtattatgcaatgaaaacttgggaaactttcatatctgaaaatttgccctttaggtgtgtcaaatttcagatttaagcacttgtgaccatgagcattttgtttcactgaccaagtccaatgtccataatttcagtttgcatttgagaagtgattgagaaatctcagatttagcacatgtttggtagagttccaactctcagatcctagctccgaactccaactccaacggagctagctcctataggagctggaggtggctctaaagtgtttggctatcttgatcaactccaaaattcctgaaagaaaggagaggagaaagatgtacaatattacccttaagtattttgttgtttacttgatatgttattaataatagttgattgtaggacttgctatgtatatgtttaaaatttataaccaataaatcaatgttagttcccgttaagaacatgaacacgacaggtatgtccgtatgtaaggtaaaaaatatatatatatgacaaattgtagtgtacactcatcatttcaattcagtacacgatgaatcatgtacttcaacatcaaggaagtactgacaagcatacaataaagaaaaacttgagctcaaatgcctattgatctgagtaatactggcatcatttaattatgaataagaaaacttggagcagaacttttacacgaacccatagctgcataaagtcaccaaaaattttattttgggatgaatttatcaggacgtgacaatcaacatgtaacataccaggattttcacctaggaaaaattttgaggaaaaatttaaaaccttttgaaagctaaagcatttaagagcataatagttgatcttagagtttaaatcctgtaaataaaattaaaacataaagatttgttgggtcaaggtttaaagctaatccaaaattagattttataaaatcttgggttaacaaatctcaattcaaattaataagatggtttaaactttaaatagaaatttaattattttggctttgcatttcaacctaagcaaaacatttttgagctaaatgaaaacaaatggagatataagatttaaaataataaaaactcaaaatggaaataaatatacttggttgtatgtgcatttattattttaggtttgtttttgatattcttggtgcatctcataataggtttcatatgcatgtcatgtctaaagaaaactcctaaaaataaattatgcaataacaaattgcactaaaattctcatagatattaaacaacatcctaagtctacggtaattttagtttgaattaatcacatcaaatggtatctcaaataattccaacaactcatcttgaaatctggaaaacagcataccatttagcctattttacaccttcaccaaaattcaaccataacctatctagctaaaccacttggtcagaatgctaatcatagtgttctctaccgcctggtgcaatggcttaattaaattcgaaatgtaaccacatgaaataaggccacaagttgcttaaacaatatttagactgcagtcaacatcgtaacttagacctctttactaaatcaccatggtaactcaaaaagtaattaaatcttggaacttggcacattgaaccatcaaatccttgtccaccttgcagcaaccttgtctccccaaaattctaaattaaatggaagagaggagagggattaaaaccacatgatatagtttcaacacttagaaaatttagagctttgtttctccttctacacatctctctcttacatgtggggactatgctcttgtgggacccatgtgtcatacactcacagccaacacatcatctacacacctttcatttaattattcatttgttaatccaaaagtgagagagtgagataaaaatcaatttatacctaaactactactctacctctcacatacacctaggatacatcaacttggacccatttatcatccaatcttcagcaaaccacctggttagacacaccattgaatccaccttgtatttatcaaaagaagaaagagagcaagagagagttaaaaaccaaatttcactcacattcttccccataccccatcttccatctaggtaacatctacaattaaatcccagcttcatgctagaatgggtgaagtacaagtaaatcccagctcctctagcttatcaacaccctaaattcgtgtccttgccaaggtttgacacctagctaacacctagccacctcaaccttcaccatttaccaaaccaactagccactgtaatccccatatcttcctcatcgtgttccactaagaaaaccatcaagaactcctcgaaatctccaagaacatccacttctttctctcatccgaagatgtttgattcgtcataaatcttctctggtgagcttcgccacaatataatcctgagaacgtgatgtacagaccatgcctaattattccttttattttttctccctttgcatggatcgaacaccttgcgtcgagctcgtcggcgtcctcggtgtccagagcgccgccgtcggtcgcttcgccgttcccgatgatccgatgcatctccgaccgagccgctgcgccatgagcgtcgccaatgttccaggagaaggcctgccaagggaatcgagctgaagatccgccgaaaaggagatcctctctttcttcctcaagtccggccgccggccaacgtcgtccgttcctcgctctcgggttagcttcggcgcaattcctcgcatatgaagcatccttaggtgatctttgatccattcccctcctctccttggcagcccgaagaccggaacgaaccgtcgccgtgaagccgacgctatccatcgccaccgagccatctcctccactgtcaccgctgtccagaccttttcaagccgcggtaaagcttcggtgagcttcatagcacttcctaatgccacattcatacatccatttgatcactacatggctataggcgcacatgcagtagcagcccgtgcacagccgtcgctcggactcgccgccggcgttactccgatgtccgcaatccgagaaaagtagaggaatggaatcgcgagagcgttctcttcatttcatattttgacctcaaccccaaacgagccacctattgccgccggtgagctcgagatcgagctcagccatggctctgctcagcctctgcatcgaatgaatgaggtagagaaaagcagggaatttgttttgagaattcgaacaactgtagggaccaatatgtaaacatattaatcactaacaggtgggtcaagaactaaaacgtaaatatgaaagaaaacggagagtctttgtaaactactccctccgttccaaattgatctacatatagttttcttaaggttattcctaaatgatctacatatttgtgttcatttattaactctattcgttatttgtgcatttgagtaaatggacattgatccatgcatccatgcacacaaatatttataacccgcatgcaatatcttgatttgctattggctaggaaatattggaaatggtgcatgcatcaagtttattgttagagtaaatatagtatgagagagttattagctttttttgtctgagtgtacctatgaaatatttagatcaatttggaatggagggagtatgtcacagacacgtttttggactgcgggttgattcccccacactcgagggacttttctttaaaagatctatcactgaccagtgggccctatgtgtttaaaatctggaaaaatataaggaaaatgactagagaagatattttgcaattgaaaacttgcccaaatttgtaaaatgcatataaaatccattttagctcattttgatatgaatcaaaatttctgtgaactcaaaaattatggaatttaatttagaaacataaaaatttgcacttatagtataagaaatagcactaataattcgcataataaacaatgaacatagagcaatctccaacttagaaatttcatataaaattcatcttaacttaatttggagtgaaccatgttccagtatgctcacaaagccatactcttaattatcacaaactaaaacttgacactttctgtaacaaaagtatcaccaaatatttatctagtgaaataactagtgtaatgcaaactagaaactataaaatccataagtaattcattttaactccaaatgggccaaactaaaattttgttagtttcatagaggcatgtacattagtttccaaacaattcttagaagaaaacatatctagaaacatgactaaaatttaaataatgagttaatattaaagaacggtttagaaacttctgaaattcatatcaaaatgaatacaactccaaataaggtgattccagttttgttagattgtcaaaatcatttacttagtttttataaaataaaatatgacacaaacagtacccaaaacatatctaaaattcgaaataactaataaagactatagcatatgacctagtttgtaaaattcataataaagtcatgctaactttaaaagttgtgaaaccaactttgttgaatacctgtgaacattcccttcactgcagtaagccatcagttcacaaatcttgaccctaaaatgcacctaaggacttttagagcttaattaatctagtgctagtattaaactttgaaaattaataactcccaaatgcaaagtgataaaatagaaattccttcaccaaaaatcttatccacacagcacctaaccacactagtaaactcatgcattttaaagcattttagatttttacatgttttagcatttatcgttaccgttattccttttaggcggcgaaaatcgttatcggtgagatgattggtcttatagctgatctcaagaaggtcttataccaatcaaggcaagtgttgcccttcctttgaacacattgaatcccatattttcgggctaagtgttttgattgtaaagttgcacgggtatttctaactataggtactttcaaaactatagattatagttgtaccattaaaagatgcatgaattcccttttgaaaataaccccttgctgttttgaaccttaggattaattagagtactttaattgtgctcatatgagtatgctatgcttttataaagtgcaaatgcttagccttgcttagtaataaataaaaacatggttatggatcacttattatacttttgaaaacccttttgaacaatatggacagaggtgattctctgattatttgtgaaataaaatgagataaaatgtgattttagactttggcggtaagtggtatgcatatggtagtagttgcataccgatagagggagtgttcgcctgagtcgattaaggaccgaacatcatatcacccattgtgtttaccgtacatccacatgtgtctttatgggggggtcttggcctattaagttaaacacttgtctaatcttgcattcgggaggctgttgtagtataggtaggggccacgagtgtactgtgggctacctagaggaactacccatgtgtatgttgaaccttaggacgagtgtactgttcctaaatgtgtgatcgtaggatgataaattccctacgtgtgtgatttccgtgagggacgagtgtactgttccgcctcacagcatgggcgtctaagtgtgtccaatacaacgatattgtgccacatggtgggttcccgttgtgtccgtcaccacggcgttaagtttaaagcgtgggcccgccacttaacggttctaggtcatataacgtgtatggcatatggcctaggatagaggaacacgtatcttgctcatgcaagattagacaatacttaatgttaaagactcgttatgacctctagaccacattcaacatgaagagtgtggtggagtcttgcaaactcaaaacaaactagagtgttcatatcatgtgggtaaagctgtacaaactctgcagagttctaaaaactaatcgattagctgtgctcacagtcatgagcgacataatgatgtgctatgggtataatctcatgattgctaagggtgagtttgaggagaaggagattgggaagatacgtaaaacgaggtgagccattagcatatgattaattgagtattaactattttaaatttcaaaaatagattaatattattttttaaatcaactttcctataaatttttttttgcaaaaagcgcaccatttagtagtttgggaagcgtgcgcgcggaaaacgaggtgctttctcaccctatatcacgcaaacgaacgcagcctaaaagcttttgaaactaaatgttttgagatgatgatgagattgatatatgtgatatgattgccttacttccctttgtgttgtaagggaatgatgtctatctaattattttttttactggaaatactgctaggactttacctcgcagtgtgattttataaatagaaagttatttacaagagatcaaaagggaaacaaaaagatcaaaatattacacagtttgtaaccaatcaaaaactatctgttttaggggatccttcattctgcacaaatgcagaagaacatcggctttgaataaagccctccaagaactgaatgagggaagctcatttcgaaagattttcccattcctttcttccaaatgtgccaagcagcaatgaagaaaatttccaaaaatcccttctgactgaactgaatgcgagccaaaaccaccgtctgaaaaaagtccagatcaggattctatctaattatgttgatatcatgccatgattattatgccttacacattgctaaaatgcgttgcttaaattacgttgcaaatgttttgtgaactaaaatttactttatgctgaaaattgaaaccacatatagcctttctttgacttagagctttcatgtatataggtttgatagtgctcttaccagtacattatgaatgtactgagtctagccatgttttgtctaatttatgttttgtaggaatagacttagtttagtttgagtgatgtgggtttcgactgcttcttttaggatttgtacttaatggggtaaacctctagttggtgtgcttgaggattgggtagtcaagcttctgctgctctctgatatagttatatttggccggtcggcctatgtatctatttagtagttgtaatctgaattttatttgctttagatgtaatttgctatgtatattcatgcttaagatgaaagtgtgaatctagtgcatatcctgggaactagattcacatgagtatgagttaggaatatttcagatgttgtatatctttagctatttttatcaagtctcctgaatgtgtaatacatctggtcgccaccttcgagtggtttgacgggcacatctcaggctgaagttgattggtatgctaaagacccagcaatatctccaatattcctctctcgaggcgtcagatatttcattatgcttgtttgatgacttgaattattcatttcatttctcaattataatggaaggtctgaagagcctacgacaaaaaaaagcggacgacgaaaaaaaaagaaaaatacggtgaaaatagcgaaaaaatacggacgaaaaaaaatatgccagtaaccttcgctacgggtaaaatgaacggagttaacatcgtaataattttccaagatagataaattattcattgggttaatcataattagggtgaatagaaaaaactattgcgcattgatagcataatatcatttacaaaatcgaacacagactcacttggagatgcatcgtgtcacgactcatgcgtggacgatggatgatggatggtgcttggactctaatatgtcgtgtttttctgacgacggtaaaaaaatacgtacttaaaaatatcgattttaaagtttttcgttgttattcgtatattgtccacattatgcaccacacacaatatctgtggacccacatagtggcagcgggtaatcatgggctggtgcggcacggccggatatgggccggaagatgggccgattacacttgctctggatgcgcgaagcgcgcgtcccacgctagtattttaaaggtgccggtttaatacaactcctcgttaggccattcacagtgcagtgaggtggcgtgtggcaatcgttgtccacgttggcaaaatgcatgtgttgaggagaaatggaggtggggcccatgactacaccgggttcatgtacccttctttggttccgagagcgtcagtacgaaacaacttttgtcagagaaaaacgaatcacacgcatcgctctatggcaagaaagccagagagggaggaggggaggggagaagctcactggagagagggggaaggggagaagctcgccggagaaactgcatccgcgccgagcccgagctcccgccgacgccgcaccatcggtgaaggagagagcggcgccgactgtggggaggaagagccgcgacggcggtggggtgagcggccgccggagaggagctcgagctccgcgccatcccgccccgactcgccaccgccgtcgcccgccgctttggccggcgcagccgccgcttggaccaccgtcgccgcccgacgctagatccggctggatctggtcatcccatcaccgatctgcccggcgccttcactggatacgccggcgctccgtccagtgctgggaccgtcccgccgccactctgtcaaccgcctaggctgccgcgtcttccacttccgtcgcctgggccaccgcgtcgtccgccgccgctgcctgtggccgccgctccatcctccgccgcctgtggctagggatgaaaacggagcggatacggacggataatgctcataccgtattcgttttcatattttttaccggatacgaaaacgaatacagatagctcgaatacggaaacaaatatggattatctcgaatacgaataagaatcgaatatgatcggacacgaatacgaaaacaattttttctcggaacacgaaaaccaacttctaatagaaacaaatatcaacttatataattagctcactttatattaaatgtagtataatttataaatatttttaaaaatttaaataatattaatagtgtggactagtgttaagagataaaccactattaaaatctaaaaatgtatattgaaggtcatagagttataaagaaatggggtatgtctcatggcttctgcggatatccaaatagcactgttcaccggatatccgaattattatctgtatctgacggaaaccccgataccatattcgtatccgtatccgggagaaaatatccgtattcgtatctgtatccgaactatccgagaattatccgatccgaaaggtatccgtattcgttttttgccggagcggacggaaactatccgctccgttttcatccctacatgtggccgccgctccatcctccgccgcctgtcaccgccgctccatccgccaccgccgctgtcgcctaggccgctccgaccgagacttcgctcccgccgagaccgccacggggtcgtccgccgccggcttccgcgccgcctcgccgccggccagccgccagatccagagagggagaggggcgccggcggcgcagtagaggagggggagcgagtggggaaaggcagagaaagagaggagagataaaaagtgaggatagagaatgggagggacccactgtaaaggaaaacgtagaccacatgcactatggagtttgttgcttacgaagtttttagtctagatggaagttttggctcctcaaaaattagtgacacactatgagtgcccttagcacccggaaatcctattgggcaatcgatcgcctggggcgatcagatcccctcccccacgcagttttctttttttgcactgctttactttcctattttagtaagtttatacatctaaaatttgtatacctaaagtttatatctctaaagtttatccacctaaagttgtagagcgaatgtttataggtcaaaagtttatatacccgattcaaattcaaattctgattcaaatattttatattttcctcttctagtaagtttatgcacctaaagtttacacatctaaagtttatccacctgtttgtatacccgattcaaattcaaattcgaattcaaatattttatatattctatacataaagtttatgcgtgcaaaatttacggtataaagtctatgcacgtgaatgagagtattattttttttctattttttttactaattttgtttttttttttaaaattatgatgaaaggagagaagggagaggagtacagggggaa

SEQ ID NO: 26228 - DNA, 7144 bp, Oryza sativa
cccgcccattagcctcaccccttagcacctcctgttgggtgccggtttctaaattcagcatcacgtggagttgataaccgacaactaaaggctttttttttaagtagtgtgtgcgcagttacagagttaatccgtgaccgtgatcatctccacttcgatcgaccctttcgtcgcggccatgaaatcgccatcaaaactgcggcatccgatcgggaaaaggacatccccgtacacgagcccgactcgtaccagttcaccacaccacactaccccgccccacgctataaatacaagcgctcctcgtcctcctcgacctcgatcgatcgtatcccaccaccaccaccagagctagcgcagcaaccgtgagctcagttcagttttcatttggtcgtcgttcgagtcgtcagctagcttcgattcaaagaaggcaaacaatgaggttcgtggcggcgtacctgatggcgaccattggcggcaacgcgagcccgaccaaggacgacgtgcgcgccatcctcggcgccgtcggcgccgacatcgacgaggacaagctcggctacctcttcgaccaggtcgccggcaaggacctcgccgagatcttggccgccggaagcgagatgctcgccttcggcgccgctccggccgccgccgccgccactgccggtggcgccgcggcagctggggagaaggaggaggaggagaaggttgaggagaaggagaaggagggggaggacgacatcgtcttcagcctcttcgacgacgaatgagctatcgaccttcgtcttcagccctgcatctacgtgccatagtctacatgtcgtcagtctaagtttgtacaagtagtagtagtatatatactagtagtaaaatgcacatgcttcgttacgggtaaaatgaatggttgaatgctgtaaagtacacagttaacatcataataatgtttcaagatagatatattatttattgggttaattataatttgggtggatagaaaatccttacgtattttttttattaggtatagatatatattgatcttcaatcctacgatatatttatagcccatatcgcttttcaagtttgcagtgtgtacaagtctctcggaaatgctaatgagcgattgctcgcctggcgccgagggtagcgatcaattagaaccccctccccctccccctcctcttcccttcctccaccttgtttccttttttggcaccgcattactttcctattttaataaatttatacacctaaagtttgtacacctcaagtttacacatctaaagtagacccaaagtttataagtcataagtttatatatccgattcaaatttgaatttgatattgtttatatatagtatttctataaatctaaagtttatacacctaaagtttatagactaaagtttataagtcaaaagtttatatacccatttcaaatttgaatttgaattatatctgattcaaatttgaatttgaattcaaatattttctatatatagtatttctatacatctaaagtttatacacctaaagtttatacacccaaagtttataagacaaaagtttacatacccgattcaaatttaaatttgaattacatctgattcaaatttgaatttgaattacatctgattcaaatttgaatttgaattcaaatattttctatatatagtatttctatacatctaaagtttatacacctaaactttatagacctaaagtttataagtcaaaactttacatacccgattcaaatatgaatttgaattatatctgattcaaatttgaatttgaattcaaatattttctatacatctaaagtttatacacctaaagtttatagacccaaagtttataagtcaaaagtttatatacccgattcaaatttaaatttgaattcaaattttttatatatagtatttctatatataaatttttctaacttttgttttttttaaaaatttttgtggtgtactgtagtagtaagagaagaaggggaggaggaaggggagaagaggaaggaggtattgcctatatgagggagggggcgaatctgatcgctgggcgatcgcccattagcccctcccccctcccccccaagtctctatcgttctgtacccatcacccaaagcaagaatagtgcattgagtgaaagcatgggtatatctctatgcttaccatacattatacatatactaagtatttaaagctcaacatgcgagacagtatttattaatactcctaaagtctaacatacaagtataccgtatcaaccaagtaaacacttaaagctcaacatgtaaagcataataatgacatttataatttattaaattctaaaaatcaacatacacatgttaaattgtcatccttaaattatttccataatatttcaggccaaatccatccattggttatacaacatttaacaccattcaaatatcccgcaacaaattgtaggagtcacattagtacagaaagcatgtttccaaacggtcaaatcctatttttcgtgcgattgagcagcccgtctgctcaaaagagtctacgaaaatcattattttaccatgtgggtggcgaaccacacatgagcattgatttcgcacgcgtgtgcttatgtcacccaaaataaaattccaaaaatataaaaatccctaaaaatcaaaaccctaactcctatctgcacccaaatgctggcggtggcagatccagccgtcgtgggaccgatggaggaagatccgcccgcagctgaccgctcgaggtcactaagccaaccgcacctgccgatggccagtgagagagaaaagaggagaggaggtgagagagaggagagaactcagaggaggttcaaaataacgaggagagggggtgagagagatggacagaaggtaaggatgatgactttaaagattttgaagtgttgagagagaaaaggaggcaagtcgaacttctaagtggatccttaagagacctgcctgttaaaatagacccattttacatgcgggtatgttaagagatccgtctgcgaaaatcatttttttcatgtatcttagtggttgtatgcaaaaatgttctcgatttttgtagatgtgaccagttacgacccatctacaatttaaaggggggtcttgttcagaaaaaatgtttctagtagtgtcagtacatatatagaaataattcggatttaattgttctccgacaataacacgggaagaattatccttaatatatgccatatagaatgcagatgttaatctctcggttgtgctgcaaatgaggctacgagtaaaagagactaggctgtgttcagcagccatatttcctaactcatcaccatcgtttctcacacgtacgatttttaaactgctaaacattgtggtttttacaaagcttttctattggaaagttgttttaaaaaatcatattaatccattttttaaaaaattaactaatacttaattaatcatgcactaataagtcgctccgttttacgtgcacgtgggataagtttttacgaggcctttgggtgtcctcatttcacaagagagagttgagctattgcagtcagaacccatgtgacgatgttagcagcagtggcgatgtaggcctcagagctgtcgtcttaacaacgctatagtatcaaacaaaagaactaagcctactagagggaaaaggtgaattataggatcaacaaaaaccaaaaacttatagcgaaattaaatgtcgcactcgaaatcgatggagatcaatcagaccagcctaactgctccagtctgaccggtgtagatcggccggtcggactgcccttcgtgccgccatcgcctgtcgcctcctgtgctcatgtaatgtaacctttctctctctctctcgtgaacggcggtggtggcggcgactgttgtgcgtgacagtggaggaggaggattggcgcgacggcatccaccaatcccatccccagtccttactctagtcctctccccaagtagtggcagcggctctgcctgggacgagcagcgacggcactattattatctactccactgtctattaaagccactattccttctcccgttcggccattccccatccctcctctcccacgagcagcaccactcctctgatggtaagtaagatttttgttctttgattcatattgtgcaaatgccaaatattatatatatatgtcatgtgctatattgttcatgtagagttcaattgaccatgtgacagtaatgtgtcatttttagcccaaattttgtcaaatttttcaatttttttccctagtattttccaaaaccgctatattgcttagctgctgatatagcctgctatagattttcttagctattggagagctgatccgctaaatgtcttagcccactatttagaacattggttttaatcaggcaatgtcattgttttgtcggcgtgtccttctcaaaggcttcgttttagtggttttctcttgttggaccactgttcttaggttgagtgtctcggtccgcatgttagctcgcttttgtcagtgctagggtttttctatagttaatcatattgttgtaaggatgttgggttcgattttccttataaactaaatcagatatcttcttctaacggtgaatcacaggagcttcctgcctgttccatctaatttgaggaactgcacaccggttaacttggaggttataattttcctagaaattatggcggacacctagacctgatattctgtgtaattatccatgagggcataagcatgaacatgcaaaagcagtacccatcaggctttggatgtttacccaattattgaactatgtttaggattagatacaacaaaaagatctaagcattattttcaaacacaatgctttcgaaaaaactttacagcgtaatataattttatatagggaatacaaaaccctctttgatgaatatagtgataagagagtgagaagggcatttcttggatttcaaaagattaacagaaactatttcgtgggtcaccaccgacctttttttttctattttcacatgtaggagcattgtcacctcatagcagtccatatgcataagcatcgagagaacaagagatttcatttctttttctcaggcctgtagtttgcaaatgcataaaaagcaatggcaacacatggttttccaatgagttaagacaatgaaagaagaagtatattaaacaaaataaaaaaggcgcaagaccatgtaagaaatggagtaccaaaataatgtctatttatggcctgaggtcctagggtgttggcgggctcagatggccaacaacacaatgaagaaaaacagaccaacagtaggcacaccaggcctcctataatgcgctccatacattccatcagatgaagggtgttctgatctcccctcttagataaatgttttcagggtttctataaaaaaaattgagaacgagtttctattaattattgcatgcaaaaaagaaaagggttgtagtaattgggaatgggcagtatcgagaaaattgcatgcatatacacttctagttctagcagtagaacctaacaaaaatttggagaaataattgagccctgtagttcaggacatggtaggcactctgcagttgagaaaggcagctattgacatgcttgttagtgtttagatctgcttcgctgtttgtaacaattcatggcagtagaaccgattggctcaggccacagtgcagtgctctctttaaagacagtgagcaatacacctcaaggctcagatcagtagctacccatttctttcgaagcttaggaaaatctcatgcaattatatgctcgaattgaaacatatcattatttctttgctttgcttcaagatcacatggagtcatggaccagagatcaaatcgaacaaaaaaaaagaaaaaaaaatgggggtgaagagaaacagagtggttacccccagggcatgtcgagttgtcgactaatcttggtgccaccgccgggtggagatctcgctgctccggcggatcccgaaggcggggagcgcgtagagccacgccacggaggcgcacagcgccacggccgccgcgatctcggccggcgacggccgctccgcgaggccggccccaccggcgcgccaccgccggaagaggatgtagagggaggcgagcgcgagggcccggaatacgcggtcggcgtggcctcccgtcgccgccgccgccggcgcaggtccagcctcgccggcggcgacctcgtcgtcgtcgtcgtccatgctcagacgacgaggtggggaacggatttaccggtgtagttgagttcgcgaggcccaagtccgtcttttttacttgggctgaagcaatcgggcccaaatttgggagaactattgaaaacccaacttagggccgtgtttagtttctccttcaaaattttttttttgacataaacgaaaacacattcgaagtattaaatatagattaaaataaaataaattaaagatttcatccgtaaactgttagaggaatttattaaacaagtaaacaacaaacgagccaactcgatttgtgtgtgtttttttcttgtagttgatgccaaccaaaaatagctttccaatttggacaaatacttcagcacggatattgtgaatcttttgtgtctcaaatgatgagcacttaatagccattgtgtccacctattagctgctcatcactccacatgctatattaagtgttattttgtcacgcccggaatttctatctaaaattctaaacgcttacacgtatagaaacccttgtccagaaatcagccgaggtacataataacaaattgataatagagtacaattattactctaattaataagagaataaaatgtcattacagaggtagatagttcctctcaatcaataaagttctaagcaacggaaaataaaagaaacaacgcaggcgactcctctccacatgcagcttgaccagggctacgcctaatcatccactccatcggcatcactgtagaactcctcctctgataaatgattgcaaggtgagtatatgacatactcagcaagccacgcagcaaatatgcaagtgcacaggataacaaaggatggcataatattgtctcatttgcataaacaacatttaataaatatttcagaatttaattaaatagttaaata

SEQ ID NO: 26229 - DNA, 6428 bp, Oryza sativa
aagcatgaatagtacatgtggatatttttaacatgtaaatctcaattttagaaaaatttagagacttgaaccaactaaatccgagctaagatgaattaattatgaatttttgaagattaaatcggattaaatcatttatatagattttaattgaataatgacgcaataatgaattatttttgaaaaggaaaagggaattattgcgtcagcgggtcaggtttacggtggaccgggtgcacggcggctgttcacgaaaacggacggccgagatcgatctaagacgaaacgaacggccgggatcgatctaatccatcgcggtccacgggagaagacgacgatgacgtcggcggtgacgtcatcaccggcgacagctcgggtgcgcatgctcgccggcgaacgacagcgcgacggcacaaacggaggacacctacgcaatgcgggcgacacagcaaaccttaccgaggcacgaacggcggcggacggtgaccggacgacgacggtgacgaggatgagcggcgatgacgatcgggtcgacgacgacagcgatattccggcggtcctcggcgttgtcggaggggtggacaaggtcagcggccactcggcgaacacggcggtggccttcccgagcgacgaggacgaccggagcggcggcggcgcatggctggacgaactacggcgacggcggcgcacgggctaacgcggctagagctctacgaacggcggcgagcgaaggcgaaggtggcggcgggtagaggagacaccgggggtccttataaagggcctaagggcggctgtggaggcccgcggcgaccggcgacggcgatggaaagaatagggttggggaaagaaaaacgaatccgaatcaaactcgaatccgacgatttccaaaggaaattagacaaagttcctatagaggaaaagatagaggagatcaaggggatcctttcccctctaccaatttcaccggagaaggaacggcgcgaccgaattggaaaggggcggtggctagggtttcggccggcggtctgctggaggtggacgacgaccgacaggtgggacccacctgtcagcgacgggagcgcgcgcgcgggcggctcagtttgggccgacatgggccgagggagagagagagaggtttgggccgactagccaaaagagaactttttaaacctttttcaatttaaatttttcatgaaatgcaatttcatttattaaaaatacttccttagctcaaataaatcctagaaaaatctaggaactatagaattaagcaaagtatttaataaaattttatctggccccattttatattggaatttattaattaaaaattagatcttctcttctaggcttttaaaataaattctaataattccaattaaacaacaatttatatatttgggatttttagggtgtgacaaacctgccccccttaaacggaatctcgtcctcgagattcggaagaactagcgaacagatgcgaatgagctgactttaattcatcttctcgttcccaagtggattcttcatctgagtgattactccattggaccttgcaaaaacggataactctattcctggttcttctctcatctgtctccaagatacggattggtttctcaacatatgtcagatcctcttggacttctatctgttcaagattagcctcttcggtaggtacccttaaacactttttcaactgcgacacgtggaacacattatggactcctgccaaagattgaggtaactccaactgataagcgacctctcctcttctactgacaatcttgtaaggtcccacgaaacgcggtgccaattttcctttagtgtgaaaacgatgaacccctcgaagtggcgtgacacgaaggtacacataatctccttcttcaaaacttagatctctgcggcgattgtcggcgtagctcttatgacgagactgagccacccgcagtctttcttgaatgatttttaccttttcctctgcttccctcaggatatcagttccgaaaacctgacgttctaccgtttgatcccacaaaagcggagtgcaacacttccgaccatacagtgcttcataaggagccatctggagactagcttgataactgttgttgtacgagaattcggcgtaaggcaaattcttatcccaacttccaccgaagtctaaagcacaagctctcaacatgtcttccaatatctaatttaccctttcggtttgtccatctatctgcggatgataggcagtactgaagttcagcttggaacccatctcctcctgaagtttcttccaaaactttgaagtaaactggctacctcgatcggacacgatcttcttaggaacaccatgcaaacaaacaatccttgccatatacaattctgctaaatgacttccggaataggtgatccttactgggatgaaatgagccactttggtaagtctgtcgactatcacccaaatagagtcatgacctgacgacgttctgggtagaccagtgatgaaatccataccgatttcctcccacttccattcaggaatcttcaaaggctacagcaaacctgcgggtttctgatgttctgccttgactcgatgacaaacatcacatactgctacatattccgcgatctcgcgcttcatacttgcccaccaaaatctttccttgagatcctggtacatcttagtactaccagggtgaatggagtataacgtatcatgggcttccttcagaattgcatctttcaaatctttgttgtctgggggacacagattctctcacccaaccatacagttccttgctcatcttccaagaaaccgatagctttacctcttctcatattctttttgatctcatgaatatcatgatcattgatttgggcttctctaacttgatcaatgagagtaggctttgcttccaaagctgcaacaaagcctctactgataatttccagattcaatctttcaaattccttgcacaattccaatggcaactgttgtccttccatagcattacaatagcctttcttactaagggcatctgctacgacattagcctttcccgggtgataatgaattcccaggtcataatccttaatcaattccaaccatctccgctgtctcatgttcagatccggctgggtaaagatatacttcaaacttttgtgatccgtatacacctctgttcgagtaccaaaaagatagtggtgccaaatctttaatgcatgaaccactgcggctaactcaagatcatgagtagggtagttcttctcatgcggacgtagttgacgagatgcataggcaaccacctttccatcttgcatcaaaacacagcctaacccaagcttggatgcatcgcagtacacttggaaacccttctttggatcaggcaaaatcaaaatgggagctgatattaagcgacttttcaactcttgaaaactctgctcacattcttctgaccacttgtacttcacatctttctgaagcagtcgtgtcatgggcttggcaatcttggaaaaattctctatgaatctccggtaatatcatgcgaggcctaggaaactgcgaatctctgaaacgatcttcggttgtttccagttggttacggattccacattactaggatcaacggcaactcctccggctgagatggcgtgacccagaaacttcacttcagacaaccagaattcacatttgctaaacttggcatacaactgatgttctcgcagcttctctaatgcaaggcgaagatgttcttcatgctcttctttggttcgggaataaatgagaatgtcatcaataaagactaccacgaacttatccaggtattacatgaacaccttgttcatcaagttcatgaagaaagcgggggcattggtaagtccaaaagacataatgtacattcgaacaacccataccgggtggtaaaagctgtcttaggtatatcttcttctttaatccttaactggtgatatcctgatcgaagatctatcttggagaaaacggtggcacctttgagttgatcaaacaaatcatcaattctcggcagcgggtacttattcttgatagtcacatcattaagggcatgatagtccacacacatccgctgagtatggtctttcttttctacaaagataacaggacctccccatggagatgaactcggtctgttgtatcctttctaaagcaaatcatctacttgccttttcacttctgctaattcattggctgccattctatagggtcgtttatggatcggagttgttcctggtactagatctattcggaattctatatcccttttaggcggcataccaggtaaatcatcagggaacacatctaggtactcccgcactatgggaatctcttccaaagttatttggttcaggcttgaccgtagaggtccaaagggcaatgcatgaacggttacaacttgaccatcattgctggtgagagttacttttctactggcacaatctatcacacctttatatctggctaactagtccatccctaggatgacatcaagatctttggattctaacagaataaggttggccagaaagggtacaccttggatctctattctgacagaggggctactgtggacccccgtttttataacaggaatcattcgtgtaaacagtaccatttccctggatcaagtagtttggtacacacgagttcatagctgaaataccaaatgcacatacacgagagtctagtgctaattattacaccataagccctcaggcattgtcttaaatcatcggaccgagtggtccggaatacatccaaaagcagaaatagataaggcagcggaatttaggcagcggcatgccattgccacaggcaacggccgtactaagacctactgagcgccatcgtcttcatctccctcctagtagtaggcatagggatcctccggagcttcatctcccgcttctgattaagtttatatttgcaaaggtgagtaccaaccgtactcagcaagccaccacagcaacaatgcatatgaaaggggtatttcaaaggatggctatggttcttttgcacaaagcaagttttgtaattcttttcacaagcctaaaacctagcattgactgatcaaattttagtaccatgtttgtatttaaacaacgacggttctgtccaccatccattgtgatcccaaggatagcttcccgccattgagtcgttatggttttctgaggacgcctaccttccctcttctcaggaagtggctccaacagcataaaaattcatcatgcaacaacccatcccacacaagttaataatttagagactagccaagtgcaatacatgtcccggtgctcaataaccgcgagcacggctattcgaatagatttggtttactcacactgcagtggatgtacactttacccacactccgcgactgcccaacacatgagccttgtctcaacacatgagacgcgtcacagcaaagcttttcgataacctcgcattggcagtacccgctccatgaacttttcatcctcatgcactctaggcgtacacagtttctagcagtgagaggagttctggcgcacccgggaagggaagttttacacccatgtaattaagttataactaggttcaactcaacacacgacagtcctagcaatggcgacaccattgtagagcccctgccttacacatgagaaaccactatgcatggatactgcctccgctcgattatttactccactaggtctatccccattcgagaaatgtggttgtacggggtcgtttcatgcttaacttcatggcttggtccttaattgaccggggacggtactagcctttcccggataccacccaaatccaccatccgccccggtctaaaacaaatgtttaattcctttcatgtcaccattatcatggcaatgtggtgctcatgtctccacatgccgcatctcaattaccttcccaaaggtaattgcctaagcatataatatttgataaatatgaatatgcaagcttctaaagtggcatctctaagcaagtgtcataattgactagggactcatacgtaattatggttacaaggatttaaaggtgaacaataaacaaggcatggcataatcacaaataggatgttcatcattgcatgcaatcttatttgtaaacaaaaattaattgcgcaattgggatcaacgtgatcaaagaatagtgatgacttgccttgctctaggtcttgtgggtcttggccttcacccggatccgcggctccctcggtctctatagttacgtgcgtaagaacaatttgaattcgattagaattcaaacaaaatccaaataatgaccgaattgaaaaacgagcgcgggaggtgaattctatataggctactttatttgcgaagtggaattattcttctccctaagatattttgtaatttatagtcatgtcctaaga

SEQ ID NO: 26230 - DNA, 6999 bp, Oryza sativa
gctgttttctatttaacctgatttaagcctattcatttatttaaaattgattctataaacctaaattttgtacaaatgaagttcactcaatatttgtatttttccaaccaatgggtccatccttgattaattttacccatattttatttttatataattttcttgaatttaattagagttaattcttattccaacacttttaaatttaattgatacaaatatagtcgtaataatattttactcatttctatcctcaccaaatattattttaaattgcactttaattatttactttgtcaatttacttttcagggtttattcctaactaattatccattattcgcgatttataaacttcgaaatcaaaatccaataaaataatcgaacaaaatcggcatgatgcaattttatttaaaaagtttttgaaggcccatatttttggaactttgatttttgttggtcgaattttcagggtgttacagctacgttgtgatgagagtgcttggttactcggagtagtaaccatcaaaggacgtctaagctcttctacctccatcccatgatttcccgcaaaactcatagataaaaatgaatgcgtagcaccagaatcgaaaagcactgttgcaggaactgagttaacagggaacatacccaaaatcacatctggagcaccttgagcttctgcggcagcaacatggttgacacgagccttggctgctggtgcggaggagttgttttgagcagggacgaccttcgcgcgacggggcttcggacacttgtcagcataatgtcctgggtctccacagttgaagcacacactgggcttgctgccttgctccctcttggcaggctgttgctgtgatggagctgcaacagggcgtggagcttgattgcggttgttgttgcccgtgttgttgttgaagaactgacgctgcggacgagcaacagatgaagaacctccctgtggcatggactggggtcccaaagcaagtcgcagcctctaactatttccctgttgtgccttgaagtgagcgatccggcgtttcttctgctccatgcggttatacttgtcctcctgacgaatagccttatccactaacttctggaaatcatgataatccccagccatgagtgggtaagaaagctcatcattaagtccttccaagaacttctcctggcgctcttcatcagtgcgcacatcctccggagcataacgagccagacgattgaactcatgcagatactcagtgactgtgcgggaaccctgtgtgagcgacctgaatttcttcttcttgagagacaccactcccgatggtatgtgcgtcttccggaaagcagcggtgaattcaagccaagagataggttcagcagtagtcctgttaaggcggaagtgatcccaccactccgatgcagggccatgcagctggtgtgaagcaaaagagaccttctcctggtctgtgcactgaagcagatccaacttcttctctatggcgtgcaggcaatcgccagcttcaacaggattagtggtgctagacaaaacaggtggcctcacgcgaagaaactctgccagcttgttttggggaggtgcatgattgttcccttggttctgctggttttggagttgctgcatcatcaaattcatcaactgtgcctggtgagccaggacttgagcaagcatgggattctctgcattgttgttgttgttggggttggggccattcccattgctgcgagtgagcaccatctgacatagacaggagcacaagaagagaaacaggggaaaactacttaggacagggaattaaattgattaacttaacttttattgattttaactgagtttcattattacaaagctgaagactctcacaccacctaactcaccaacatcctaacactcgaaagcaaacaaaggcatgcatttacatcccaccaacgatgtaaacacatgcaagacccacacacacaaccaaacttaagcaagcaaactaacataacgatctaagacaacgacttagcaaaacggtctaggtcttccgggcatcggagttgattgaaggctcattcggcacgtccccatcatcttgagttggtccccactcgatcttggaatgggtacgcttggattcttcttcatcatcatcacttacgttgacgaccggaggatccgctggggctggggtagcttctttttccacaacccgaacctttggtgccaactggtagcgagggacgaatagagctctcttccttgcggtaagacgaactctggccttctgcggtggtgcttctcccttcaatgcagctagttccttctccaaacgatccaccttgtcttctagcttgcaaatcttgtcgcaattccggtcttcacggtcttgagcggctatcacaatctcagcgcgggtttcatcctagcccacagcatctcaaccaaatgccttgtggtagcatcattctcgatccccgcaggttcaaggtagctgccacggtcacttccctagggttgacgaggatggtagcgatactcggtgtcggccaaccggtcattgtagcttttacggagctctcctatggcgatccttgccacctcctgacaagcatgaatgtagcttcctcctccagcctcgaacattactgatggaatatcttcacgattgctgttcaaggcgactttgacccggcacttctcttcatcacgatcatgagggatctgggcatacaaaggggcaatcccaaatcctatgaggaaggacatcgtacgcaactcttggacaaatccttcggtaccgaacaaatactcaggcttgtatcgcggcatctaagacaagtgaaaggagggagttaagtcatttatccagttaatagcacaagtttttgggttagcttgaataaaaattagaaaatcaaagtaagaggtaaataaataaaataaaacaaacttgcaagataagatgaaacagttagaaacaggttcacaaactttgcacttttgaataacaggttttaaaagaaataaaataaaagagagttataaaatcattatactaagcttagttcattgcagcaaaattaaataaagcaatgttataaaacttttgatggtaaatgggccattagtacggtaatagatgtacagtagtaacaacacaggaataataaataaattttgaatgagaacaattaaagaggtcatgcattgcatgtgccattagtttgatttaattaaaagagaaagaggagagaacattgctacttttccaatatttttagagggcttctataggtaaccatttggcataacctagggtcaaggaggctctgataccaatttgtcacgcccggagtttctatccaaaattccaaacgcttacatgtgtagaaaccctcatccaggaatcagccgaggtacataataacaaattgataatagagtacaattattactctaattaataagcgaataaaatgtcattacagaggtagatagttcctctcaatcaataaagttctaagcaacggaaaataaaagaaacagcgcaggcgactcctctccacaggcagcttgaccagggctacgcctaatcatccactccatcggcatcactgtagaactcctcctctgatgaatgattgcaaggtgagtatatgacatactcagcaagccacgcagcaaatatgcaagtgcacaggataacaaaggatggcataatattgtctcatttgcataaacagcatttaataaatatttcagaatttaataaaacagttaaataatatttaaacaatattaatccaacgctatataacacaccctcttgcataggcccaaccatactgaacaaccaaccccggctgtacagttcaatctccaaaccaggaattaaccattccaaaccaggagctaatcaagtcattaacatcgtcatttattagagtgtaaattgtgagactaatcacgaaagacattgttagacccgcccataaccgcgggcacggctattcgaatagttcaaactctggccagaggtgtaccactgtacccacaacacacaacatcaacatcatgtcaaccatgcgtcgcgatacttgacaagtacccgaatagagattgtgacaataccctctatataatacaattcaaagcagtgcaccgttcccggatcataatcacccccttatgaacaaggtatggactccccagcgacccccgtgggcttatctccgccacttcacagtctggtgctctactatgaactatactatacagaaaataaagtcgttgcccacgctggcttgtggttggcacggtaaatgtttcacaaccgaaaatcgtgaaccagtccttaattgtcatgagcacgaccatcaaaaccatgtgctcacaacccaccattatcaggttttagttggcaaattaattaattaattattcatgattaaccatcatgagctatcattaagccatcattaaataatagtgaatcataagttatccccgtagtgaactaatgtttctaagcatgactaagcaattatgtctaatatctagctgaaccatcatataaagctcaactagtcaaattataatagcccaaggtatcaaggaataaagtaatcaagaacaaaacggccataacaaacaataggttaattccacccaattacattcgaaaataaatgcaatagttgaatagaaacaatagctttaaacgggatcaacatgctcaaagggttgtttgggatttgtgtgacttgccttgctggccttggaattcctcaaattcttctcctgcaaaatcggactctcccggaacgtcggaatctaaagagaaaagaacaaaatcaccaaaccagcacataaacaagcatgaatagtacatgtggatatttttaacatgtagatctcaattttagaaaaatttagagacttgaaccaactaaatccgagctaagatgaattagttattaatttttgaagattaaatcggattaaatcatttatatagattttaattgaactatgacgcaataatgaattatttttgaaaaggaaaagggaattattgcgtcaacgggtcgggtttacggtggaccgggtgcacggcggcggttcatgaaaacggacggccgagatcgatctaagacgaaacgaacggccgggatcaatctaaaccatcacggtccacgggagaagacgacgatgacgtcggcggtgacgtcatcaccggcgacggctcgggcgcgcatgctcgccggcgaataacagcgcagcggcgcaaacggaggacacctacgcgatgcgggcgacacggcgaaccttaccgaggcacgaacggcggcggacggaaaccgaacgacgacggcgacgaggatgagcggcgacgacgacggcgatgttccggcggtcctcggcgttgtcggaggggtggacgaggtcggcggcaactcggcgaacacagcggtggccttcctgagcgacgacgacgaccggagcggcggcgcgcacggctggacgaactacggcaacggcggcgcacgggctaacgcggctagagctctacgaacggcggcgagcgaaggcgaaggtggcggcgggtagaggagacaccgggggtccttataaaggtgctaggggcggctatggaggcccgtggcgaccggcgacggcgatggaaagattagggttgggggaagagaaacgaatccgaatcaaactcgaatccgatgatttccaaaggaatttagataaagtttctatagaggaaaagatagaggagatcaaggggatcctttcccctctaccaattttaccggagaaggaacggcgcgaccgaattggaaaggggcggcggctagggtttcggccggcggtcggctggaggtagacgacgaccgacaggtgcagcgacgagagcgcgcgcgcgggcggctcggcttcggccgacatgggccgagggcgagagagaggtttgggccgactttcggcccaaagccaaaagagaactttttaaacctttttcaatttaaatttttcatgaaatgcaatttcatttattaaaaatacttccttagctcaaataaatcccaaaaaaatctaggaactatagaattaagcaaagtatttaataaaattttatctggccccattttatattggaatttattaattaaaaattagatcttctcttctaggcttttaaaataaattctaataattccaattaaacaacattttatatatttgggatttttagggtgtgacatctttgactaaccggcgtcatgtacacctatctctactgctggctgtgttctttcgattgtgagtgagtttgttttgttttcagcgcacacgcttcccgtattattaaacggtgtattttttgcaaaaattttctattggaaaattgctttaaaaaattatattaatccatttttgaagtataaaattgttaatactcaattaatcatgcattaatagctcacctcgttttatgtatcttcccaatcttctttatctcctcctggaacacagcaacatgtatgtaacactctcttacacccccgcgtcactccgctccagggcgacacgggcggcgaacacaccagccccattgtcagcccctctccctcctttcctcagcatcgccgttagcaaagtcaggcggctgtagggatggtggtgccagagccgtcatcctttagttttgctcgtggtcacgacagttggggcactaacgagaccagggcagaaacttgcagcgggcagggcgctggtggacgctcctatctgcagatccagctcaggctgtgcgtgcactagtgagggtggcaacaaacacgtggggctggttgacaccgtgtgtagcaatggggacggccagtcttcggtacctcagccagattcatcgttcctacaccgacggcgaaggcgaccacaacaggccgtggagacagggagtggccagggaggtgaagcaagtagggcagtgtggc

SEQ ID NO: 26231 - DNA, 1126 bp, Oryza sativa
aaaattgctaatcggtgtcaacaattgtgaacccaattcgttccaagtgtttaagtaaaggaaaaaaatccaaattacccccattaattattactgtcgaccaaactaccttgttcaacttaaaaaccacacattttacactcaaaagctagacaaataccgcattccccctcccaaggttattccggatggtttttgtctatgtgatagtccagttagcaagttttttaaaacaaatggtcaggcccacctatcaattctctctccttatctctttgactctttcttgtcttccctacggccacaaacaacatcgctgccactcctcttcctctcttgcgtggtggataaggagctcgcgagcagcttgagctcggctcgtcgcaagctcggctcgagttcgactcggcaaggattcgagccgagctcgagcttgtctcgaagctcgcgagctctaccgagccgagctcgagctattcggcaaaagcttgaaattttcactcccgctacccatcccaatttctcccgcactccaattccaaaatcctaccaccaacagcagtccatcacctaaccatttatttcccttatatccccatcccgtatccaaaccctagctcatttgctctcttcctcgaaacatttctcttctagatctacaatcctaggctgctctagtgctccactgaccactgctgtggatctagccaagcaccgtccatccttcgcctctcctgtccaggaagaaccccatggaggacagcagcagcccaccgcctccgccgtgagtgacgaaccgacgactcggatctgagtaagtttcctcttctttctttgttttacatttttatttcttttgcacccacatgtatctagggccctacatgtattaactgtgtagtgtttagttgcttgatggatgttattgatttacattgaattttatggactaggtggagacatggagtagtacttatcttgctgtgctcctcttctgaagaaagactgaaggttgcagaacaccatgtgtttgccatttgccaaggtaaattgatggcaatgcttttcttgttgtacttgtttgattccttcccttgtgcagaatatatattgatagcagttggta

SEQ ID NO: 26232 - DNA, 521 bp, Oryza sativa
tcagaagaactttgtgaaagtatagtcaacacgtgcaatccaatccatgtcgttatgtctcatcttactaaccacttgatgtctcgggtatatttaatgcatccatgacactacaaagtccaccccattatttgatctttgatcagcaactcgttgaactgcatccactagctagtacagatcgatggccgtgtcttcgttttcgttcctcgagctcttgctctccttcctctgcttcggtttcttctactactaccacgtcaagtcgaagcagaagaaccccgtcatcccgctgcaatggccattggtgggcatgctgcccgcgctcctcgccaactgcaaccacctccacgagtggatcacttccgtcctcacagtcacaccgttgaacttccggttcatcggaccaccgagctcagacatgcggctctttatcaccagcgatccggccaacatccgccacgtcttcaacaccaacttctccaactacccgaaagggcgtgagttccaggagatcttcg

SEQ ID NO: 26233 - DNA, 979 bp, Oryza sativa
aagaaaagcaggagctgccagtcatgtcacaagtcaccatgttcttgcaggagcgaagtattccattcagatttgtacccgacacttcctgcgaagatgatgatactggaattcctcatcagaagcctgaggcacccaagaagaacccacaatgtgagtgatcttgatgacatgatcagcaatggagctagcacagggagtgtagttcttggtccttcggagaaaatgatgttggattctttgcattcacttgttgatgcgaaaacgaggccaaaaagtccttcattcttccactcaggaaccaagatgagaaaagctcggtcaaaatcccacatcataacacagtcagagatactgaagctgatatctcctgagacatgggagatctcctcccctggcgtgtcgccgttgaagaagagcacagctgagttgagcatgcatgagaagatggtgtcctcagatacaccatccatgagttcaaatcaacctgttctgtcctcatgtccatcttctttaagtgcagggcttctacaatgcatatggaaggatgggcttccacactttgaactgtcactggacaatcctatggcagtatacactgccaatcctacaaaggcccatgacaatgacaagccccttgactatgtctatttgttccattcaggagagcaagggagaaaagattggttaggcaactcaagcagtgtatcacggcttgtcggcaagatgaaggtgtcaagttctttggttctgaacccagacaagtctacttctatggagacagagtttgtcctgtatggttctccggatgactacctgaggcaaatgcaaagttcatatggtgttacaaaaggcaaggggctagccaagagagtggcagacattatgaagccatccaatttgaactctagtccgaaacatgtgtggaagtttggcaaatcgtcctcccaacagattgatgagatgactgaaatacctg

SEQ ID NO: 26234 - DNA, 2391 bp, Oryza sativa
ccaaaggtcagcacactccttcccgatgggtccagtgatagcagaacctgatagaacatatagaccatatataatcagttaacatgtccaatttagattattcagcatcaagaaagtcaagttctgcattgttacctttcatctcacccttaggattcacaatcactccagcattatctgcaaatgaatcacaacaacaatcagctaaatggttttggagtttatcataggagtagcaaaataaaccaagcaaactaataataactaccagtccaagaacaacttatatgaaaatatggaataattgattttccaaattgaatgaactgagtaaaaatgactgcctcatggcctagaccgaatgtttaattgcggcaacgccactaacaagggccatggaatatgagtctacattcagatggagcaattcctagggaaaacctcaacatccaaatgtttactttatgacgtctacctgggactatgcaaacatgaggtttgctccaaaaaggttgagggactcagatgtccctccatcaaatagcaacaactttaggcattacaaatacaaatgagaaaattgaaggtgagctgttaaaatgactgcctcatggcctagacccaatgtttaattgcaacaacgccactaacaagggccatggaatatgagtctgccaacagatggaggaattctgaaaaaacctcaacatccacaggcttactttatgacgttagattaggactatgcaaacatgtaaggtttgctccaaaaaaatgctgaaggactccgatgtccccccgtcaatagaagaaatgttgcatgggataacaaaagaagttccaaataaaatgtaagatatctaacagagaacaaaatatgattgttaggaagcatttaaaatgattgcctcatggcctagacccaatgtttaattgcagcaacgccgctaacaagggccatggaatatgagtctgccatcagatggaggaagtcacaaggaaaacctcaacacccaaaggcttactttatgacgtttgcctaggaatatgcaaacatgtgaggtttgctccttaaaggctgaaggactcggatgtccccccgtcaagcagtaaagtgtacaagttaatcacaacaaaaacagagtgctgaacaattataaatttgtcatacaaagtacaactctaggattggatatggaaataacaaaatacatttgtagaaataaaaagtacaaaataaaaaaaatgagaaatggtgtaactgtgtgcaataaaaatgatgactcatggcctagacacaatatttctatgcagcaatgctaaatcacagataacctgggatatgggatataatacagaatgtaaagttcagtatacaaatatatataataaatacgttgcaaagaaatgtctattttaaaatgatctcatctagaatgatattcactgatataacgtaagataaaaattcccatgaatattccagagaattaaatccagcccaagaaaaatagggcatatttgaattttaggttgggggaatattcgcctcatggccaatcccaaattttcaaggcagcaacgccgctacacaaggcaatggaatatgaggcagcccacagatggaggacatggataaaggaaaaatctttcatgcaaaaacctcaacacccgagggcttaatctctgacgtttactttggaatatacagatactgtaatatctgctccagtttaagctggagagcccggcggccctcccgtcatccacactctaaccaaacatctaaactaacagtagcaaaggacacaggtataatatagggttcaaatttcgcagcacacgattattgcaagaagaaaacaacaggtgtaagaggtgatctgtgaataataccttcgaagtacatgtagacacagtagcaaagcacacaagtataatatagggttcaaatttcgcatcacatgataattacaacaacaaaacaacaggtgtaagaggtgtaagaggtcatctgtgaataataccttcgaagtacatgtagacaccgtccttgcggcgccacggcttgcgctggcggacgatgacggcgggcatgaccttcttacggagatcgggcttgcccttcttgacggtggccatgaccatgtcgccgacgcaggcggacgggaggcggttgaggcggcccttgatgcccttcacggagatgatgtagaggttcttggccccggtgttgtccgcgcagttcaccgtcgccgccacaggcagacccagcgacatccggaacttgttccccgccgaccctcccctccctgcatcaccatcagatcgcaacacgaaacaaacagattagagcgcaagatttgcaagcacagtggttgaatcgaatgg

SEQ ID NO: 26235 - DNA, 2139 bp, Oryza sativa
aaaattaaaattttggttaaaattgaaatgatgtgataaaaaagttgaaagtttatgtatgtaagaaatttttaatgtgataaaaaaaataaaagtttgaagaaaaagtttgtaactaaataagggcctcagttgaattacagacagccaaagagccatagatgactaacctttgcctgcctggtggaatgaatacactcacatcttcccccggggttcgaattttaaccgatgaacgaatattttttcatcgtttggcagctgtagctttcatttgaaagcaaagcaaatgcagcctcctttcacagtaagaagcaacaaacgtactaacgaacagctgtacgtttccactttgcaccctgaagtcgcttactcccttcatctaaaaaaatgacaaacctagatgaaaaaatgacaaaccctgtgtttcatgtccaactttaactgtccattttatataaaaaatttttataattcatattttcattattgttagatgatataacatgattaatattttatgcgtgacttgtctttttaattttttttataattttttcaaataagacagacgatcaaatattgggcatgaaaattagggtttgtcttctttttttttttttttttttgagggagggagtagcacggtgaagcatcactgtccagggtctatcattcgttcgatcagtagagacatacccatgtgatgaagtaacatctggaaatgacagcaatgtggacccgttatacagtactactatcgatccctcattgttgcaattcaaggccttatgggttcagtttcatatcaaaattaaaagttaaaaaaaattagaataatgtgatgaaaaagttaaaaaattatatatgtaaaaagataaaaataaaaagctaatttttttaaaaaaaaagttgaaatctaaacagatccctattattgctgagcaagacccagcaggtcgccgtctgggctagtattgctgtaccacgtgcatcacatcgcacgctaaggagacagcagcaaaagtcccactcctccggttcgcatccgcgctagcgaaaacgaacacgactagtctactctactgtacgtacggcgcagccaagcccaaccgaacagaagtgtggcagggctgtgtgcgcgcgcgccggcggcgacaccgcgcggagctggtcatctcccggtacatgcgtgccgtgcgtgcatcacgtggcggccatgcatcttaccgatcaggcgatcacggccggtgagggcttttgtgttgggcccatgattctctctccttctctgtgcgtaacagcagaaaacaccggtgcgtgcgtgcgtgtgggtcgcctttgccaccgacggagaaggatggaaggcaacagtttttctggtggtacgcacactcttgtgctgttttccgtttttaaaagaagttttttctggtggtacctggacgcatggtcatcactagttgatttctcgcgttttgttcgtcaagtaatcagtggaacgtgtatgattcattaattctaagcatgcatcacattttgttgaccaagtctggagctaacctgtctatctgctgttttgtgctctacaaccagaagtctggagcacaagtttgtactatgagattgtaataattttactttaaaaaacaaattataacaccaatattttacccgtgtggtcgaggggactaattagaagttctacatagacagatcatggttcgcagagcgtgaactgaggattagcagtcgcaacgttgaggagctccggcaggcggcggaaacaaggatccccacgggactacgggaggattagcaaatccaaatccaatttaggttggcgatctaggctgttcccaataatgatttatgatgggcgccactttcccttgtctgatcagaagttatatgggccaaatgccgatcttgattaccgtaagttttgtaggccatacttgggtcgaaataatttttttggccaaacttggatctcgatcattatctgccatccataaatcttttttagaggaatctgccgtctatatttgagtatactaaattgggaatgcagttaatccgatgagatccaaatttgtgggcaacgcatatttgttgcgatacaaattgtgatcaatc

SEQ ID NO: 26236 - DNA, 2851 bp, Oryza sativa
  unsure (1)..(2851): unsure at all n locations
tacaaaatgcaaattttatgcgtggcttgtgattcaaaatagagtctaaacttccgatcgactagctacaagaggatggctaaatagcggagagtgccccctatgccgtatgacgaacgagacggcatgccaccttttagcttcctgtagatacaccagaaggatctggagactgacggccggctgggtggcttatcagcaattggatccgagcaattgggagccatgccaaagcgtacacaaatggtgggaaatgctattgctagccaacaaaagggaagtgcccaagaaagggctgcgatccttaatcctactcatagcctgggaaatctggaaagaaaggaaccaaaggatcttcgagcataaggaaacggcagcccccaatcttatggcaaaaataaaggaagaggcaagaatctggataatggcaggcgcaaggtgacttggagaattcctaccaacttaaccatagtgcttatgtaattttgtacagctctttttttttttgcccctaggggatatatttttttacgcctatatctaatgaaatagcacaatcttgtgatgattcctttcaaaaaaagaaaaagaaaacccacgtgcatttccttcgcccagaaaagtttttacatagaaatatattattctactaccttttacatagaggaaaaaaaggaggggtaatgagaacaactggattgtcatgtaagggataaaaaaaaggtgtttggaattcataagtttcggtcccctgaaatctagacactcccatgtgaatttcataaataagaatcaacaggaggtagataatcaaattgttttattgtgacatcccggcctaaggtttaataggattaatagaatactcatattaacaagttacaacttctttttccgaagccgatctctaaatctgaggttaagcgtgcttgggctgaagcaatttaggtatgggtgaccgatcgggaagaataatttatggatggatgaccgatctggtttgtgagggcaatctatgacctatgaaggctgtcatatgtaaacgggctcggcctgggataggcgaaacgttacatttatcctgttttttatgtgattttagtccctctaatattcactcaaagcagtgtactctaatataattcctcctcctttattcgtcatttctccttttcctaaatcctaatcttgtattggaattgtactttatgtaacattttaaatctatgaacgatctcacttgtcctcctaatggagcgattagttgaattgaagaagaaaaatggttttgaaggttctggattaggtcataattttttttagattattcttttttttactaatagataactttgggattattttgagaaagtattgagccacgtggtaatattggccggcagtgaaaaccgccagcattagtaagatagatacacaaaatgatttaaattgctccaggccaagcacgcttaaccctggagttctttggagattggcttccggaaaagaagcccttaagagagatggagattggcttccggaaaagaagtcctaggccgggatgttaccccgccgggatgttacaccctcacccccttaagagagatggagattggcttccggaaaagaagtcctaggccgggatgttacaccgccgggatgttacaccctcacccccttaagagagatggagattggcttccggaaaagaagtcctaggccgggatgttacaccctcactctcttaaaagagatagacgccaccgtcgatcaacctttaagtaaaaccgcgagagtcggctctgataccattttgtaatatcccgccttcccccaggccgggcccttaagtgaaaccgcgagagtcggctctgataccattttgtaacatcccgccttcccccaggccgagcccacttacatctgatagctttcatagaaaaataaactgccctcacagaccaacacatgtcttttctgtacactttgtcctcactcgtgtacacccaccgggaaagattttcccggtcggtcacccatcccaaattgctccaagccaagtacgcttaactttggagtctttgnagattggcttccgaaaaagaagttgcaacttgttgatatgagtattctattaatcctattaagccttagggcggggatattacagacagcgtaatcaagatcgttcatatgcttgagaagagagttgggtggtccaaagtgaaacaaaggcaagtttacccagtcctaagtgaaaatattgcttaaaggttgatccaaagtgaaacatcggtaacaaaaggtagcccgaagtgaaatttactctatatttcttgatagggcaaaagtaagtttgagttactaccattgttgtctaaacttggggtgatctagaccgtccaaacgcgcacagacattaactagtttaaagttcatgtctaggcagtggaaactcatcttttagttctcaactgagcacgcccagcaaacaagaaaatgacatcgtgagaaaacatattattgctagctgattacagttcgacagcttaacgggagttcagcatttatcatactgaggtgctcccagggtacgaacccgggccttgcatctggcggattaattagttgttaagcacatgccttctcttaaccctgaccatgagagcattcttcatgttaagtacgatggaaagtgcgggctcaactacatgggcggggatggtctccaaattggaacatttcaccacggcccccgccacggccttgagctgcacgaacgccatgtccttgccgaggcaggtccgtggccctgagctgaaggtcatgaacttgtacgacggtacgtacc

SEQ ID NO: 26237 - DNA, 599 bp, Oryza sativa
ggcggattttttcttccaacctcaagatttttccggggcattctgatcttctatgggattagcttgcatcatctgaatccaaactccatagtgtatattgccaattttaattcatgcctgcgaagcttttctgggcattaggccccatttcgccttgttccgccacatcttcttcctcaagccccagccgaataagagtaaaccatgcgtcgttgggggtgctggtttccaactcaggggaacactaagccaaaaatacttctccatgccctttaagacctcaaataaaggctggcacgcaaattggttttatgttcaaaaccccgagcccgttcttccctagtactcctgtcttcctccagtttatcgagatacttggaactcactaccaatgggagatgaagctgcacaagcagtagaactgatggagaggatgataaagctgaaagaacagggccttcaaggagaacagatcacccggcactttatcaagtgtcggttagctccaatcaaagaaagatctcgcacagccttcaaatttgacggcaagcatgacccaaaccgtgaagatccagattctcttgacttcaaggttatga

SEQ ID NO: 26238 - DNA, 2501 bp, Oryza sativa
gactactatagggcgaattcgagctcggtacccttctattggctgaggatgattgaagattgtttcaaatattataggggatgtgaagattgacaacgattcggcaatgttcaattggcgcccgccaccgtgttgaatcctatcatcaaaccatggccgttccgaggttgcgctttggatttcattggtcaaatttatccttcatcatcaatggggcataggttcatgctagttacaacgaattactttaccaagtgggctgaagccgtgccgctcaagaatatgactcatacggaggtaattgactttattttgaagcatattatccatagattcggtattccgcaaatattgactacggatcaagtagcttcttttatgtctaaggaagtgaagagttttgccgaatcttatggtgttaaactgttgagttcttctccttactacgctcgggctaatggacaagccgagtcaagtaataagacgttgttgaagttagtaaaaaagaagattgaggaatacccaaagaagtggcatgaagtgctttctgaagcattgtgggcgcataggatatgtaacatggtgccactaaagtcacaccttttgagatggtttatggtcaagaagccgttttgcccgttgaggtgaatcttggctctctttgatatatcaaacaagataatttatcaagtggagattacaggacattgatgggagataatcttgatgaagtcatcgacaagcgtttgaaaggtttggaagagatagagaaagagaagtagagggtggccaaggcgtacaacaaaagagtgaaagcaaagttgtttcaagttggagacttggtttggaagacaattttgcctttgggtactcgattcagagagttcggtaagtggtctcctagttgggaaggtccttatcaagtatacggcattgttcgagggaacgcatattttttggaaacccttcaaggagagcgttttcagcgagcaatcaatgggaaatacttgaagaaatacttcccgagtgtttggcaaggcacttaggaggttctatgaccggtaattgaattatcgccctaagaccaaaatatgttctatgcttttagattcacgttgttcatcaaaaagacagggggcatgtgtttacacccaaatttggcacttaggaataaaatagggaaaattaccaaagtttggaagtctgccagttttcctctgcttgggccggtctgaccgccgttgtttggctggtctggccgaccccggtccgaccaccgatagtgggtcggtcaaccggcggtgtgtggccggtctgaccggcagagtccgagtccgggtctgtttcgtcgggtctcgaggtttccttgctcaagaaggcatgtttcgggtttcctttggattctatcccgagttggacgtggaggacagcctgtagagggaagaaccaacccctatataagagacatggccagttcaattgtaactaatcaatctataatcaatcaatcaaatcgttattttgcttttgcttctagttctagtttagtttgtccatctttgtcgatttgcgctgtaaatcgttcgccgccgctgtgagagtgtgacacctctttgtaggtttgtcctgaaaaccttccgttttgcccacgagacggtgtcggtgatatgggtccgggggtacccacgctgagggaatcaagtcctttcccccggccacgtggtcgcacgcccctccaggccagacgtgtaggcaacgaacggccaagaggtgcctaacttcgtctaggggcctcggggtagctcgttgcacccctcgggcccgaggggctgcgccaccccgaggccgcattcaatgcggcgtggctggttgtgtgccgcttagcgattggacgtgccccagtcgccttgaccgggctgtgaccggccaccagcggatgggacgggtggcagcgcacccacatctcgccctgtgtcaagtggcgtgggggtgtagacccccgattttggaaatcggaaatcttctgtgtttatccgtaccaatccctggatcagtagttggtacacacatacatagttggatcacaacatatcacgaatgaatttaggctaaaagagttaaatacttacattagggccaagtaggccaacaactattagagaacaacagcggaagacaaaataatataagggcccggttaacatgccacaggcagtcgactggggaacgagacctagaacaagaccgctctccgatcatcttgtgggatacgcaagtgtaccgacaagggcttctcttcaacactctcctaaaagatatataaatagcaagggtgagtaccaaccgtactcagcaagccaccacaacaacaatgcatatgatagagggtatttcaaggaatggcttcaggttcttttgcataaagctaattttacaattcttttcacaagcctaaaacctagcatcgactgatcaaattttagtaccagtgttcactttaa

SEQ ID NO: 26239 - DNA, 1088 bp, Oryza sativa
  unsure (1)..(1088): unsure at all n locations
gatggcgctcgtgcagatgaaggtcacggcggcggccatggcgtggaactttgccgtggaggtggtgccggggcacgtcgtggagccgaggctgtccgtcatactccacatgaagaatgggctcttggtaagggtcaagagaagagagccagtgatgaacacctgagaactgagaggatacatgcttattaagtgtgatcaatatgctattacatgatgtacagtacagagttttaatttatgttggtgtcgagcgtggtgcttcatctgtaccgtgtgcggtacgcgatagaggcctaaatttgcacattggttgcgtcagatttgtaatggaatccctcaaggatacgaattaataacttggggggtgtgtcatatgattgtgtcatggcttaagattaggacattcaacttgctatatatggggcgacgcccatatcttagcacagtgctaaggtgattgcattcatgcatgatggccccgttagctcactttgtacgtacgtaccacgggtccacggcaagcttattaaatgctctgcctcaaagctctttcatagagtaagcccatctacggcccagcttaaatcagctgtgacccagaggcccaccaatgaaaaaaagtgtatgggccggccataatcggcctaatgtgttaagtcatacatgctgaagaaaagtactttcctattgagcagattaagcaagaaaaatattctgaagagactgaaaatataacagaggccaatagcatcagccagtcaagtggtcaacaagtgcagaactactctgtcctgtcatatatttttatcacagcaaaaatccacaaatctgactatgcagcatgcattgctgactctgtcaactcttatccgtaggagtatatncgtttcatctgatatcatcacatgttctagcagacagcagggcatgatgatgtcaaactatttgacccgtccttgattacaagccagatcaggcacaatttctgaagataagtactatgtatgacaaataagacaacatctaactactgcggcacagctgtgctgctttgaggtcagcaaagctacactggagttaacaga

SEQ ID NO: 26240 - DNA, 1289 bp, Oryza sativa
gactactatagggcgaattcgagctcggtaccctaacttataagcatgcgtacaaatatagagcagatgtatatatctctactattataaaaattgaagatgtttttaccggtattttggtacgtcatatgtatttgggtcgatttttaagtttgttcgcttttggaaatacaaaagaagtcgtatgaaaaatttcttttaaaaaacttgcatgctttgttcgcttttggaaatacaaatccgtgtatgagtcagattttaaattcgtttgcttttgaaaatacaaaagatgttgtataagaattttttaaaaaaaaaatcttgcacgctaacttgagatgaaagtcaggctcctaattctagctcatgattttctaaaagcgaattcccacagtgaatttcatccttgttaaaccgtataacaataataagattaaaataacattcacccgttgcaacgcacgaataatttttgtaggtacaagtataaagcacgggtgcagccaatgagatctaaacatgaactgaaagacggtcccagcaaactggataaaacagaacaccacacgctatcacaaattattgctagctgattgcaagctcgacagcataacaaagatcttcgattatctggcagatcgattagttaacgttgttgattacctaccttctcttaaccctgaccattaagccattcttcatgtggagaaccatggacagcttgggctccacgatatgtcctggcacggcctcgatctcgaagttcttcaccacagtagccgccacgaccttgagctgcactaacgccatgtccttgcctaggcaggtccgaggccccgtgatgaagggcgtgaacttgtacgacggcacgtaccgcagcttgccgtcgtcggagatccaccgctccggcctgaactccatgcagtcgctgccccacacggactccgtcctacccatcgcatagatggacaccacgatcttgtcaccagggcgcaccttgtgcccgctcggcatcacgtcggcggcaaccacgcctttgtggtccagcggaacaggtgggtagagcctaagcgactcgcacacggcggcgtgcaggtacacgagtgacttgagctcgtccgggtcgaaggtcaccatgccgtccggggtggtggtggcgcgctcgacggagtcaagctcctctaggatcttggacgccacatgagggttcttggtgaggaggtagaagaaccatgatagtgccgagcctatcgtgtcgcggccggcagcaatgagggtcatggtcgtgt

SEQ ID NO: 26241 - DNA, 1985 bp, Oryza sativa
catgtcaaatgtcagcctcatgaacacgtcttgcaggttgcatctctcccccgttcccgcgaaatgggatatcagcggaagcagcgcattctccactttgtcactgctgcaccggaacacgaaagactggaatcggtggttgtacatgagaagctgggtcttggctcgctgccggcgccacgagtcgccgtccacgttgaagatgccatcacctaaggtgtcatcaaagatctcggcgaaatcgggtcccttggggtaatttgcgaagttggaggtgaagatgtgccggacattggccgagtcgcaggtgaagaagaaccgcatgttggacgacatcgttgggccgataaaccgaaaattgagctgggaggcggtgagaaacgaggtgatccagtcatggagctggtgacggttgacgagaagatcagggagcatgcccaccaacggccaacacactgggatggcagggttcttcctctttgatttgatgtggtagtagtagaaaacgctaaagcagaggaaacagagcgtgagctggagaatggaagagaaagccattgctttgactgcttgtacggttgctcgtacgcgcgtaatgcaaaacaaaggaggcggggtaccgagctcatgtgaatgcttgcagtaccacacgtgtataaggtgtattaatatacccgagcgagagtagtaagatgaggcggccaggcgggcgatgttagcaacagtgcttgtgatttcactgaaatttttccaagatttttgcatcatgaatgatatattggtattggaaagataaaattacttaatgttagctacatgaaccagctagctgccatcgatcgatgggaatcaactcctttgctccgcacagcgtgccatcttgtgtctcgttggcgcctgctgctcttggtatctccgcggaaagcggatactaaattatccccattctggctttgttctacctgccttacttctctaagcaaggttacagacttacagtgtcgtcatgacatacctcaatttccgtaatgccctgatatttccttcagcgctaaaaatatgtaccaatgtatcaaaatttaacttcaaaactatctactctctccgtccataaatataggagattttggttggatgtggcacatcctattacaacaaatctagacatgaagctgtaagatcaacgtgtgttttgattcttattctgtgatgaacaattggcatctgtgattattggttttgatatttggaatttattcacaaagtggttttggatttactgatattttatgtgaccggtcagaccgggcggagttgccggtcagaccggcttgtgttgagcggtcagaccggccggcccgcggtctgaccggccgacgctgtgtcggtttcagtttcgggttgtttctttggatatccgcgattgtttcatcgttatggcttctagatggatactatacgtatgtaatactgttgtttgctaataatgagtcaagttggggatagcttggtctcggaatatggtttctttgtttgtttcatgtgtaggtgactcgatgcctcgggagagtatttgcggtgatggaccgggagtcggcttggtggtaagacgatgtccgtggtggtcagatatcatgtgggatactaaggctagagttgatgcacgtggttggtgaagattccatatggcatacgatggaggtattgtgtgcgtatgggatgtggagtcgaatttggaaggagtccaaatttggtacgattggtgtttcaccgggtttcggcggtctaaccggcatctcaccggcggtcagaccggcggcgtaggcaggcagcggcaggcgatttcgtcggttcgaccgatcgatctacatcggtcagaccaacattcatcaggcggtcagaccggtgcgttcacttcggtcagaccgcgatccatcgaatttgagggtaacttttatttccgctaaaagttttggtttttgggt

SEQ ID NO: 26242 - DNA, 899 bp, Oryza sativa
atgatttgatttttcaatgccatatggacgtgaggatcaggtcaaatcagtcacgtaagtgccaaccatgatggcctgaaatcattgttcaaactgttgtggtatatcgtttgcattgattttaggagataagggatgttgtgcccggtttaacggttgagggatgcgatcaaactcaggctttagagaagggagctatagtgaactttttcctccagattataagctgttggaagtagagcctgatctgctattaggcccgcagtgtaatggaatattgagcgacatcacactgtttattgggcctgacattcctagcttaatgggctattaataggctttgacaacttggctgacgtcacacaacaggatggaccttcaactctaacgtttttatggaacacacgtgagaactagcgtacagagagggtctcgcctggtgaaatcgaacagaccgtttacattttacaacacggtgatagagatacgtaggccatgcatagtgaaaaccgtacatgcccgtgtacaaacacgtacgatatgttttcaccgatgggttaattggcacacggtcgatctaccgcttcttcaccttcaccatgaggccgttcttgatctgcatcacgatcgacaccttgggctccacggcgtggccggccaccacctcgaggtcgaagttccaggccacggcggcggcgacgctcttcatctgcagcaccgagatgtccttcccgaggcacagcctcggcccggcgttgaacggcatgaacctgtgcgccggcacgtgccgcagtttgccgtcctccgtcacccaccgctccggcctgtactcgccgctgtccttcccccacacgctcgccatcctgcccatggagtacaccggtatcaggatgttgtcc

SEQ ID NO: 26243 - DNA, 692 bp, Oryza sativa
tcaaatgatgcctgcagttgattttacgtttgctgtaattatctagaaaaaacgttatttagtttgcttgggttgtctatttcaattgtgcagctggcaattttcttgaattttatttgtacatactactactgtatggtttctaatgctcctctatgatgtcggtttgatcgattttatgttcctcggttatcggttttgacggactggcctgcgccctgtaggaaggtatcgtatagaactgtgttgcaacattgagaattggtttttagagttgtgatctgcacttgtaaatctgacaaatttgagaaaaagagaattggtatttagcaaaacggagctgtgtaaagatttatttatgcgcttctctcgttttggccgaatcagttttaacaggagggaacctgtctttccccctccaattcattgaaacaaaatttacattagtaagatatatcctaatatcctactccttccagcttataaaacattatagcgttaaacaagattaacaatggatattaacaatttaacatgaggataacctgcaccttttctttatgaaaccaaagcgaaaggaaatatgcaagatcaagacatgtttcaaatcttctatatattagacaagaccaacaatgtgtcttcagagttttgatagaggtgaggcgcctggctgtggataatcgctattc

SEQ ID NO: 26244 - DNA, 574 bp, Oryza sativa
tccaccggagcataacgagccagacgattgaactcatgcagatactcagtgactgtgcgggaaccctgtgtgagcgacctgaatttcttcttcttgagagacaccactcccgatggtatgtgcgtcttccggaaagcagcggtgaattcaagccaagagataggttcagcagtagtcctgttaaggcggaagtgatcccaccactccgatgcagggccatgcagctggtgtgaagcaaaagagaccttctcctggtctgtgcactgaagcagatccaacttcttctctatggcgtgcagccaatcgccagcttcaacaggattagtggtgctagacaaaacaggtggcctcacgcgaagaaactctgccagcttgttttggggaggtgcatgattgttcccttggttctgctggttttggagttgctgcatcatcaaattcatcaactgtgcctggtgagccaggacttgagcaagcatgggattctctgcattgttgaagttgtgggggttggggccattcccattgctgcgagtgagcgccatctgacatagacaggagcacaagaagagaa

SEQ ID NO: 26245 - DNA, 630 bp, Oryza sativa
aacaaccaaagtatgtgaataaattgtattaactattacggcaaactagcggagataatagacaaacctttcaagaggtaatagttccaaaatcagcaagaatttcttttaatttctcatcgtcgtagatgctatcatccaagtttttcaaatacaagttagttccctggttcttatccgccgcctttttgatgttcttctcaaatttttctttcaattccatctccctctctgacttcttctgagctcaacaaacataccattccttgtcatcaactgtcttgccattctaatctccaacagctcgagcagcatcatctggattttcaaagttaacaaatccatagcatatagatttcccatctccttcacgcattacaacgacactagttgtgggtccaaattaaccaaaaatttcctttaaatgatcttcagttgttgattccgataggttctttacacacacattgttaaatttgggattgcatgatacattttccctgtcctgtttacgaacaaaaggccctacatacccctttttgtcattcaaaagcatcccattgagctaacaaatagcattctgggcagcttcttccagctcaaaataaacaaaaccatatcccttcgact

SEQ ID NO: 26246 - DNA, 1346 bp, Oryza sativa
gagctcggtacccctttgcacaagcctcggcatgccgcttcaaatgtcctgttccaccagatgatttcgcagataacttatttttgcatattctacatctcgcgaatgttacctgccttccatcagggcctgtcatggccacctcatcgaaatgttgccaaacaccggaagttcttgatctctttgagccggtgttcgtcgatacactcccactcatagtgccggatgcttctgaacccgccggtggctccataactggtggtgttggagccgatccggtggcatcatacttaccagttgggaatgacctcgacacgtagttagggtcgaaatcacctaacgtgaacgatggaatgttcgattcgtccattctgaaaatttaaaacaacataaacaaatttcagaatatttattcgcataacatgaaataaaataatacataaaactgaatatatgacgtacttctttcttaccacctttgcttggctttacacctcttgtatgcactatttttagtcacaaactatttttgattttagacaaaattttgtcaaattttgtctaaatcaaaaaatcgatctatcacacgaaagagcacaacagagcacaaaatgggaggtatggacgattcagaatgctccggtgggtgtcctatttatagaaacaaatttcatatttttttcgaatttttttccatttttttgctctccaacggctacttctcaaaaacagcggtcgttggattagctcactagccgttggggacacgtggcactctcgcattcgtcgtttgactagctgttcggccgccgtacgggatctcgctgagtcgcctgtcgccgtctcggctgctcccaacgaggcacggagtgacggaggcagtcagagcgagagcgacccagcctcccagccccaacgacacgtcgcgacgccgcttgccacgcgccacgcggcgacgtgcgcttcccgccgcctggccccgcggctgccctcggcggctcggccgcttggcgccacgtgcgcggtgtgcctaccctaggccgctcccgtgccgtgccgtgctcgcgggccgtgccgtgccagccctctacagtaaacgtgccgtgtcgtgctggcccacgggctatggcgtcagcccagacacggcacgggtaaacaggccgtgccggcacggcccacaggccggcgtgctgtgccgggcctgggccttctacagtgcggtcgtgcttgggcccgcccggctttggcacggcccatttggccaggtataggtggatccccacccaccacccaatccacttccacggtgggtgttaaactcccatgctattcggctggggaaaaca

SEQ ID NO: 26247 - DNA, 1754 bp, Oryza sativa
ttatgcatatctgtatctggatcctacagaacaaacagataggatgagtagtatctgatgtaaatataatactcgagaaaaattcaagcattttaaaatatttataaatatgtatttcttctcttgtcaattttgatttccccgagcagatgactcattacgtttaaacactctgcccgactagtcatagccaccaagcaccgggagtcggcctaagcacttcccaaacatgcatatgagtgacatgagtttgtcattaatggaacaaagtttcacgggtcggagtttactactcgggtacttttgcaattattaagagcagaaaataaattatcttatctctatgtttttgatttattccgaataatacttagcaccttgcattattcggtccatccaacaagcccccggtgctaggaatcggcccaaaggcaactatccattggcaaaccaaacggaaagcataggaagatggaactccataactcgataggcatgtttgtactcagaataagtcgcaagcaatcaagataaatattatgaaaattgtttaaaaaatatggtataacatctgtagcccccgactcactagtcaacagcgaaccagttgatgtagtgaggcaaaggaaaaggcaaaatatcgtataaagaataaaatgaatgataacttagctttgtcatatttccttggtgacagcagaagtagccgatgtgggaatgaagcagtccatcaatggtgacaaaaacaccagtcggcgccagtggaaccaagccagtggtgtagatgatgaagcccattaacggcggcggagtccgccaaccgtataggcgaaaacaccagtcagtggcggcaaaggcaggccggcggtgaagtcgtagacgcccaacagtggcggcataataggccagccgtacaggcggaaacaccagtcggcggcggcaaaggccagccggtcggtgaagacgtggacgcccatgaacggtggtgtgaccaaccaaccgtataggtgaggacaccagtcggcagcgatggaggcaggccggcggtgaagtcgtagacgcccaacagcgacggcataatattccagccgtgcaggcagaaacaccagtcggcggcggcgaaggccacccggtcggtgaagacgtggacgcccatgaacggtggtgtgaccaaccaaccatataggtaaggaccaatcaacggcagatgaggcggcgttaaggcgagttgcccattagtcgtgctagagtcggccggatcgatctcttgcaatgaatccatcgcatatgcaaaaagaaagcaaacatatagatctctgttagtgagcaggaaaatatagatgctttatcatatactagaaaacatctatttaaagtatagcatgataaaaaaattttaatccacgcgtgttgattgaatcaacacatcgggcatgctttccagggagctgtaatgtcctggcctgagctttcctgtgcatggagtaggcatgcatggagagagcacatatatatccatattaaatcacatgcacgtagcagttggtcaaagcctggaagcatcagcatgtcgcatggttcccgtgaagacgtggctggcttacgacttggactcatgatgagtagacggagtgctttgtcttgcacggcagcagcttgttaggtagttagcgtccatcagagcaactcagccgccagtagtatatgcggacgtgcaaaagaagaattagaaaaacaatatcaatctgtgatta

SEQ ID NO: 26248 - DNA, 3880 bp, Oryza sativa
ctttgtcttgcacggcagcagtttgttaggtagttagcgtccatcagagcaactcagccgccagtagtatatgcggacgtgcaaaagaagaattagaaaaacaatatcaatctgtgattagaaactaatctaacagagattaaattaaaaggatgaacccagatcatgcatgtcgatcggtcgacatgtgcatgtggattactcctggaggctggcgatctcgtgcgcgagccgtgagcactgccgttccacgttgctcccatgtcaggttacaccgccaccggcatctgcacacggggcatggaggaacacgacgtattgggctgacacaccgggatgacagccattggtcttgatctcagtcggcatgcaaaaataagagaaagtaataggagattaatctgtagctagaaatcaatttaactagtgaaacgataaaattatctaatgaagttggagattgaatcgatgaaatcgctgagattaatcccttcggctgaattgaatccaagacgaaaaagacatgcttcacgaatccggcgatgccgaagattgattccatcgcactcgttgataggaaactcgacgcaacccctacctggcgcgccaactgtcgaaacatgaattcggcaataataaaagggggtagcgtacgagacctaaagtggatggatgcagagacaaaggatttagacaggttcaggccctctcaatgagaggtaataccctactcctgtttggggatttgaatccgccgggtgtagtattgatctgacgatcaggttgtctcatgccccctagagggcctcctgcccaccttatatagggtggggggcaggattacaagatagaaaccttaaccaatacggtatcggtttcctaaatctactttacaatattatcaaaccaggactttaggctgttccgtaatatataaggaaacgtaatacccgagtcatgatctgttacatattccatagatataagttatcccctataactagtcggataactacgccgtgtgggtatggggtacccataatctccacagttttctttttcttgaaagggagattgtctttatctctattggccctgtttgaatcttgctatttaagagtattaaacatagattactgacaaaacctatttcataacctctaggctattttgcgagacgaatctaacgaggtatattaatccatgatttgctacagtgatgctacagtaatcagccgctaattatggattaatatacatcattagattcgtctcacaaaatagcctaggggttatggaatcgattttttcggtaatctacgtttaataatcctaaatagtaagattccggagggctatttaatagcccggaggattcaaacaaggccattgtcatgaacatcagtaacaatttgaccatctttcgttaaaagagtatttaacgttatcccaatatgtgtatgcatggtaacctatggtgtagtgagtttatgatgttcagagcttcgtcgcaaaaagaccatgcaatttaatcaaggcctatatcaattgctttatagacttgagggaacaaggcccaggataaccggaggtttttgggccggtccaagaagagaaacactaatgcgacgctttaacgtgaaaaggccaggaaaaaaaaatcgaaaatgccatgccatgcctagcctcgaccagttaattatgcatagcctgcagccctgtacaacacagaataagttatggagtaacttattttgccctaatggcattcgcagtgcgcaccgctggcattcagctctagcccttcaactcaaatatttccagccacgtcggtctctcccgtgcccatgtgagaaacatgtagccaaagttagtcacaaatccctcatcaaaatgcgtcagagattcgtcagccgacacgagaaagagagagcgagatgagggggagggcctactagggagccaaagcatcatcatgtgttggtggcacccatttgcagccgtcattggagatcggttcctggcaagtgaaggcgtcgatcactagggcgtgctccaccgtcttcgccgatgacgccacctcctccttcacgacggtcatgtcgtcctcccttccgtctctggcgcggtagtgatggtgatggcgaccccgaaggcgcggcggcaagaggaggaagggggaggcgctgcggccggaggaggggggaggcgtagcggccggagatggaggggggaggtgcgtgactagtgaggaatgagtggcgttgagaggataagggagaaacttacttttttatttgtgtacatttcacttgaggctacatatcactgtaaaacttgtggcaagtattattcttcccgtatcttcatcctatgtggtcctcaaactagcgactagtgagccgtactgtgaatggtctaagaatatctaacttatttagaatcttaaaaatatctagcttatttagaatctcaaaagaagagtgacaattgggatggtttatgtaatctttttttttgtaaaaaaacgttctcagttttgattctgtgtaactatgccttcacgcagcatgtaaaaccggaacattatcccaaaaaaggtccccgaatacaacattttgctgtgaagtttgggtttttcaattgtaaggtgtgaatcaaagagtatatcgtgttaactgcacagaacatccagaaacagcagagatgggagaaaaaaacaggttatagtgacacgaagctcagatcagtgctgcagcattcatacgtcgtaaacttgattccgcttggtgatttacaacagcagtatacacacatactggaccagccatttagcgctccaattattggaaagctagtactgaaatgaacgcgagactaccaatactacaccatgctagtttcagagacaacaggaaggttgttcgtttgttcagatcaggttgttgccgaagccaaggacgagtgagcagcagcagcggcgaaccccgcgtagcccagcgcgtcgctgctgctaccctccggcccgtcgccgtcgtccgtgtcccacaagaacgcggcgtgcgcggcgagaacgtggctgcagagatgaacatcaacacgggtcatcagaaaattcagaactgattctcgagttcgcgtcaaagcagtagtagatcgcgacgatgcgaccatggattggtgcgtgaaagattggtcgattgcacagcgcagcgaacctgttctgcggggaggctctcgctgcccgctcgaagtagctggaggcgcggtcctcgtcgcggggcacgtcccagaccagcttggcgtactccgacaggagctcgccgtcgttcgggtcggcgaggatggcacgggagtagtactcctctgccttccggctatcccctttaatctaccaaatccattgcatttgctcatgtgttagacatgagaagttgagaacgatcgccagatctccactgaaatttgcagaaatggacagtgctgtggcttacctgatacaggaactgcgcgtagttcctcaggaagaggccgttgcatgggtcctcctcgatcatcttcttgtaatgcatctcgatgtcagagcgattccctccgttgtcggaggtcaccaggtaactgcctccggcgccaccgccgccgccgccgtcggaaccgccgctgccgccgtcggcgctcagcaagcctgagccgaggcggtcgatcccgaggcctctggcgaggaacagcgggtgctcgacctgcgcgaacgtgctgctgccgctgaagcggaactttccaaagctcagctcctgctccgcgctttcgtggtcgccgtcgtcgtcgtcctcctcctcctcctcgtccgtggaagcgccgccgcgttgcgtgaacgactgga

SEQ ID NO: 26249 - DNA, 2445 bp, Oryza sativa
acatggagtagtacttatcttgctgtgctcctcttctgaagaaagactgaaggttgcagaacaccatgtgtttgccatttgccaaggtaaattgatggcaatgcttttcttgttgtacttgtttgattccttcccttgtgcagaatatatattgatagcagttggtatttttaatttttgtagatgtttgtaaacctgcaaagacagctatctatagagatcgagtcaccgagcaatagggatggcatagcagcaacagaagcacaaccgaatcagcagctagtaccaggtgaagtaaggggagaagagggccaagagggaaacccaactaaagccaccaggaaaaagaaatctccattgtgggatttctttgaagaatgcactgtgccatcaaagaagaagaaaggagaaatggaaaataaggtcaaatgtaaggcatgtgaaactctgctcaccaagaatagtagtggaactacaacacattggtggaggcatttagagcagtgtgattatcacaagcttcaacaaaaatccataaaacaacagaatatcaatttccctagccttgatgaaggtgatgttgatcttgatgctccttgtgtttctgtccctggttattatgatcctacaaagatacgtgagcttatttgcaaaatgatcattgttcatgagttgccattttgccttgtggagtatacatggtttaatgttttgctaaagaggttaaacccttcttacaaaaaggtctctagaaataccattagaagtgattgtataaggctttatgaatctgaaaaagaaaaactgaagaggactttcaaagatgttagaaagataagcctcacatgtgatctttggacctctaaccaaacaatttgctacatgagccttgttgcccactacatagatgctgattggtcaatgcattgtcgtgttattaactttcttgagttggagcctccacatactggtgtagttattgctaatgccatttctgattgtcttccttcatggagaattgaggacaagatagctagcatcacatttgacaatgcctcaagtaatgacagtgctgctaacctgttgcttgccaagtttacaaaacatggttcactttggttttatggaaaattccttcatatccgctgttgtgctcacattctgaacttaattgtccaagatggtctggctgtgattaagcatataattgacaaagttagggacactatcaagtacatcaagaaatcaaacaatcgagcatacaagttcagtgctgatattgattctctcaaccttaaaagtgacatgggtttggctattgattcctgcacaaggtggggctcaaccttcaaaatgctgcaatctgcatttttttataggtctgccttggatgtatatgctgcaggagatgcaaactataggtggctgccaacaccagaggaatggaatctatattgtgaagtcaatgatgccctttctgtcattcatgcagccactgaggagttctcaggttcaacctacccaacatctaaccttttttattctcacattgtcgatattaagagagtactaggtcagttgttgaagtccaaagacccaattcttaaagaaatggcaaatgcaatgcttgaaaaatttgagaagtactggggcccagaatgcaatactttgtttgcagttgctttggttctagacccaaggtttaagatgggtatgattaactacacattccctgctttgtatgaagaaactgtacttcctaagaaacttgcaaatgtggaatccacattgaaatctttgcatgcatcatatgaaagtgaactccagagcacatcaaaggaaaatgatgcaaccactcaatctactagtacatctctaggcactactagtagtcatttctctgctgctaaccaatttcatgagtatatgaaatcaaagaatgctgctagtcttcctaagtcagatttaaagaggtacttagatgatcctgttgaggatattcctgcaaaaagtttcaatctacttcagtggtggaggatgaatgaattaaagtatccaattgtggcaaagttggccaaggatattcttactattcccatcacctcagtctcatctgaatcagctttcagcacagggggtcgagtgattagtgtttatcgcagctctttactcccatcaacagtacaagctttggtgtgtacatctagttggattagaggaggccaccacaaaagcacagatttagtaagttcttatattttcatgtttctaaccaattaatagagatacacaatctaataatctgtgtttacttgtttgttgcatactaggaggatgatactaattctattatccttgtcccaaatcaagcttcaactgcaaattcggttgtgggcagcaattagactcgtttgtcaggtatatgtttgaggttatataaattat

SEQ ID NO: 26250 - DNA, 4312 bp, Oryza sativa
tttaatgagtactctctctgttttgtattatgacagtttgacttttttatgttaaatttctttaattttgattaaattcatagaaaaatttagcaacacttacaacgccaaattagtttattaaatctaacattgaatatatttttatagcatacatgttttgtgttaaaaatgttaatatacctttttttttatataaacttggtcaaacttatttaagtttgaaatacatcttataatgttttcataagtttttttgtggggaatgttttcataagtttgactagagaaaagtgaaaatgtcatatactatgaaatgaagaaagtactttgtttccttcaccttactcttaaaaaaatacttagaaatactcaaatacagatggagagagttggtatgtagtattactcataagtcgtaagtagctatatgcgtggtatttttctccattttttcctctctctttttttcgtgtttaccacacctaacacggcaatagaacattaattggctcaaacacgtgaccaaagcactgcattccgcctatatataggtatccatgttcattttaacttatgccttcccaatatccatgtgtgtgcgtggctatgaaaactttattttaatatcactagatttgttgtgagaaatgctagctaccccaaatcataattacgttattatatagtaatgtaaagtaatgaaatatgcactggtggagaaaccgtttgtagtcccggttggtaaccccctttagtcccggttgtccaaccgggactacgaatcgggattaaagaaagctatctttagtcccgggtgaaataaccgggactaaagatcgagctgaccttttttttttgcatggccctgtttgctgcatggttgattatatatatatatatatatatatatatatatatatatatatatatatatatatatatatgtgtgtgtgtgtgtgtgtgtgtgtgtgtgtgtgtgtgtatgtgtatgtataaatcatatatattaacacaaaagcaaatgtgtacatatataaatatatatatacatgcatatatagtacaattcatttgctcggtagctatagctacgacttcgacttcgacgccggcgttatgtcagaagaggaaggaccgacgttatgaattgttgatgatccgtcgtagtagaattcaccgtcgggattaaggacttcttcgttgatgaatctcatcagttgttcttgaacagccatgataaaatccttgtgtgggagattatccctcatgtgaatacgctatcattcgaaaaataatgacgtatcaatatatgaaattaataaacaacttaacaaatcgatacgcaatgaacttttgaatggtttatgtatacgtacatcgagctctcgtgttgtgcatatttggtttgataggcagtgggcatactcgcatacgtagtagacgcataagttagttccctgttcctgctttgcacactacatgagaaacgaagagagatttaatatactctttatattaactgtaattagagattcaattcaatataattttggatcatgcatgtactcactggaaaatgaaacctccgtccaagtttttctttccaagtcccgcggaccaattgacggaaccgatcccaagccctacatatgcagttgcaagctatgattaattaattattatctgagatcaacataatagcaatagattccccgcgactttggaatagatagcattatattacctgtctatcagtttgaagaccttgtcaaaaatcttctcctatttattcattgagtcgtacacagtgactctgcatgcatccaagtcgaagaattacaggacccagtggaatctggaatatgcgtgagatgagatatatctgatcgaaaatgtacatgctatatgtatgggaatgaaatttgttcgaacgacaataaaaactcactctgtgttgtacggcagtagtatgtacgtcttgaaatgctgctgcgttaggagatggacgagattgtcctctgtgtctttctcgtacttgtcgatcatttcggtgttgattttccgagggtcgatgaacccagtatcgtagaccctccgccgtcgggccctttgaatctccattctacaacgatgaaaggaaagtattattgcttacatatatgtcaggagctaattattgaacgaaacaaatcgaactcaaagatactcacaaaatccatgcgctcaggagagagacgtcgagggcgtccaactggtacagatcgaagagatctttgaaatggatccagagaacatcgtctccttgcaagaagtcggggtttctgatcctcgccccaaacatctctctaccgttggcgctcatttccatgtaccgttcatggaatttgtacatctgtgtcggtagggactccagctgttcaggtttgacaagcggtttaccgagttcaaacttgtatgccacttccgccttcgggattggtgcggctccaaccaactaatccacagatagaccggtgtctgcaatgaaatccgttatgccaaaatcttcaccggtcaccaacgactcgacctcttggtttggttgttctccaagctgagggactggtttggacttcttgtgataggctctctgaagtgttcggtcatagtccgatatctgtaacgcctccttgtttgttttggacattcccttgaagaagttcttcacgctcgggtcaataggtatcctcttttcaggactctgaggcttgagttgcctcttcacctctcctgccacataagcatcaagctcctcttgactgcaatcgtatggtggctccttgtttttggtggcgtcaacttttgccttcttcgttgcccttgtgcgggcaggcggtggagcttggcgagaccttgtcttgggaggtgcaggcggacacggtggaggcggaggaggcggaggagccggaggagatggtgcagcaggaggtggcggaggagccggaggagatggcggagccggaggagatggtgcacgaaatgccacttgtcgcccaggaaggatgatgtaccgcttgcgccatagtatgatggcgtggcttgtgtctcgtagatgcgtctcaccgtcccctcctgggtagtccaactcgaggtcctcgtacgcggcttccactagctcaacttcgaccctcgagtatcctgctggaatcggcctgcagtggtaagtcccggaagggtccgttgggatggccattcccgatgccaccttcacgtgatgagaggttatctattagtaatcaacctaagcagcaacttgcggaatgtacaagtcaaaaatcatcaaactacgagcataccttgattgataagttcttgaagggaatatgcagctcacatggtgtccgctgcgtgatctcatcaacggggcaggaggtttcgtcctgggtttgcatggcgtctatgctctatgatccgacctgcccggttgaggcgcagctgctacgattgcctgatgggctgaccattacaggatgaatgtacggctggggatcttgggaccgatgtgcggccatacgttcatccaccttccttgccacctcctcttgcatgctaagctcgtagctcgataccctatactcaagatctgcaatcttcgcctcggtatctctcttgttcctcatccgactcctgtatgtgtggatgtcctccttaaatccaatcttccagggaatcacgcattttcctcgtgttcgtcctggatgctcgggagtctgtagggcgagtgacagctcatccttctctctatcgggtcggaatgtgccctgagaagaggctaccactgcgtctgttagtcgactggcagcctcgcgtatctgatcgcttaagacaagggagccatcaactgggttaagcgttccaccgtgagcatagtaccagaacttcgatcgatccggccaattagcggtggccggttcgatacccctctcaagcaagctagcctccatctcctcccacttcggcttcgcgacgctatatccgcctgaccccaagtggtgatggtacttcttcttggcagcattttctttgtttctggccatcatcgcttgcccttgttgccctgtcttgtaagcaacgaactcgtcccaatgatcccttagctttgggaatacgtcgaagttcggtgttagtcccttcaggatgtatttcttgtagagatctcccttgaagctctggaactgttctgccattttcttcagagtccactatttcactaagttatccgtacccgcgggtagcgtgaacgtctcgagcattggggtccacaacatct

SEQ ID NO: 26251 - DNA, 11328 bp, Oryza sativa
  unsure (1)..(11328): unsure at all n locations
aaagatatctttactcccggttgttctcaccaaccgggactaaagatcttttcccgctatttccaaattctttttaaacccggttagggttaggaaccgggagtaaagataatagcagttctacatatgtgtttctataatagtaaataatgtattaaaattatttaaattcgaacaattaatgataaaaccttcgaaaaattattgttgtatgtagtagaatacgtggataatatataataagcacatgaatgatttaaaattgttaaaaattctaattaacatatgtaaatagcacatgcatgatttaaaattaatacaaaatctaatatcatatataactagcatatcatgatattaaattgttaaaaattctaattaacatatgtaaataccacatgcatgatttaaaacctttagaaattctaataatcatatatatgtagcatatggatgatttcaatttgactaaaattctaataatcatacataattaacaaaaaatctaataaccatatataactagcatatggatgatttcaatttgataaaaattctaataatcatacatattttacatatgccatacaacaattgattagtatagatattcggtacatccaacgtagtttacatcgtgtacagaacaattacggcaatacatcggcggtgacgggtgaccggacgtactttctcctcactattgttccttccttgtgatcgctacgtgagtaaggggtgtcttcatttgataggaggatgctagggtcaattgtcatcgtgaaagggggttgcccatcaaactaatcgtaatcctagttagtcttgtcctctactccgacgatttttttttttcccgggagaaccacgtggcgcttcgactcgtcagtcactttgcccttttttcctttgctagacatgttcttgatgtaaaaaacttgggttacatcattggcaaggacaaaaggttcgtccgagtatccaaccttgttaaggtcaaccgttgtcatcccactgtcatcaatcgttacgcctccaccagtcaacctaacccattggcaccggaacagagggaccttgagaggtccatagtcaagttcccatatgtcctcgatggcaccgtaatacgtgtcagtcgtaccatcgtgtcccatggcatcgatacgaacagcactgttctggttcgtgctcttcatgtcttgggccctcgtgtagaatgtgtacccattgatttcatatccctggaatgtcgcgatcgagctagatggtcccctcgccaggaaggccagttgttggttaatcgtctcgttacccatgagatgttgtcgcagccacgtggagaaagtatcaatgtgatgccttgtaatccatgcatcggacttaccgatgtttttggcgcgaattagagccaagtgctcttcgatgtagggagccaccaatgaagattgttgcagaaccgtgaaatgggctttacggaataaattgttgtctaccgtcattattgctttccttccaaaagtcccctttccccgtagtctcccttcatggcgtgattcaggtaccccgattgggcgaagggcttcgataaattctacgcagaattcaatgacctcctatgttccataccccttggcaatgcttgcctctggacgagcacggttacgaacatacttcttcagaacgcccatgtacctctcgaaaggaaacatgttgtgtaggtacacaggaccgataataccgatcactttgacaaggtgacaaagcagatgcatcattatattgaaaaagaaggtggaaatatcaactcaaagctgacaagacattgcaccacatcattctgcagggcttctaatctatcaggatcgatgaccttctgcgaaattgtgttcatgaaagcacatagctttgttattgttgcccggacattatctgggaggataccccttattacaactggtagcagctgtgtcatcaacacgtgatagtcatgagactttagatttgtgaacttcttctccttcgtgcttattattcgctttatattcgtggagtatccagacggtaccttgatgctctccaagcattcaaacatacttcccttctctgccttgctaagagtgtagctggctggactcaagtaatggcttcctttctcctttggttccgggtgaaggtcaccgcgttgttccatatgcttcagatcattacgtgcttctagtgtatctttcgacttttcatatacacctaggaagccaagaaggtttacacaaagattcttagtgaggtgcatcacgtcgattgcgtggcggacgtccaagaattcccaatagggtaactcccaaaatatagagttcttttttcacatcgccgcgtgaccatcttcgctctctataggctggctgccaggcccctttccaaacactactttaagatctttaactatagcaaacactgttttcccgctgcgatgtttaggcttcgtacggtggtccgccttatgttcaaagtgcttgcctttcttccgtaccaggtggtttgctgcaaggaatcgaagatgacccatgtacacaaccttcctacagtgtttaagatacgtactttctgtttcatccatacagtgagtgcaagccttgtaccccttgttggactgcccggataggttgctaagtgcaggccaatcgttgatggttacgaacagcagcgctcgtaggttaaactcctcctatttgtcctcatcccacacggagacaccttccttcttccacaacagtttaaaatcttcgaccagtggtcttaggtacacatcgatgtcgttaccaggttgcttggggccttgaattataatcggcatcattatgtacttcctcttcatgcatagccatggggggaggttgtagatacacatcgtaacgggccaagtgctatggccgctgctcatctctccaaaaggattcatgccatccgtacttaaaccaaaccgtatgtttcgtgcgtcctttccaaagtctttaaattttctgtcgatgtttcgccactgcgaaccatcggcggggtgtctcagcatcccgtcctgttgacgctcttcagcgtgccaccgcatcattctagcgttccccttgttcttgaacaaacaccttagccgtggtattatagggaaataccacatcaccttagcaggaattctcttcttcgttagctgcctgtcaacttctcctgtatcatctcgtctaatcttgtatcgtagcgctttgcaaacagggcatgcttctaggttctcgcactcctcaccgcgatataggatacaatcattcggacatgcgtgaatcttctgaacttccagtcctagagggcacactatcttcttagcctcgtatgttgtctcgggcaacttgtttccctccggaagaatgttcttgacgagtttcaataaatcgccaaatgccttgtcactaacaccatttttttccttccattgcaagaactccagagtggtatccaactttttgtgcccctgctcgcaacctgggtacaacaacgttctgtggtcctctaacatcttgtccaatttatgggcccccttttcactttcgtaatcctccttggcgtcctgcaacatctgaccaagatcatccgcaacgttgttaccatcagcatccctttcctcctcgcccgtttgatttccttcaaatccagcgtactgagcaaagtccggaatattgtcgtcttccacttcatcttcttccatttcaacaccttactctccgtgggatgtccaacaattatagcttggcatgaaccccgactcaaacaagtgaaaatgaatagtcctggatgcagaatactccttctgattcttacacttattgcatggacaacaaataaaacccttttgcctgttagcttcggccactctcaaaaaataatgcacgccgtcaataaactctttggaccaccggtcagcgtacatccattgccgatccatctacatgacatgaaaaaaaatcgtacacacataattattcgtacaataatgacagtcatacaataattataaaataattacaaactctttcaacagtcacacaataatgacatatcattattcatacaaatattatgaaacattacaccgaataattatatatttactatttataaagttttaaactaatattaatgtgttgtacttattttaatttttcattttactttgttttctattattcaagattaactttcactatattttccttctcaacttttttataaaacattctttaccaaataaactaaatttctatatattctttcttctccacacaaattttctctctcatcaactaacaacaaaattttggagacaaaaaagtgtgcaaaacatagctccaaatgtaatatgaaaaaaaaatattggaggatgaagttgctaaccttttaggcacctccgatttgtatataatcaacacaataaattcactagaaattttggcatgacctcccctcttttttgaagaaattttgaagcttgctcgggctggaggaggaagaagacatatatataggggtgggactttagtcccggttggtgttaggaaccggggctaaagatcgccgggatctttattcccggttggtaacaccaaccgggactaaagttatgatctttagtcccggttggtgttattaaccgggactaaagatcccgggggggctgacaggccctgacagcatttgaaccgggacgtgttaccaaccgggactaaagatcaaatatgtctgttaccctttttaaccgggactaaagatcatctttagtcccggtttttgttgcaaccgggactattgtggaattagcccgaccgacgaaagatggtttctccaccagtgatgatagacatagttgtatctctaatattgaaaacagcctaaaacgagtagaggcggtacatcataattaccttttggtgttattttctcttacagctctatatgtttgcagaaaaacttacagaaaataacatttctgggtaaacagcatgaaccgacacttagttgagaatgggtggcgataggaatacataccaaaaaaagatgtggctcgaggttagttacagaagagaacttagggcgtcatttgctgccctccatagctaaaaactactcgagaggaccggaaggatgcatcatgcatggttgaagaactctcttgtgttgctttcaagttgcaacggtggggatgggtggggatggatcatcctgttcagtcacacatacattcatttcgttgtaatgggcgtgttttcatggggcagccctcactttttgcttgcatgaagtaccgacgctgtagcaagctgcaccgaacatatgcccaataggattatttaccgtcttttctcattaatattttcttcgactttatgcttctttgccgagtttgatcaatctatgtgcacaatgagctatacccaaatactgtcaaacagagcggcggggttgcaaaaaaaataaaacctttatttagtaccacaccaaattatatatttgcgacttacatatttaactttttccccacacgttaattataaattatatatgtacacaaaatgaatagccagctgctatatgtaaggtatactatcagtatttctttatgtgctgtctttggctactcctaaagggaacacagaagaaagaaagctaaagctgggccaaagcttagccaatattactgcatactcgtgagtcgtgaccgcacacaagttaattaatggacatatttgtgctgttctccttttttagattttttattttttatgagtgaatttaggagaattaatttcttagctttttgcttggcagagaatgggtggcaccaggaataatcttatcatgttggcatctcaaaaaatggcaacagtacagaacgtaccaacaaaatagtcctgtgtacgtcctacatcaaaattatagcaacaagagagtacggtgtagcaaaaacacagttgtgatattaccccttatggctatagggatcttatatatcccttcatactacataaagttatcacccactaactgtaattatgatcctaaagctcaaatatcaatgctccacatcatcgtcaattctcagccgttggataagtagattagatcggctctaaaccgttggatggaaaaccgcagcatatgatcagattaaacacaacccaacccatctcacacacagccaccatgtgagacccatgtatagcttcgaccacgggaagcccatctcattccatcgcagcccaatttaatagtgagggatatagggttcagtggggtctctgttggaaatttggtcataattcggcatatttttatccaaaatattaagaaaataaacatggcatttgcaatttgagtatatctagtgacagtggtggatgtaaataacttgagcatgcttaatataaaataagcatcaacatagatatgagaacgcaataacattgcgcctgacagtaacaggaaacgaagaatgaacagtaacagtaaaggattgtggcagtattgtctccgttggtattgacgggaacctccttctccttatctctagtgttgttgttgtctccggtgttcaacatgttgatgcagaggaagaacaagagcaggcgaagacgaacaagaacgaacagtaggagcagtcgcgcgcgtagcgctccccaaaaacttgatcgcccgcctacccgtgcaggttctcaagcggacggagttttggaagcatgtacacctgtgcatgcaggtgaacggaaccggagaagcagtagcagcacaagaacaaaggagtaggaggaacctgaagtgcaagagtctgcgggaagaactgatgaactgccatccctctgcggagtttgtatatgagcgagagtaacgttcggatctgtttaattccgtaaccaacgcgctcatgttaacagtgaaatttagtaagcccctaagagaattatcacgtcgccaatagccggattcctgctatattcggttaaggaaattaatatgttaaaaggaatcttatctacaagtgatcgagttcaaggaggatgcggcatggcagtttatctattaattaggcagtatttgttagtttcgttttatctttaggaaagtgtgtttagtgtcctataaggactttatgttctcatttttatcttttaggaaagtttatttcttatcctacgaggactagtatctccacatgggtataaatatgtatatccgtggtcattgtaaaatatatccacgatcaatacaattcggcgcatcgccaccttttaccttttctacctttttatttatcatccggcgggacttagcacctgacgcggggctgcatcggcgttcgatctccggcgaaggggtaagtccaatgttccgttggtccaagcaattgtctcatctacgtcggcatcgttcagggctacatcagtacattcgacctcttggattgctccgatttggatgatatatgtgtctgcctatttatcatatgtcttagttaatttagtcttagtatctcaatttagctctatcggttgtctctcgctttaaggtttctaccggtatcggctaaattgttttactagattagattagccaaggcatctaccaccctaaaaatcagtcaacggcttgattctctagatattgtgtttctttttatacttagtgccgcatcaattaagtttgatctactaagttgtgtttagaccataatccctagcctgctttctgacagccaataagggtttcatcggggtttcagctaatgaggtatctagacgttgcattggcttacaaggattgcatataagttggatttagccgatggtaacaaagatttcaccgtttaatctaatatgtggattttatgacatcggacctccagccgatgtattctttaaccttcagatcaatacttgttctatcatatcattgttagccgattggtttctacttgattatattgctattttattacatcagtatcagccgagcgattgcctctatattgttatttacatcatgtcagaatctacattggatgtatagccgatagctcaaaaccctatcgatatcggctggactacttcatcggcttgtcagtcgatcggctcgatcagctcactggtcttgtcagttgtaggatcaaactgactggcacgcccgcacctcaccaagatttggacctgcactggagctaagcagatctcccaggccagtgtgtatttttcgcatcaacagctcgttaacacgaaatcaatccacggcgatctctgtgtttattgccgtccgttataaaacgagcgagagatagatagatagatagatagatagatagatagatagagagagagagagcagccgccgcctgccttgcctcgccctcatcggctcggctcgcgcgcgcatgtggctatccgctcaccatctcaaccggttaatagagattctccactatctccatatttaagttgaaacctcttcacttagaattccaagatagtattattacccatagcactaatgtgggccaatgaaatttattaggatttgattgggcctagcccattaatgtaacaatccccatcaaatttcatggctcacaggaaatgctcttgattctgatcctgtttgttataccagtgtttcggtggagacagttaagttgaacttccacctaggagaaattctgatcatgtttgttataccagtgaagaagcagtagcagcgcaggaatagaggagtaggaggaacccgaagtgaaagagtctacgggaagaactgatgaactgccatccctctgcagagtttgtatgcgagcaagtgcaagagtctacggcggagtttgtatgcgtgcaagtgcaagagtctacgggaataactgatgaactgccatccctctgcggagttacaaaacaagagagagccgccgccttgccacgccaagtcggcccggctcggcgcgctcgcgcgcgcttatggctgatcgcccaccatctcaaccggtcaacagagactctccactagctccatatttaagttgagacatcttcccttagaattccaaaatggtattagtacccatagcatttaatatgtgctaatggaatttattaggattattgggcctagcccattaatctaacagtctcctcctcccgagtcagagtggcagcggcggttggttctctcggtctctccatcggcggtaggcggggccgtagcgcgcaccacgcgtggtgcagcgctggctaagggtagcgcacaactcgtggctagctctggagcgccgctcatccgttcaggagacagctcggttgcgggagggtttgagcgcgcgcgctatggcgagccctggagcgacgcgccaatggagagacacgtggatgtttgtttctttctcggcgcagatccgtggaatgcctaatgttgagccacctatcaagccatcatgcagttcatgatggattgcaagttatggtctagactcatgaccaggccggtgaggtactttgtataaaagtttataataaagttggggggaaaactctaagaactgtttcaacaactagatcaaaagacgtttacacgaccgctatattcatattttctaaaaaaaccttgaaaacccatgatatattannggnnnnnnnnaaggggaggnnagaagtgatgggnnnnaagatgtgaatagtggagaattccngcccccttnnnnnnnnnnnaaaannatcaggannaaccnnncaattatgctatttcaaggcataagacttgactccgacatagttatgttgtgcctccattctattatggatgactttattcaatttggaacctaataatgattgagtagtgttttgctgttagccatggttctgtccaagcacttctggttgagatatcaaagagagaaacgatatgcaaataatgtgaaaagttttcgatctacggatgtttgcttagggatgttgcaccatgcgtgtgaagcacataaagccaaaggtattgttatattgagatatatataaggttctctctctttttctggttgacagtcatttaataaatatattggttacaacttcaatattgtgtgcattatattccatatctctttatttccttctctataggttttaaccattacatcttgcatggttggctacaatcaattttttatttaatttgtgatttctcatcattgaatatgatcgaagaaataatttataaaagctcttttacccccaaaatgtcacaaatagaacttttatcatgattgcttcttagttcttacaatttccgcaacaacgcacgaggtatcatttagtcatcttgatattaaggatccataattttattgggcagatagacgaaaacttttactggcatgtgatacttaataaataattagcatgtgattaattgagtattaattatgataaatttagaaataaattatttgtaaagaaactttatatattttatcagaaaatacattgtttaatggtacagaaaatatgatctaccactctaaaagactccaatggtggtggtggaccaccactcactatcacatgggtccttgttgcagtgtaccaatcgtatgttcaaaattcaaacaactttagagtgatcaatacccaatatacttatgcataacttctaaattttacatgattctccaagatagcaagtgaccgtcccctccgtaaggaatgaggtctcttaaaaaggtaaatgggttattttttagataaaataaagttttccaactataatatctatattgattaggcacatagtcgaattaaaactgatgtatgtatcaactaacaactctaacatgtcctagtcaaaactcctacgatttagtctataagaagacacatatattttttcttatagctttgctgggtaaaattttgcacttagtcagcatagattttcaaaatatttccaaatatctgaaatttccaaatctcattgtcctcacaaaagaaaagaaagaaacaaagaaaaccaaccaagccaaggatcagccacagaagtgcaaattaacaggcgcgttggcgagagaccagacagaggctagaggggataacggtcgccgaactatcctccatccacgtggcactcacctattggtccacgaatcggcaccgctcatccattctctctctctcacctcttcgctcgccgccggccaccgtcatggccgccgccgccgcagcagcagcagcagccggaggcctcctgcacctgggggcttctcgcgtg

SEQ ID NO: 26252 - DNA, 2634 bp, Oryza sativa
gagttgttacgtgtgcgcaggaggtggagagcgctgttcaggctctggaagcactgggaggtttgcccgatccggtgggtgcacggtgccttttcttttcatttgtattgtctgaattatactagtatttaactaggtaattgttgggtggctagagaatatagcagtagttaatattgaattaacgattttataaggcgaagattttaggtgaggtgcatgcatctcaatagttaacgatctgaatttaattgagaaacaagctgttttgcatcttgatcagtgcaaggtaagcttgagtttcttgctgaaataagttgaagctaaacagagaacttctggagtttgaatcgtaagattatatgataaatatgttacaagtgaagcttgccagttgccattgaagtgattcatagagcatagtagaaagtactttctgctgaacgagctagatggcatcttggacttacggtcagaaactccataaatgtgatgatgttagggtgttacttttacttactatgggaaagtatgttcttatcaaagtttgatatgattggcttatctacaaaattgaacatagctagtgctcccattatcatacatgtatttgacgtagctggaaagtttctatgcaacaaaggctgtcgtcttatctttcatggttcatatgcagaccaactcaagtctaattgaaggtagttggcagctcatatttactacaagaccagggtcggcatcccccattcaggtaaaataccagcagtatgccccactgaaaataatgttcagtctcccatttatctctattattttttggattttcaggccgaccgcatatagataaatgactgattttattcttcattcacattgcctgcagagaacatttgttggagttgactctttcaagatctttcaggaagtataccttagaacagatgatcccagggtgattaatgtagtgaagttttcagaatcaattggtgaactgaaagtagaggtattgattagcctacagtaaacttgcaagagatacactactaggaatgattgaatcaatagtatgacaaaaagagacacatgattagcaaacagaaattctgttgaccactcctgtttgttaatgttgtgcccatggattaacctagccagcacacagcgccagcaactcatcagattgtgccatgactggtctggaacaaagctattggcatgaaccgtgcatgaacagagtccaattcaataataaagtcctcttagtctacatttagcatgactcgtgcagtgcctctggttgtctcgttggttgttcaagtgtggatatgtttgcaggtagagtcttagttgcattacttggggcttgtttgtttgctaccttcaatctgcctgaggattgttttggttggtaccctgagatcctccctgaccaggcaacttcatctaacttccatgaagatcctccgttgcatcacctccatggacaagaaaaacctcacccaatttcagattctcgcaagagcactgctatctcactggtcttcttcgccagcactgaccacacattgctaccctgtcccgaagcacctccacctcagccatctttactgggaagttcgacaggtcacactgatccctgttcaccctttccttgatacctgccaatgagttgtctctgtcaccagtgttctgtctcagccgctgcgtgtaaccagtgaagtgtcaccatgcacctctgggagaagaccatcacactacaggatgcccaacatactgttgcatcctataggaatctgcctacatttgcgaaagggcatgtagcctaatggttgcagtgacctaagtagcaccccaagatcctgggttcaaatatccataggagtgaatttcagattgagttgtttgcggggctaagttcccaatttaaatggctgcatatatccggatggatgtagaggctaggtaaaatattacccttctctaaaaaaaataaaaaaaaaacatactgttgcattcctcttgttagggatacacttagataaatagagtgggtcatcatcagtaacaagttcttccaactagatatctatagcacactctctatttctctagtgatcctctaattgcctattgcttccccattttatagtgtgccctcctccagctccatttcttctcaagccatttaatttatcatctaataaatagtagttatcttgtcgggaacaaaaatcctgacgaccttaagactgatagttctggagggctgggcattatattgaagaacaatatattgtacattgctccgactacttggtaaagccgaaatcagaaacatcattggcatttttatcttttgggagacttcattgtttaattaatccattccatagtaaacatggaataagttggtaagagcagtctcttacactcctaaagagagttgacagaacagtgtgcttattctgtatgaagggggataaatacttctactagtcaactaacttcgattactgctagttgctaaatttatagtgcttttacaatgttctacatgactttatgatgagatttatttaaaatataccaggcagaagcaactattgaagacggaaagcgcattctttttcgttt

SEQ ID NO: 26253 - DNA, 731 bp, Oryza sativa
cctgggttaagcgttccaccgtgagcatagtaccagaacttcgatcgatccggccaattagcggtggccggttcgatacccctctcaagcaagctagcctccatctcctcccacttcggcttcgcgacgctatatccgcctgaccccaagtggtgatggtacttcttcttggcagcattttctttgtttctggccatcatcgcttgcccttgttgccctgtcttgtaagcaacgaactcgtcccaatgatcccttagctttgggaatacgtcgaagttcggtgttagtcccttcaggatgtatttcttgtagagatctcccttgaagctctggaactgttctgccattttcttcagagtccactatttcactaagttatccgtacccgcgggtagcgtgaacgtctcgagcattgtggtccacaacatctctttctctgagttcgggacaaagctgtcatcatccccgcgtgcccttgttctgcgccagtacaccgtgctgacaggcacgttgtccctcacaacccaaccgctgtggcgtacaaaattcttggctgcttctgccggtgcactaggtcagtcgtcttcgtccacctcagttatgatgtgccgaccctctatcttcttcgcggcacctcgttgtccgcgtgccctcttctgtccagcagagggctgacttccactagcctcctttgcatcgttcccctcctcgttcccctccgcatccctctc

SEQ ID NO: 26254 - DNA, 663 bp, Oryza sativa
cttgtgctattaactggataaatgacttaactccctcctttcacttgtcttagatgccgcgatacaagcctgagtatttgttcggtaccgaaggatttgtccaagagttgcgtacgatgtccttcctcataggatttgggattgcccctttgtatgcccagatccctcatgatcgtgatgaagagaagtgccgggtcaaagtcgccttgaacagcaatcgtgaagatattccatcagtaatgttcgaggctggaggaggaagctacattcatgcttgtcaggaggtggcaaggatcgccataggagagctccgtaaaagctacaatgaccggttggccgacaccgagtatcgctaccatcctcgtcaaccctagggaagtgaccgtggcagctaccttgaacctgcggggatcgagaatgatgctaccacaaggcatttggttgagatgctgtgggctaggatgaaacccgcgctgagattgtgatagccgctcaagaccgtgaagaccggaattgcgacaagatttgcaagctagaagacaaggtggatcgtttggagaaggaactagctgcattgaagggagaagcaccaccgcagaaggccagagttcgtcttaccgcaaggaagagagctctattcgtccctcgctaccagttgcaaag

SEQ ID NO: 26255 - DNA, 641 bp, Oryza sativa
agctcggtaccctttggaattggtggtgcaataagttaccggaacttacaaatgtttggacagatcactaaataggtatcttgatcaatgattggatattattgccaattttgatgattttgctattagacatattgctaggcatgataattctcaagtaaatgatttagcacaacaagcatctggctataatgtgaagaggggagtatttttgatattagaagagcaggtgcttgattttaaacctttgtgcgaaattggcaaaattgtagaccagagcggtctgaccggcattgcacggccgttctgaccggtgaccaggggcagtctgaccggccacctcgggcagtctgacaggccttgcacggtcgatctgatcggtgttgggcagagagctggggggcacgatgcaattgattcaaaggccgaattgattataaattcggacatttgtgcccagaaaacagaagaaaattggagaattcctttgattagatatttgaaagatcctacacttaaggttgatcgaaagattcggcggcaagcactcaaatatacattgcttgatgaagatttatatcaccgaaatatagatgaagttctattgaagtgcttagatgatgatcaatctaaagtggcaa

SEQ ID NO: 26256 - DNA, 734 bp, Oryza sativa
tcactatgggcgaattcgagctcggtaccttcgccaccggttttcttctgttgccactgactcgtgttcacttcatcacggctttgcaactttgtcaccatggtggagcaacttcatttttattatcttcggcatcggcaaactctattgcctctacttcgcaaactttgctacttcaccaaccacgacgactacaagagtttcgacacctcggcattcgtcaccaaatatgatgccgtgttattttattacaacaagtggtgttccaaatttcaatatttatctttactcaagcaatgattactcgacgacaagctacagttctcgactctatgttcagttgtttcccaactaaccaaagaatcgggggctacacaaatacaagactctcaaaattcgacaagctttatgtcaagatgaagcaatcaatcaatcaatgagtcaactccaggagtcattatcttcgtctttgcttcggagcagacgttctacttcagcaacttcaattatttcactgacaattttggatgccctatgctgccataatctacttcaagtatcaatcaagcatctgcaaccgctatagcaccaagttctacagccatcttcataaatcaaggggcattgcatcagtcttcattatgcacacgctcgtatcaagaaaattattcgagcttcgatatcttctcaacagtttgatggattattgtcattgacttcatcaccaacacctc

SEQ ID NO: 26257 - DNA, 6209 bp, Oryza sativa
gactactatagggcgaattcgagctcggtacccccactagtaggcatcttcatcttcttcccagctgccttgtctgtcaccgactgattattttgctgccatggctacacaactttatcgctgggcgccttcatcttcattgctggctgacctgactgctgccgactggtttctttgccttcacggtagtgcaacttcatcacttttgattggtatcactatcttcactaccaccaatatttttgccacttctggtggacaatattatctctatattggtcgtcttgtctctatgccaactacgtcagctactatcaatggaccattgtaactacgacagaaggacaagctatatgatcaggggcttactaactcaaacacaagtatcataccttcaatttggacttattccggatacatgcaacatgaatttatgatcacgagtctattttctatgctaaaagactggactatttattattccccataagggttatcaaccgaatacttgcgccagtcgggattcaattattatatctattttggagcatcccataagggataatcacttagatcagaaactattgatatgagctacacttggtctatatcaccccgaagatttactactcggagcatgttatatgcgtcatcctttaaagggtgtcgaaggcatattttttggcctaggcctaatatgtttgcagcccatattttcaggtgtggcctgtcacgttcttttagggacttaggcatctttttgcttaggcaaaagtgcgcgtgattatgtgcccaataccttaaaatccttttataccacagttactcaactttttaggagttggtacaatgcattttaaaaggtgccaaacagtaatgctttatatagctgcccgctgaatttttttatataagtcaaggcgttgtttggattcataaagcaattgattggatacaatatcattgctttttgccacgtaagtgtgcacttttattgaccaatattatggcttaggctgattatatattttggtcattttctaggcggttagtaaatcctttatgagtttatttactcggattttataccacatatgccatatatttctaggtgtggtggaaccatgtgtcttctagggacttaagcacatctgttaaaacagtgtgcgcatggcgtatgcccaatactttggaaatttctttattcacaacatacaagcttctttatagctgttttgctatgtgaattttcaatgatgtagctaactttaggttacacttatcatatcttacaaagcagtcggtatatcactcggatcatgttatttagggattcacaccgcatatgctacatgttaatatcaagtcgcttgtttgactataattatcaaaaccactcggttggttggattatttattccttgactatatgcttggtttgttcaattaaccacatagtcggggctacacctattaggtgcatttagtcgatgcacctgactttatttttcagccctccacagtcttcatatttggtaaaagtactcgggagaccatggcgaagatgattgaagcactcggttttggggtaatctagttcgagagaagattatcttttcgactgtgaaggtctcaggggctactgtggagattatgggtaccccatacccacacggcgtggttatctgactagttataggggataacttatatctatggaatatgtaacagatcatgacttgggtattacgtttcctttatattacggaacggtctaaagtcctagtttaataatattgtaaagtagatttaggaaaccgataccatattggttaaggtttctatcatgtaatcctgccccccatcctatataaggtgggcaggagtccctctaggggtatgagacaatctgatcgtcagataataaacacccggtggattcaattccccaaacaggaatagggtattacctctcattgagagggtctgaacctgtctaaatccctgtctctgcatccatccacttttaggtctcgtacgctacctccttttcatattgccgaaaatttgtttcgacaaaaacacaatcagtaatctttttcagcaaaaggtcatcggcagttttgatgcactgcacagagctaaaagtcgttgaaactactcctctgtaccagatatctaaccaaaatcttttatattttagatcggatggagtatattggcataccgtgtgcccatggcttcgtttcaccggcctttcgtggaaggatagtgtgatcgctgccatttttgcattttgcagttgcaacgtcggtctcacagtcgtcccgctatatcgttgttgacgttgctggatgactactatagctacatccatctgtgcagagtaattggtaatttaaatgcctactatatattataacgcacaaacctctaaagtttggtggacgtgaacatgtttacacctgataattaccgtgttaatacgacctcagtagacaacaacttaaacaaaaaaaaagattatgataatagtgaaaacctagaaggtacaatcgaaaccttcgtatttgttgacacttgagcaatttctccactcctaaatactccctctatctacttttgatagttatatttctaaatctgaaaattttatttttgataggcatatttcaatccaacaacctatcatcttaatgactttctcggatttaatgcgtgactctttattcttccacacaagatttgctacatgggtatcgagaaatgtaaatattaatgaatcgcttgtttacgagaaataactagtcgcatatttaaatagatgataagtagaattacttatccttggtctgtgtgccaagatgaaatatgacttttaaaaatagatggagggagtatatctccacctatatagactaaaaaggagaaaaagaaagaaagaaaagaaacccatttcgattcccaaaattttcccatggaccatggttcaattcgtggcaacttaaccatgaagataggaaacatggaagggctactattattatactcaccgtggatcgaccataaaatccacggagagcgggagagcgcaggggttgtctcgcgctagcgcactcccatctcctcgtctcacctcatcttctcggcgctaataaaaagggaccctgagacttctccgtctcaggtcaaggcgacccgacgacgtgacgagagaatctctcctctctctctctctcgctctcgcgtgaggaatcctcgtccgtcccggtcccacgctctctcgctcgctcgctgacgtgcgggacccaccggtgctgctccgccagtccgcgtgccatccgcgggagccgcgaccgcgaccgcgaccgcgaccgctggcttccaccccaagccccccctccccaacccgtaaacccctccagcagcagaggcctttgcagttgcttcgccttctccatctctctgcttcttttgtttgtttttctttcccatctactccgctcctccgccgttgcctccccggctcgccgtcaccgggagacgcgaggtgaattccgctcatctccagtcccttctcttattttcttgcgatgatcttgcggtgttgcagaaaatagtttaaaacctgcgcctgttttcatctcatcctcctctcttgtggtttcttgatgagcgcaggcattgcttcttctcccatgcgccgccgcaatctcatctctctgttttttttttctgttttctgtttgcaaggtcctgacctttttcaaaggcgcgaaagattgtgtttttcatcgtcttggggggtgtcttctgtgatgtgctttcaagaaaccctcttctggtttcttgctccacggcggcggtttgagtctccgtctcactgataatccgatttggagcgcgattgcgattttggaggggtgaatgggtgcggccggggctgttgttgagatcagttcggacgacgaggcgattcctgttgctgccaagcgtcccaacgttcctcccgtgtcgtcttcacatcctctacctgaagactgcaacggagttgaggagggtttaggtgatcctgctgccttggtggaattcgtggcatctatgctggatgacaaaaggtctgcgcgtgatgtggctgctgctgatgatggggacgacgacgattgcgtgatgctagatggtgaccctgataaagcggtcctcgttgtcaatgagcagagacctgggcaaggtggcccagaggaagaactgcagatagtttcagagaaaggagaggtaccagtactttcttgcttatttccatttaatttttctagttgcacttcagaccgtacattgtcttcgtggtggtaagtcaattcaaggcctgtttagatccatttggaatggcaaatggcaaatgttttggcattgcaaaagtactagttggtgtttagatgcatgttaaagttttgccattctagcactaaagtgagagagagaaagagagagggagtggtcccaaagcactttttggcacaatttgctactatggactagcaaatgccaaatgccaaattgccaacttttgctactagtgtttagatccaaaatggcaaaaagtgctataaaatggcaaaacttttgccattttggaggatctaaacaaggcctcaaattgaaattttcaactagtatatgcataaccatcgttgtcttatggggtgtttgggagagaggggctaaacccctttgtcgactagctattgacatggcgggtcctaatctctattaacatcttggactcgtcgaatgtagctaatctatgcacaactgtggttcatttatgtaggagtttatttaaggttaagtcaaactttatttgttagcacaaattaatttcaatgttttagatcttggttttgttaaaacctcttcttttataaacatcaaatctgcatgatcgtatatcctgttgttaatcacttgtgcaacactcttattgatttatctggtccgttttattgaatttgtatgcataccaaactcatactgaagatggagcttttgtggaaggtagtactatagttgagtgatcgttttgccttgctgatgtatatcattgggggccttgtctgagtttccatgcacttattatattgtaactaagatggctgcaagtggtgtccatattactatatagtggtctctaactggacaatattgtactttcatgtcagatctttttgtcctgggtattggtcttcgaaacatattatattgttcttgtagaagctaactgatgaattatcaataacatgaaaacctaacttagaactgattaatcgttcctaacccaaggagttgctgatgctgcagtcattgctatggcaatatatgctttcctttcatcatctctatcgaatgttatactttcttagcattcttgattcatctaaaagctcagatgttacaggagagtatatgtaacctgacaatttccccccttttccttttttcagatagcatgcagggatttccctcatccacgccatctatgtgttagcatgccattcacaagttctcatgcagatcattgtgccatggtcagtaatcaatccctaccctcttcatattatgaaatgatatttcttggttcatataaaagtatatagtcaatagtacttactccgtttgtattttaatgtatgacaccgatgactttttgaacaacctttaaccatttgtcttattcaaaatttttgtgcaaatataaaaatatttatgtcatgcttaaagaatatttaatgataaatcaagtcacaattaaacaaatgataatcacatagtaatttttttaaataagacaaatggtcaaacgtatctcaaaaagtcaacggggtcatacattaaaatacggagggaatagtacatattacttacagttccatcactgatgcattggcatgaccttgcttatttcttcttccaaatataaatgcagtgccactgttatgtttgcgactctcctgctccctgtgccttttggggcaaaggtacagagcctactgatcattgtcatgctacggacaagaatgcaaaatggacgaaaatgaggcagtcattgaagcgcaaaaacctgccatcatctaaccgtagaggtatcaagaatcattttcagccaatctcagcaacagcatccttgcagttgcagcaatatacaggggatc

SEQ ID NO: 26258 - DNA, 1041 bp, Oryza sativa
gccacggggtggcgtggtattccccgggagaggttgtgtggcacacgttacacgtgtgatgggcatatattaaaatttccgttctggctgtcctactgttctagcagcagtatgggaagcctggttggatgatacaaatttacacacaccaccgtctttagctgtttctttcaactaaatgttgctgttgtttcctttgtgtatgttttggtgaatgtttctgcattttgagtccatttctctatataccacttgccttgcctgctatgactatctgaattttctgtttttgattcatttagcatatacctttctgccttaaatcataggtgcttatcgattttagaatggaacatcaaatattgagtattgaacatcaaatagggctcgctacttgatgtggcaacttcacattgaagactctgttttctgtcatcaggtcggtaaccgcatcatcaggaagaggatccatgtccgtgtggagcatgtccagccatccaggtgcaccgaggagctccgcctgaggaaaatcaagaacgatcagctcaaggctgatgccaaggcccgtggtgaggttatcagcaccaagagacagcccgagggacccaaacctggtttcatggttgagggtgctacgctggagactgttacccccattccgtatgatgtggtcaatgatctcaagggtggttactagaatgcttgtttcttgaactggagaatccaattagcgtctatgcttatcggaatgttttggtactgattagccctttttgttgtctggaatctgaacctctatgtggttaacattaaagatttgctatggttgaattcatcctcgttatggtattgcctaattcgcgatattgtcttgttcgctgttgattcgattcagaattgcggcgaatgatgccatgccattttgcatttcaaggctccatttgctcgtagttagtaatgccctgaataatggtgaaaatgtttgtagtgatggtctgatggatcaacccactttttgaatggaaaaacgttctgatcact

SEQ ID NO: 26259 - DNA, 569 bp, Oryza sativa
ctccagacatttccgtcgcgactttacacgaaagaatattcccaaatacagaaaatgtgtcatagagagctttgttatctattgacttgtcaagattctgttaacaacataaactgatgtcaaaagagatattctttgttggctatctatgaaatgaatacataatatgaatgtgctaccttaataaatatgtttgctgctccacttttacgtgagctggggtcacggttagaatacattatcctgataggcttcccgttaataggagtgaagttcagcatttccaatgcccttgcagctgcaacagattttaaagtaagaaaagaagcaagttgcaattctagtttgataaacaatcagaacttgtttgccaaattaatgtacatcatgtgattgaaatatattatcagaagcagaacacatatctaacttaacagttacagaagagcaaactctcacaagaacttcagaggcaaatgacaagccatgcttacaaaattttggaaccaattaaaagtaacttgattatgtcgaatactatggaaggacctttcacatcaacgatcccc

SEQ ID NO: 26260 - DNA, 16691 bp, Oryza sativa
  unsure (1)..(16691): unsure at all n locations
gacttatcttcatgcacaagctgccgattggcttggattgtggctttgatgtccttgcgctcccgacgttcggctagtcttagcttagctttctccagcttgaattgatgctgctcaagatagacagctggggtaaggatatcggctaactcatctgggattagagcttggatctcatgtagccgagtcctaatcggcccacagtttaccaccaagttgtccagtgatgatgcctctacccgatgagagatatctttaagcgttttcttcacatcattggataagggggctagggctttgctcgaagtatcatcttctgcctcattaagataatctctaatgtcaaaagagaagagatcggctaaaacctgcagaaacaatttaggaagattgagagctaagtagatatagccgatctaatttcttgcatcaaggggaaacttactgggatagcaggagcagttggttgtacttcttcctcaatatggtgactctccactgctgatggagattgctgtacaaaaggagaaggaggaggaggaggctgtaaaagaaataagtgttaggcaaaatcgactgaaatcaactaataaaaattaagaatgtcttactggtggagccggtttgagaattgttgctgccgatttcttctttgcagcagttttcttcttctgtaactataaagtctgtgagcaatcggccgaaaagagaaatgatcataaaagagatcaaagaggaaattgcttacccttgaaaaatgggctggagcagacggagttggaggagtttgcttaggagaagctgatggagttccctcgctgtcacttacttcatctgtggcttgatcaacatcttcgccgatttcttcttcatccagagcttgttcaatagatggctctagggcaggcaaatcattagttggtgtaggcttctttagtttggccttcttctttggagcaggagctgatacatctacagtcgatgatctggtccttttctttttgccagcatcggctggttctctgatgagtccttgaagaagagttgaagtcttgggggcatgaaagccgatgacagggggagatggtccgcctccattaggaattagacccggagcatatttgatatttctaccactattgctctggtgaggaggagaagattctgttgtctacagatcaaaagaaaatttgtcaagttatgaatcggctgagcaattatttacacaaaattaaatcaagacatacctgagggataacgtctggaaagagatctgtcatatacatggaggccgattgatgcaataggtgcagtttccattcgccccaccatctgtcaaatgttttgctcctgaaggttgccagctcaatgttttcaatacttcctagaggggatccttggagatttagcagccgatccatcatcggggttatgagatttctcctcggcattggatcttatcagcgaagaacaagctgattgggagctgacccattcccaattgtctgccgagctcattgggtgatagaactcataagagaccttgatatttcttccttgatgaatgccgacaggaaggatacatgggctgattgcagctgaaaagacttctctagacttttggtatctttcatgggtgatatcctcgaatctaaagtctgatggattttccagaagtgctgaatcttcatagagaaaccaaattcgagtttctttgagaaagccatcagataagctgcagaaccagtccttgagcagttcggccgagagttttgctcctgcatcggttggtgtggaggcgtattctccataagatgtgcacctacgatgggtgcgttcctctccatcatcgtctacgattggctccagtcttgggaattcggcttctgttatagatggccgattgacaaacttcatgacaattaaattcagccaagattgtaataaccaccatggtccacctgctccaactactgagccgacgactatcttagccgatgcattgttcatcatttggtacaagtagccaaggaggatcttgcctaaggggaattgtctttttgattccaaggcttcggctacaaactgccagttggtcgtagggccgcagcttgatctacagaagagaaatttctccagccacattagaagaaaggctacatgctctcggggggttaccgaaccttggcccatatatgctgccacgtagcctgaccaactacctatgcttttggtcctgaagtcatactggttcttcgtgttcaaactcatggggttagccgatgaggtaacatccaaaccggtgatcatggtgatgtctactagagttggggtcatcggccattgattgaacaagaaggcattaatggtgttggaccaaaaataagaagcggctgccattaaggtctcgtccttaggtgagttggctatggttaggtcaagtgcttggccgattccgatttcgtcccaatgaactcttttgctagccgacatgcgcttgaaccatgtgatccaacttttctcgggtggagttttctcgagagatggccaggatttgaaagtgtttttccagtgacctagatctgggttggccaatctgaagggaatcctattggtttcaccaatgatgaactcggtaggatcagggttgccgactggaccgagaaagtagtaattttcgtgcgacaagcttgaaattgcactaggttggaaagatgctacaaatccaaaagaactgagaaggggaaaacaggatgaggggctagaagatcgatctaatgtgaagaaaagaaatctggccgatgagaacttacctcagcgtactcagccaacggcgtggcatacgggctggcggaagacgacatcgctgcaggcggagatctaattggagatgaagtcgcctagggatcgccttatgcgtcggagaaatcgtcgaagagagagaagacaaagttagcttcggcggtgaaaacgcaagaagacggtatgaggtttctcgggggcaacgattagtatttaaagcgctggagtaacggttagaaaacggcaagagcgaattttgctcgaaatcgatatatggcaaatccgaaacattaccaaatattccggacttggggggcatgtgttaacaaccaaatttggcaatatcagcatcggggatgaagattagatcggggtggaatcgaagacgaagatcgattcgggaacagagtaagagtccgagtcagactgggtcaggtggtacagccgattccgacaatacgacttggtgtatgacatcgggttgagttgatatgcttcaaggtgattgccacgcatggatagagtcctgagaaggcaattatatctattaattaggatattttatgtaacttccttagagatatgtttgggcaaaagtctgccgtaaagacttatggtatcttagagtttgttggagataagagtcgtgtccgttatggacattatttgtaatattcgggtatatatagaccccgaatcccatgtaatcaattaacacacacgttcaatacaatttcggcgcatcgccaccctttttgctttagtttatttcgacgagttcttgctttcgggttgagctgcatcggttttgatcttcagcaagaggtaaaatttgttatgatggcttgcgttctcgggattagtgcttccatcattatgatactctaatcttgtctatgtaattcgtcgagttatcatatatcttatataatctctggcaatatcgttatctaacctacaatcggctaatatctatcaatagagggctgccgattaggttaaatattgatgttgatttagattatatacgatatccatcactctatgaaatttccaatggcttgattgtctagacattgtctttcttctcatacttatagctgcatcagttgtttgatcttatgagtcgtgattagaatctcaatctctagcctgcctcttgcttgccgattagggtagtatcggggtttcagccgatcttatctgatttaactacatttgctctatatgttttattgacatgttaaatctgccctatatgtcaagatcttattgcatctaagtatattaagcttttgtttggtgtattctgcttgttttaatatcttaacatagagttgtatcagagtattagccgatacatgctagatctatctgatcggctatgctatgaacatatatagtcttgttgttaatatatatttcgatctaagtgatttatactgtctcggtatggcgaccgatctatcccaatcacttgatttaagtatatatcgacacaaggaatatatattgttaatatctacagccgatcgagtagatttagttctttattatctatttataactgccgatcgatttacatatgacatcggatcgaagataaatgatatgtcatcggtatctagtcaatcggctatcatttatggatttaaccacggtttctttgcctttatttcttgttgattgcaggatcaaatcaactggcatgctagcatacccgaaggcgagttttggacctgcactggagttaagcaaatctcccaggcctcgtgtttttcatcaatagtgacccctaggatatcgcagggattgtccccgagctgagccatcgtggccaagggctagaagctctcaatcagttcatgcggatctcgctctcctttttatggagggccacgtgtcgacccaaggttgtcctacttcatgttaagtagtagctgactttaagattttaagctttactgatttcatttgcgatttttgctccgacaaccttaactccttctcctccagctccggtgaccagtgacggccgaacgagttagggtttagggtcctaggttggtgggaggggagagggtagatgagggagattggtggagtgattgcaatgagaggcaatggcctgacagtggacacgggcgggagacgaagtgctggcggaggcatctatgccgtgaaggatggaggggcggtggggtggcggtagcggtagggacaaagcgaagaggtggttaggaggcagtggacaagggtggtggatctagtggtgcgaagccacaagagacaagggagacgatagggtgggggcacctgaccgctgcgggcttgaggaggaggaggaggcttgctgggggacctcgttggcgttgttgatgcattcactactacagaaagggtaaaaagtgccggttgggaaaccctaataggtgccagttttcccaactggcacaaaggaggcagcactgatgatacttgtcatcagtgccggttttagaactggcacctattaggtaataggtgccggttttgaggttaaaagcagcacctatatgtactaataggtgcatgttttaagacaaagagtcacgtggctgtcaaataggtactggttttgacctcaaaaccggcacctgtatggtcctaataggtgccggttctaagccaaagagccacgtggctgtcaaataggtgccctttttaggttaaaaccggcacctatatggtcctaataggtgctggttctaacctaaaaactggcacctacttgttgggtaaaaaaaaattacagtaaattcatccatacaactccaattccatataaacccaaattcatccctacagccccacatccatacaacacattcattcacattcacattcagattcacattcacgttcacaacaaataaaacattcacattcagattaacattcacattcacaacaaataaaaacctacaagactaagtcaaaattcggtaagtctaaaaattcgtaagtctaaaaattcctatctttaaatcctagaacatttgcatatatatcttgacggctgttttggtactctcctattcctacattttggtgcacatgtgatgggtatagccattttccagatgggccattcaaggtgagatatggaaactgaaccttctgatcttcatcaaaggttcagttccctctaatcctcatttcaaatggcacatataaatatggtcctagctgctaaaacccaacactagctgccaatctgttcatgtgctgcccaactaaagtattccatcaagcaatcaacctgaaggtgagatattggagaaaaacaatctgaatattaattgtttgccacactgttgcaagcatcaaccagcaatcagtttgttttcctccaattctcacttccagtgcctgaacaagcacagcatatccaacactgaagctagtaactactctgaagcgctagaaattgtaaagcagttgggttcaggacttcaggtagagagagatttatagccgtggttgatagaacacaaatcattcagattcagcagcagcagcaacagaagcatctgtttctgttacacctgcccttcatgccaattgtgtgttgtctgtgatgaagaacctttctactcccattttcagaggactagcagtacaggtaatggccaaaaaaaaaaacaaaagcagcttcagaatgtgatgggtgcatagtggctagtcactagtgacatgactgccctacacataggtgccagttttgggtctaaaaccagcacatttctcttacacaggttttaggtgtcggttttatttaaaaaatgacacatatttggacattaaggtaccggttttaaatatttggcgagtggggctaggtacatgggtggaaaatacattatactattataggtgtcggttttagattttccggcacctatagtgacgacacatatttatcttttttaatagtgattttggccagccagcgaggtcgggtgttggtgcgctggagtgctggatgtaggagggtgcagcggcacactaggcgagatctagagaacttcaatgaaatcgatgtgcatcggtcggtgggggtgagagcataaggtggaatcactaagcaacacagatcttaaagtaactagcatggtggtcagcgtagatttcgcggctagcatcattatattttctctcatataatagcatatatgttttctcattatattattaatatatattaaaatgacaacataattttaaattttgcaataactttacaaaactactaaagtgtaatattcatattgtattttatatacgtgttagttattaattatttttaatatcaaattttagttatttgtaaattatatatattcctatatggactctagacttgtctttaaatttttgtttaattccgaattttctgtaaattgtatttctatatagactttaggctcttcttccaatattatttatttttatttctgaatttttattatttctaattgtatttctatgtgggctctaaactcatctttcaatattctttaatttttaatttcgaatttcagttagttctaaattgtattcctatattgactttaaactcttcttcctatgtttttcttaattttgaattttagttatttgtaaattgtatttttatacagactctaaaatctacttttaattttattatgtttattccgaattttagttagttttaaatttctatatggactctatactctacttctaatattccttatttttaattctaaatttctattatttcctaattgtatttctatatggactctatactctacttctaatagtccttattttaattctgaatctcagttatttcctacttgtatttctatatggactctagtctccttttctaatattctttactttttaattctgaatttcaactatttctaaattgtattttgatatggactctagtctcttcttctaatattccttattttttaattccgaatttcagctatttctaaattgtatttctatacggactctgctttttctttttttcgattaatgtgagaatttctaggccgtatttctatatggactctgttttttttctttttctccgattaatgtgagaatttctaggccatgagagcgaacatggaggctcatttttctattcctttaataatataatagatagacagattagacggtccgtgatatgcaagattctaggtttttttgtgtgagatgatatttagacagtcccttaatcaaaatttgacaaagagtcgaacataggaccactggttgtcttggtcgaaatcacataccgaggacacataccaagggcctgtttaaatcacacctaatgtttttacaacatttcacatcaaacgtttgaacacctgcataaatttataaatatagacttaaaaaataactaattgcataaattatgaataatttgcgagatgaatctttttttggagaattacacagtacaacttagacactcacaatgcgcgcatactcacccatatgaacgcacgcacgcaaatcctacccctatgagcatattcaaagactggccggcaaatcctggaaaattctctctcggtagagacgaatctttcaagactaactgctccatgatttaacaatatggtgctacagtaaatattttctaatgacagattaattaggcttaataaattcgtctcgcgatttaccgagatattctgtaattagtttttttattagtaccgaacaccctatataatatccgatatgacacgctaaaactttagaccctgatctaaacaccccctgacatatctctgtcactacgggcgaaaagtccagttagatgtccaagatcagtacgtaagtgaggactgaagacctaacaccatcgacacatcaattagttctgattgattttaccaacgaaatgacttgaaagtatgccgcgccttccgtctcctctgtggtgtgtgcgacttgtgagagacatccagcgccagtggtaaagttcggccattattatatcaaaagacccgcccatatatgaaggcggcatttgcgtttgtgatgcttgcctgaatctctaccttacgcccatgcatgcaaccatgttaaagagatcggtgcttccgagtatggcagagcccgggcaccttgcccagctgagcgctctcacgacgacggtgatcacctgcctgattctcatcaccccaacaccagccgccgcgtcgggcgcgagctgcgtcgcgagcgagagggacgccctggccgccttcagagcgagcctcctggaccccgcgggccgcctcgcgacatggagcgggcacagctgctgccggtggcgcggggttcactgcgacggctcgaccgggcacgtcgtcaagctcgacctgcgcaacgacctcaccgtccacagtgacaccgactggatcttgttctacgaggtccgggttgacatcgacagtagctgggtacacagcgcgttggccttgcgaaatacaggtgagatgatctcctccttggctgctctgcaccatctgaggtacctagatctgagctggaacaacttcaacgactcgagcatacctctgttcatggctgacctgaagaacctgaggtacctgaacctctcagggccgagcttttcggggagaattcctccacagcctgggaacctgtccaatttgcagtatcttgatctctcatatggacctactccctccgtttcaaaatgtttgacaccgttaatcttttaacacatgtttgaccattcgtcttattcaaaaaaaaattgtgaaatatgtaaaactatatgtgtacatgaaagtatattcaacaataaatcaaataatatgaaaagaataaataattacttaaattttttgaataagacgaatggtcaaacacatactaaaaagtcaacggtgtcaaacattttgaaacggagggagtactatttcttcagacctgtcatggttgctagggctgtcatctttgaggcatcttgacatgagttgggtggatcttagtgccgtcagggactgggtccataccgtcaacacgctctcttccctgaaagttcttcgcttgaggggctgtaaacttgagagtgccatctctaccatgtcacatttcaacctcacacgtcttgaggtcctcgatctttcagtcaacaaattcaatgcttcgattcagcagaaatggctttgggatcacaaaggcatcaaggagctctatctgacagaaggccattggtttgggtccattccggacgcatttggtaacatgtctgcacttcaggttatggatcttggccacaacaacctaatggggaccataccgacaaccctgcagcatctgtgtgatctgcaggttgttagcctatatgacaactatattgatggggacgcaacagaattcatggagagattaccgaggtgttcatggaataagttgcgagagatggacctgcattctacgaatttgagcggtgagctgccggtttggataggaaagttgagcagcctggattttgttgatctctcacacaacacactgactggtgagctgcctgtgggttttggagcacttagaaacatgatttacctaaatctcggttggaataatttcaccggacagatttccgaggagcatttttcaagtttactgaacttaaaatatttgtacctctctgggaactctttcaagcagatggtcttcgaggaagattggattcctccattcagactgaaggtagcacatttgcggtcgtgtcgattaggtcccaagttcccatcatggctaaaatggcaaactgaaatcagggtgcttgatgtctcaggcacgtgcataagtgattctttgcctgtttggtttaagaccgttttttctcaagcttactcactgaacttgtcggacaatcagttatgtggtaccttacccagaactccagaggatatgttggcaatggtgatggatcttgggtccaacaatttgacaggtcaagttccacgcttccctgtaaacatcacctactttgatctctcaaataattctttgtccgggccactaccatctgatcttggagctcccaggttagaggagctgcgtctttacagcaattacatcacaggcaccatccctgcttatttctgccagttgcgtcgattggtatctttgtatctgtcaagcaatcacctgacaggagaattcccacaatgttcagataactacaaagcactaccaccggatgatctggatccgttcttctcgccttattttggcgccgcatgtctacaatagacctgagcaacaatagcctcacaggcccattcccacagtttcttgaaaataccacatatttgcgttttcttgatctctcacacaacattttttctgggaagctgccaacatggatagcaaagagaattccgtactcacggtttttgcggttacagtcgaatatgttttctggccacattccagaggaattaaccaactcttttggccttcattatttggaccttgcaaacaacaacatatcaggaataatacctcaatctctagcaggcatgaaggccatgaggcgcactactccggatgggaacaggggcgatgtctacgagggcagcatatcatcgttcaccaaaagccaagagcttcactacaccttcagcaactacaatctggtcgtcctcctcgatctgtcaggcaacagcttgacaggacagattccagaggagatatcactgctccttgggctcaagagcctgaatctctccggcaaccacttgggtggaaagattccgaacacgatcggcgatttgaaggggttggagtcactggatctctctcgcaacaggttgtccggtgaaataccgtcaagtttgtcggaattaacttccttcagctggctgaacctgtcctacaacaatttgtcggggagaataccatcagggcatcaactacagacactcaatgaccaagagtacatctacatcggcaatcctggcctttgcggccctcctctccgcaagaattgtgcaatgagaggaagacacgatgaagttgacgatgtgtcagatgatttagcagtcctgtatcttggtatgagcatagggttcgtagtgtctctctggttggtgttttgcactttgctgttcaggaaataatggagaatcgcatactttgtgctctttcataggctatgtgacaacatatttgtgcaggtggcgtgcaagctgggcaataagtcgagtgttacaggtcccaagaacaatacttaagatcaactgataggaaacttgggagtcattaatatatgatgttttggacaagtaaatgaacctaagttgtttgtcctagcaacaagtatcttttggacaagagtatgctgcaaatcggttgtcatttcctccttttttttgtgtgttttccttttggggaaacttatacacggtactgtagatgcttcagctactttatatcaagccatgtacttctgcaacacagtttttgcgtgcacttaccccctcatgttgttccatttgctaaatacatattaaatctatgatcccaatttctactaacaatatattcagatttaggttagttttctaatagaacttcaagtcttcccacattagaagtcttatcttttatctccgatatatatctcttgtaaactgcataagaacggtgatattccattattattccctacatttgtagccaaattctcaatagtgatcattgttgtttggcgcttgtggtttttcccgccagaggttttcatgtaaaaattcgtgtctccttaattttgcgcgtttggagatctaatgcccagccactggcgcttttgtccttgggcgaatccatctgtctgaactacggtaggtgcacatcatcgatctgttggccactgttaggggcgcaactgccaccaaccgtgagccacctctaggttagattgtgcctgctccaccatagttccaacgggagccacaactttaaattctaaacctacataacccaataaactagtctaacagatgagtattgtttgtcatacatcgggcctaacaatatcctccgtcatatcaacacatctaaccctgaatatttatttcagtgccaagcctacaatctcacatgtcgcatcaaagcccatgcgatcggagacacttgttaccaagctctcctaccatgcgacctagggctctaatatggcttattagctggatttttcacattttagtccttttgaaaaacttatttcgcaaatagacccctggaaaaacttatcccagaaatggtcctttttggggcatcagagtggctggcgccgttgtccaacaggacggaaccagcttttctggcaccgtccccctgccgacgtggcggggcgatgctgaggtggctagggggagcgccagagtggctggcgccctcctccctcccccccctcgaaattttttatttttcttttatttttttgatatttttttcacgcttagggatacacaagaaccaaccatagaaaaaataaactcaaatggacgtaatatgtaacctgtagaatttttcctcttctctcctctctctccgaactagtgcagaggagagagatgtgcaacttttttatttttattttatttttttgatatttttttcacactcaggaactcaaaagaaccaatcatttaaaaaataaacccaaacggacaaaatatgtggtctgtggaattttccaaagctctaccaaaaaacttctctcctcgaaaacacaatcttgaaagctgaatttggaggttttaatattggctaagccaggaagaatcggatgtaactttttctgtagatatccgtggatatattatttgtctgattctgagtccgtatgagaaagttacgcctattttaataaatgatatattttgtccgtttcgctagagctttggaaaattctacatgtcacatattttgtccgtttgagtttattttttctatggttggtttctatgttctcctaagtatgaaaaaaatatcaaaaaaataaaataaaaataaaaaaattgcatctctctgtactgtttaacttataaacttatagctatcatttcatgtggttatattttgaattagattaagtaatttcatatagtggtagagtgcattatgtttaacatgctgatcaaagggttttactaaaggagttatggtctaattttggtgaaggtgcaaattaggctaagtggtatgctagctatattcagacttagctaagtggtagttcgagtttaaattttttttgtggtgggttgtatcgtgatcctaagtgtgaaaaaacattcaaaaaataaaacaaaaatgacaccgttgcaacttcatacagagaaacaggaatanaggcgaggggtgggttgggggatgacgcgccctcctccctggggcggcgccagccatacaggcgccctcctcctaccacgtcggttcgagtgtgccacagtggcaggaggtcggcgcctggcacgtccccgttgaagnacggcgccagccactctaacgccccaaaaaggaccatttctggaataagtttttctaggggtctatntgcgaaatagtttttcaaaagacccaaaatgtgaaaatcccagggcttattagagtgcaaacctatgctttaatacatgtaattagagcgcacagtcctacccaccaaccttaggcttgctccaccttagactcaactagagccataactttaggtgatggatctacacaacataaaatatagtctgatgagtgatgatagccctaacattttaaatcgtgctctttcatcataatttttcaatgtgggacaaaaaccaatatctgcttggtgcagctaacctgaaatgatgtcggatctccaggctctattacataaatgatttttttgggcgaaccccctctaacttgcaggtgggttataacattgtctgcctatgataattttgccccaggaggaagataaggccaacggacctcttaatagacccacctgtgaaaataggtttattttcacaggcgaacatattaagaggtctgcctggcacccagccggctgccccatccgcttcctctcttttattttctcatctcttaaaatatctctccccactccactcctcacccccttctcccccgtcccctcctcccctacctccaccgcagccatggcgacgggagctgccctgcgacaggtggatctagcactagctaatgaggtgatgacaacgttggcggcaagccgcacggtggcggatccctggccccggccccaagaggggtggatctagtggtgctggcctcgagagcggcggatccaactccacagacctcggcgatgatgacaacaatgacaacggtggctagggtggcgacgacaatggcagcaagctgcgtgagggcagatctggcggcgctagactcgagactagcggatccccctctgcgggcctcagcgacgacgacaacgatgatgccaatggcaccaatggctagggcgacgacgaagaccgtggcaagctgtgcgagggcagatccggcgggactggtctcgggagcggccgatggtgatgagcgtgtcgatcgacgggtgcctgtgctccgccttgtcgcgcctcgggtcctcctccaccaccgacgacctcaggatgcgggttacagttttggggatgcggtgcggcggtggcaggcatgcgggctagggtttcacaatttttcagaattttattttattttttgacaaaattctagtgcaggttggcggcttaacatgcctgcctgctaaaaacaatttttgcatgagggcgtggtgcccgcatgtggaaatcttcatttttaatacacgtagttgcaggcgagtggagccgtgcctgcgaaaattgaagatagccacatgtaaaaaacattttttattagtaggaccagcgcgaaggagaaaaaatctatgcacatagtctacaatacggatggatatcaagctggctcgacctgatctggctttaatttgatttgttatcctaaagaaacatagcttggctcgacttgcttaccagcttgtttagcttgcgagctagcacattaataacatgacggcagtagcgtatgtgctcgctcctcatactccaatgccccggcatcgccatcttactcgtcgagccctccaatgctcacacgacccggacgaaggatggcggcttatgactggaaggagagatcgagaaggggacaacagtaggcggcggcgttgcacacgcacaaccggagagactagaggggggaggcactagctaggcggcgtgtggagcgccgacgctgcacatcgccgcattgcatgctcaagcgcgagtgcgcgactactgcttggtcgaccactatgagctgatgtgcatgtggctgcgtcgccgttgtgttgtggttccggcttaggctgtgttcttctcccatttttctaacccatctctctcctttccacgcgcatatttttcaaactgctaaacgatatgatttatgcaaaaactttttaatatgaaagttatgttaaaaaaatttattaaaataatcatattaatccaacccctccactagaattttgtggcctgagggagatgtacggctttactgtgttggtgtgggacttatatggcctaggaaaaagtacaccgaaggtccctcgacttatcatcgattttaaaaatcgttccccaaccgcaaaaccaggtatccagcatcactcaactaaccaaaaccggtgacaataggtccttaggtggttttgaccccggttttgtcctacg

SEQ ID NO: 26261 - DNA, 1805 bp, Oryza sativa
ccgccgagatgtctcgtcggtacgacagccgcatgacgatcttctcgccggaggggcggctctaccaggtgcagtacgcgatggaggcgatcgggaacgccgggtcggccctctgcgtcctggcggccgatggcgtggtcctcgtcggtgagaagaaggtcacctccaagctcctccagacctcgtgctccgccgagaagatgtacaagattgactcccacctcgcctgcgcagtcgccgggatcatgtccgatgccaacatcctcttcaacaccggccgcctccacgcccagcgttacatcctctcctaccaggagcccatccccgtcgagcagctcatccaatccctctgtcacaccaagcaagggtacacccaattcggcggcctccgccccttcggcgtctccttccttttcggcaggtgggacaagcaccatggcttccagctctacatgagcgaccctactacagtggctggaaggccgccgccgtcggggccaacagccaggcgacgaagtccatgctcaagcagctccttcccctaccgtcgccgcgtcacccgtcgccggccgccgatgccctcctcccgccggctaagtctgagaagggagagagagatgaggaagggagaaaagaggggaaaggaaagagagagagagaattggctgatgtggcagcctgacatgtaggtcccacgtggctcccgcactgattcagctgccacgtaggataaaaccgggtcaaaaccaccgacggacttactgtgactggtttttgttagttaatggacgatggatacctggttttgcggttggtggacgattttgtaactcaatgacaagttgagggaccttcggtgtactttttcctatggcctatgaactgattaatgggcttgcttggacgtggctgggttgatggattggatggtccaggcctccagctcatttggctcacgagcatagccagtgagctcctatacatacatcaatttttccccctatacattgctgcaagcctacaaccgtggctcagcttgttaacaattgtgaacgactcaagcacatccgaaccgagccacatcacgagccgagtgaactagcaggccagagtttttctccgctccctagttgcctgatccaaaattatagtgaatttttgctctgcgcacacatctaagctacctggagatcgatttccatatcttctcttcatgcagacagaagtgcactagggtttctcgtttctgctatgttaacataaattaacatgaatgcttacaaatacacgcagaaaagaagttcaccttttggcttttcaagaaatgattaatagaaaggtatgctgactagatatcgatgtagtccgctaatttccggcatctagcaatgaagttaccgatgcagtccgatgatactcatcgatctgactctaatcatcgagatagattaaaaacacgtagacattccgatcactaatgagagccgccactactagaaaactcattttcggcgtcataggggttcgattttcgcaggtgtgcatgtaattcggagctaaaaccccgctggcaaaaaatgtacccggggtggagggggcggtctgcctgcgaagatcgatctttgcaggcggagcatataagcggcgcctacgcggaccatattgaagaaatatgggaaatcaactatggacacacaatgcaattccccatatttaagtgccagtgggtaaaatacccgaacaggatcaatgttgataagtttggtcttactgttgttgaccttgcgagtgtgggtcacaaggat

SEQ ID NO: 26262 - DNA, 4287 bp, Oryza sativa
ctatagggcgaattcgagctcggtacccctggagcggcggcggcgggggagaagcgcgagagagatcggatcggtgcggcggcggtcgagggaggcgcgaggatggattgaggggcggcgatggtgtgaaggaggcgggatacgacgacggcggagagggagaagtctgcggtgtcgggtgacgagtgagaagaggaggcgccgtttctttttttttcgcgtcgcggaggagtagcgtgtgccgtttctttcttttttttttctttttttttttttgcgttgcggaggtggagcatgtcgatctacgtttctaatttggatcgcacgtctatgttgccttcaccatcaccactacgaattttttaagtattattaaagataaaaatatagtgctacagggaaacaaaatatattgagagtggatggggttgaagatgtcaaagattataaccaatacgatagtatgccactttatagtcagtttgtacagaagattaagaatgtcgagacatctactcagaagaccgtgaagccttacatacgcacggacggtgtgggcaaaaatgttaaagggtaatgattgttgagtggcatgtaagcatctaacaagttagtagttatgtaatggtggtatgtaaggtgatgtgtgatcatatcgcaaaatgacgaacaattgtactcaagatcaattagtttatgtgcaattaccatttgtagtgtaacatttacagatttttatattttaaaagtttttttaaaagaggtttcaaaatttagtagcaattttttatgtgcacttaccattgtttcaaaatttgttaaaaaattttaagtactatgtacatttaagtaagatttacatttgaaaagtatggttgtatgtacaataaccatttttattaaaactattgtagacattttcaaattacaaaaataattttaaaaagattttgaaataatgtatattcacctctgtaacaatcttcgtaggcggacggaccgcttgtgaagattgttatgccgagtgcggtttacatctttgcaggcggttgtgaagattgttatgccgagtgcggtttacatctttgcaggcggaccgtccgcctgcgaagatagtaaaaacgatcttcgcaagcggacggcccgcttgcgaagatcgttgtcctatataagggcaagcccgcagcgccaaaatttctaagtccaggcgggaaccctagaaattttggcgccgtcaggctgtcgaattttttcgccgtcccacgccgccgccgtcctccgccgccgcccgcctgcgaccatcgccctccgaccgccatcctccgccgcggccgaccgtagtcctccgcgcgccacgcgccgaccgtcgagctcgcgccggccgctccaccggcccaccaccgccaccggctgctccaccgccgagctccatagtcacgggccgagctccaccgccaccggccgctccaccaccgagctccgcccgcgagctccaccgccaccggccgctccaccacctcgcgccggccgccagcccgctccaccaccgccagccactccaacgctgcccctctctctctctctcaatcgcggtatcgcggccgaacggcttcttcggccggtcgtcgtccacgagcgaactcgtccttggccgaacgacgtcttcggccggtcgtcgtccacggtcgaacctcgtcgtcggccgttcgtcgtccacggacgtgtgtgcatgtgggtgcttgctttttatatgtgtgtgcatgtggctgtgtgggggtttatatgtgtgtgcatgtgggtgtgaatgggaatgaggggtgggtgatatgtaaatgttttgattgtgaatatgaatgtgggactgtgggtgatatgtgaatgaaattgggagggtatgttcaattttttttaataacatgtagaggatatggtcgccttattaattttttagcaaattagtacaaactaattttagtttgtactaatttatcaaatttgtttgtaccaatttagcaaattagtttgtactaattttagtacacaatggtttacacaagtttttattataaccttgtgcaattatgtacacaagtttttattataaccttgtgcaattatgtacacaagtttttaatacatagtttaatatacaattttttttgttatgttagaagtttgaaacgatggccgatagtactaaagggatcgaagagaagggtttaggggagcaagagcagtcccttgctgttgtggttgctccggaaccaatggtcccaccggaagatagttccgacagcgacgtagctgacgaagacgatgagtactcgtcgccaaatgatccttgtccaagcccaagcccgaagagaaggaaaatgggcgactgtgcagaaggcgataaggactacattccccctaaagaaggggtaagtaaacttaatatgtaaactgttcaccgtgataactattagcccgagctaattcgaaactttcatatataccttctcgtaggaaacggcaccacggcaatcaaaacggcagccgaagaaaaaagttccgtcgaaagacgacgaggcaccaactaacacaaccggctcaaacaaaagcgaacggtcagcaaaggcgaagaaaaggaagggcgagagaagcgtgaataaaaaggatgaagggttccatgttgttacccatgtttcgccaaaaggagagccgctcgcccctaagacggcacgtgcgaaattcagttcacagtgtggcataatagtaagggaaaagatccccatcacggtcaaggactgggatcatgtatcgaacggggataaggaagtcctatggaaagagttgaagaaaatcttccagttcccggatggatcagaggcagcagtgaggaattgtgcactgcaaacaatggccaagtcttggcgtggttggaaaaccactttgaacaagaaatttgtaaagacgggacgtacaccgtttttgacgtatgccaacataaccccgaatcagtgggacgactttctgacgttgaaaaactccccggaagaaattcaaaggagccaaaagtattcagagttggccaagaagaacaaatttcctcatcgcttaggctccgcgggatacgcaccaaaggtggagcagtggacaaaagatgaggaggaaatgaggaagatggggcaaccggtaccaatggaagaatggacacatagatcaaggaactgggtaagagctagaactccgaagatcacggatgaaggcaaagtatcgtttgaagatccggagctgcagggcgttgccgattaaatagagaatttttccagttcaccgaagaaaggatttttcaagcctaagagggagaaagatgtgctaagtacggcgctgggtactcctgagcatgggggtagggttcgaggtgtgtcgagcaagatgagttggaaggaagggttcaaacatgacccccacaagaagcgtgaagcgtacaaggataaacttagagacgaaggggttgtggattttgaaaggcaaataatggatttctgcgttaagcaaatgattttgcctcgccccgaaaccaaagaacctgagccagattacccctttgatgacctcaaggagaatacaccctgcagattgcacgttcccattggacgcttcgggaaaactcttgaggccgctacagccattgctatccttgggagaacatataatgaagagttcatacccgatgcgtacgccaaagtgcagccgcaagtggtccacgaagggtttgagtcctatgacattgacttccctactgcagatggtgtatccgtacttggggatgtggtcgatcttgtaattctctggcacaagaatgacatatcctttggattgggcaccgacgccacgcgaaaacctgtagtgccaaaaccggggttgggaaaacctccgagacctcctaagaagaaggtgactgataaagcggaggaacccgagatgcataaggaaaatccagtgccggaagtgccaccggagattgaagtgccggaggtgcccatggagattgtagtgctggatgtctaaatggagattaaagtggcagaaccagaggtgtggcatcagtcgagacagaaatagaagaagtaccaggattggaatggaacggtacagaaccagaaatatttgaagacccttctcctgcgaaagaccccgaggtgcaagagatcacggttctgaggtgcctagagtgcttaggagccacgactccaagtccaaagatgagaacaaggagaagttcatggtaaccgtcttcaa

SEQ ID NO: 26263 - DNA, 8058 bp, Oryza sativa
agaagtaccaggattggaatggaacggtacagaaccagaaatatttgaagacccttctcctgcgtaagaccccgaggtgcaagagatcacggttctgaggtgcctagagtgcttaggagccacgactccaagtccaaagatgagaacaaggagaagttcatggtaaccgtcttcaaaggggataaggaacgtgccaagctcagagatgatgacccccagaaggccgctgaactagccgggccaacatacttcacaactcatgattgcccggaaaagtacgaacatgggaaagcactcttgcttgaatgggcactgaacgaaggaccatgggagatgaaaaggttacataccttctacatggaggccagcaagaaaggcttggcaatataacagctcgatcaccggcagactgtttcggcgaagaaggttacatatggctatatttcttagatctccatgccatatatcatcgggataagatggacgtcaactatgtcggtgtttggtgcatgtgagtatgagttttaattaattatatgaaaaatatgtacaatacaaatccatgtgattgttactaacaaacttcttctgtaggatgcaatacatggatgctaagaagaaaaaagaacctatcggcttcttggatctaactcggatttgccaaacacagcatactatgaggctagcaccagggtctgaccagctgaagggcaagaatccaaaagagatagctaaatacagaagggcttgcacaaggagaaattgattactgtcgcacagtacattggacgagccttcttgcactttcaaaataagagagtcgtcatggccgcttataattttaagtaagtccggcacatttatcttgtacacatgtgtcttattttagctggtactaactaactatgctgttgttaatatgtagtgatcattatatctgtttactcatccaccctgaagacggaaccgtggtagtcttggaccctctcgattatagtcacaagcaatacaaagaatttctaacaatcttacagtagtaagtgattatgactcttgcatttttatatgaatgtattataaataaatatcctccttaatgtgaaacggtacgacatccatacagtgtgtaccaatactacaagttcaagggtggagaacagacccgaacaagggagaagctgctagtacgtacgtattggccggtaatactccactcacttaatgtattccaattgtttcactaattgcaaattttaactatttttttatgatatgtcctgaagtgtcacaagcaaccgcgaggaacggtcctttgcgggttttacgcgtgcgaattcctaagggttaatgggaggtacaggactaacccggaggatgtaagtctctatactatgtgctaaacagcttcacatatttatgatactaatatattgtttatcttcaatgcatgcagttgccaagattagaacatcgaacaagctttgacgatacaggcatcaaaaatgtccagcgtgatctgtgccacttcatccaccatgagtgctgtcatgtgaaagtagatttcttcgacccagagggtgccttagccacaagtaacgaattcaaggatcttcgggagtggaacagtgctatgccataatgtattaactagatggcgtatttgaagtgacaatgtaaaaaaaatattggaatatatatatatatatatatatatatatatatatatatatatatatatatatatatatatatatatatatattgcaacacttttgagttatgttatatatgtacatttatcagtaccaaatgcttgataatcttccaatatatgtatataataatctacctgcaagaatttctattaaataatttaaaagtaatttacgggcaaattattattaaattttaatattttctacctatcttcgtaggcggaattttttttttttgcaggcggccggttcctattttcgtaggcggaccggactagccaacgttcgcctgcgaaaattatcttcgcaggtggacggccaccccgcctgtgaagatcggcgatcgtcacagtcgttggcttacaagcggacatccgccccgcctgcgaagaccctttttggccgcttgcgatattgcttttctagtagtgacatctactatgtttaatctaggaaattaatgtgctccagcgcaaatgtcttggccaacggcatgttgtcgatgatgaagcggcttgacaaaggacgctgggtgcggtgtttaattattttcttcgcggcggcgcaggcttgctactgttgctacctccctgttgctagcgccggcgggctttggtcttctggatttcctaatctaccacctccgactctccgagtttccagcactcgggatgatgagatcacgcattaattctcctgataaaccgacgcacagataagctaatccatcgacgtgctggagataaaagtaaaaccaaccacgcgtaccggagtccggagataatcatgaaattatctctactaatgacagtggccccacctttaatttagttggaactgcatctgtgatcgctaccaacaaatcaatgtaatctatacctagtactagtcaatctcctttgtttgaacagctcaaatcttcaaaccatgtattaaagtcgaaatccatttgcaccattattttctattcaaaatatgcagcgaaacgagtctaatattgattatattatcgtatgatatttgaattttccgtgcctaaacgtcgtaaagacacgcttcacatctattttgtaaaattgggctgcaaattagtgcccaatgatttattattttttctatgaacaaacaaatgatagaattgagatatcaagtaggcgaattatgtcaatattgtagggttcatgtgcgaagcaacaagactcgactcggcgaaatgacaaaaatgagcccaatattgtatgtacattgacatcatttattacttatacttttggtccacatgtcattgagccttatatgggcccaagaaaatattatttgcataagagaatgatgccaaataattttagtattatttaattcgatgaatttttgcgtacaacgacaatataaaagcataacaattattagtgctttctaaagcttaatttgtaaaagtataccaatctagtaagcattcaaaacgtagagctcctgcaccaagatagaagattgtcacttgacgagtgaatttttggacgacgacaatacaaaagcataatactccttcagttctaaaatataaaaacatttagcactcagaatttgtcccaaaatataacaacttctctactagcattctctttccaaccaatcacaaccatgcaccattcacttttcctacctacctttactactcatccaatgacaaccctacaccattcacttctacctactataaaacttattatattctgggatagaggtagtaattattagtgctttctaaagcttaaatggaaaagtataccacatcaatctactaagcatcaaaaacataacatgcaatcataaaaattactaacatcaacaatttatcacattctaaaattcaatatacacacatgccagcaaaatcatcgtccccacaccattttcacaatattctaacccaaatccatccatcatttctaccacatctaacatataatcattcctatattttgcaacaaaacgcgggtgtcatcagttaatattgattgtggctaacacataagttgtattttcaaagactgcgtcaatgtccgaaactacttaatttgtgatgggaggacgaaccttgcacagccactattttgtcccggccactctgctccaagctttgtgggctcgtgggccacagaacctatcgcgattggaactacagttggcacctatccgtagcgggattcccggtggcgcaacgtgtggtctccgccgcgcccaaatccaacccaaaattctcgcccccgcgcccgcgtcgcaccaccacatcacaggacagacaaacagatcaccgatcgatcacgcgttcaccgccgcgccacccgctcggtcaccccaccatggccgccaccacctgccgcctcgccgccgcgccgttcgtcctcgcaccgctgcctcgccgccccaccacggtcgcctttgccgtcgccgccaccggcatcaagtacggctagacctcgcaccgaatcgttggctcgctttctcgtgttttattcgcaaaaactgaatcattggctctccatgtcagtaggtctcagggcgtcgaggggcgtggcgatcagggcggccgacggcaccggcagcgagacggaggtgccggaggtcgtcaaggcagcccaggacgcggtcagcatgcaatccttatcttctgctgctgctgctagctgctgcttctgcatcatcatttcagtctcagtttctgcttcagttagttgtgaggccattcctgtgcaatgtgcgtaactgtgaccaccgttgtgtctaggcagtgggccaaagttgaggacaagtacgccgtcaccgccatcggcgtcgccgcgctcgtcggcctctggactgccataggcgccatcaaggtatacgacgcgacacatatgcttccatgcatatgatctcttgctccttcaagttcagatatgatgcttaatttcattttcttggtaatctgcatatcggattaggccatcgacaggcttccacttttgcccggcgtgcttgagctcgttggaatcgggtatacaggggtaagttataggcattcagttgcaaatttcgttgtcacatagagagtgaggtagtgtaagattgcttctcttacgagctccaattaactgctgctttgtgttcatgcagtggtttacataccggaacctcatcttccagccagacaggttagacatcctgttttaatttttgctcttcacatccggttctacagtaacatgatactgcaccgttgttacagaactgacaatttctctggtttaaactcgtagaattttacatgtataaacattgtggagaggagttctgttttgcaatccgtatgaatgacaatgatttcgttaagactgaaatacttggtaaccgttggaatatgtgttatgtgtgatttttagtccttattgataaatcaatatactcaattgacttagattggaagttgaaccctgctaattaaaaaaaaccttatgttaaagaaatgaggagatacatggttctatctatggcttcgaatatttgacttttaagacaagatttggttgagcttttcgaattgagaccaaatatttagaagtgatggctcaagtccaagctcaatgttttattcaataatatccattaatactggcttgagaactagacaacatgtaaatacacttcaattagtaacaaatgttcataatttggtaaccttggataaggttatgcctcaaatatccttttgttctcgtatataaaattactattagcctttcatattcttatcatgtttggcactctaatggatttgcagggaagctctggtgagcaaaatcaagagcacctacaatgaaatcaccgggagcagcagctaatttcataccattttcgagaagatttctgtaaatcagagagcagcaggactgcatctgtcggcagccatgccagtgaagaggaggttgctaacgttttgagactggtccctccattatttccatcttatcccctggctcaaagcagacaaaatactattattgctgatgagctgctcatgtacctattttaattcaacaataatgaaatatgttttcagtttccgctccagacaactgcgtactacaaacatcattacatcaatgtggggttcccaatcacctgtattttcttttatcgaattcaatttgaagccgttggcatgagaagttaatgataattaagaaacactctttgttgtccaagctcgacgatactgctgacctaaccatctctctgatggaatccttaactctgtaaataccataaattgttgtagttctacatggttgtttggttggttcctattacttgtttaagttgtcacgccttaagttatacaaatttgactgacttagatggctgtttggttcttagccaatcttgtgacaagatttcctctcttattctctaccatgtagatcctacattttatcgatataaaaaaagtgtggcaagagtgactcatgttagctaaaatgtggtttcaattttactagcctatgatatcgcacgtttgcacgactttaaccattgtgttatatgtgtgtgtgtgtgtatatatatatatatatatatatatatatatatatatatatatatatatatatatatatgagcatgtaatttaaattggcatcagtaaacaatgttttattctgttaagtatgtgcttgggagaagtgtaattgatcagccatgacctgcaagcatatagggcatataggtagatgaaacactcactcttaaggccaacctattaacttttacactaaagaggtgaaccaaagtaaaacattaaaatcatagaaaaatttattgatatgtttatgtgataataaattttgtgacattaaagttacagtagtaatttggaattagtcggttgtaaggattgtatatacatataatataaataattttgaatgattatttgtaaaataatttttactgagtgcgtatagtgcaaaattatatcacatgccatacgccagccaacgcccccactctcttacaaagctacttttcttgtttgctctttctctctctcatttctgaattgctggaatgcttcggtagttcatcgtctttttttccctctataatcaatggctgaactctttagcttctctctattttgtctttttctcgattcaatggttattgtttatctgatgatgtggctcatcctaatagcattttgaaatttacttttcactaggtaagattaaccacatctttgataagttagcttaaaagaatcatgacaagtaaaaggacatgtaatactttagtggttacagtgatctaagtagcacccaaagattttaagtttaaatcttaaatagcgaattttggattgggttggatgtagaggtgtaaaatatatctttcttaaaaaataaaaaaatattaagtaatttaaagtactcaatcaaacagccctttcatcttcccctacccggcccttgtccgtctacccggtttggactccttccagttaagctaacaatccgttcaatggaatggactcaatggatagtgaccgaagatattacagactatctgtaagtgcagtgacacgtcgactgcagacgaatccaaagacctgaagtctgcctggctgcttttactgctgtcactgtactcttttcccaacaattctgcaattaccaaaagcgacgcatccagggaaaatatccttttctccagagaatatacaaatcgtgggtccttgctaaaatgaagtgcgtactacctctgtcccacgtagaggcaattcctaacatccgagtgcaacactaaaggagaggataaatatccaaactaccccttattattagtaaattagtattggtgggtagatatgtaaggggtattgaaggaataaaaatttttaatttacgaaccgagagtagataagaaggtagaagttgatttattttgaaaaaagtttgaatggtaaaagttgatttatttttggacggagggactacacagcaaccgagcaccaaccgtcggttcttgctaaatggcagagaactactgtactgtcgttagttaagtaaatatcgctactgcttgtctttgctaataagtgcctaagtgtcagtcacgttcaaatgctcttttttttggacttgtcgatacacaccctgcttttggtcgatcgatggtcacgtcggagagagaggagacatgaattaggatattgctatgcacgcttgtgaggaggttaccaacacttcatgcttgctggtgtaatggtggtcaccggtgagttaactaagacattttcgacgat

SEQ ID NO: 26264 - DNA, 5437 bp, Oryza sativa
  unsure (1)..(5437): unsure at all n locations
ttagtattggtgggtagatatgtaaggggtattgaaggaataaaaatttttaatttacgaaccgagagtagataagaaggtagaagttgatttattttgaaaaaagtttgaatggtaaaagttgatttatttttggacggagggactacacagcaaccgagcaccaaccgtcggttcttgctaaatggcagagaactactgtactgtcgttagttaagtaaatatcgctactgcttgtctttgctaataagtgcctaagtgtcagtcacgttcaaatgctcttttttttggacttgtcgatacacaccctgcttttggtcgatcgatggtcacgtcggagagagaggagacatgaattaggatattgctatgcacgcttgtgaggaggttaccaacacttcatgcttgctggtgtaatggtggtcaccggtgagttaactaagacattttcgacgaaatttttaagtcgtatgatagaagagaaaagtcttgttaaacggctgttaaaagaaattagaccaaaatcttacacatttttaatcttagcatttgattcacgattcatgcttcaatgaacccagctcatcctctagctgaggcgagctccgacaatcaatgacagagcgacaagttatggtttaaagttctgggttaggataaaggtgagacgaggagggaaggaagattgtcgggcttagaaggatggcctaggagacaatgacatgacatgccggtgggtggcgaggcgctanaggtgtgtgtgtgcgcggccagggggaggggctaggatagtgtgggtggcagggccaaagcaatgcttctagtttgaacgcggtgttttgtgatggtgatccagcagaagggaaccgttaaagacgaagaagaatgcgggacgggggcacctcgccacagttagcttagggagggggtaggtggtggagaagggaggaggcggccagcttcgtcagctttgttgagtgttgatgcctttcggccggtggtggcgcagcggagatggcaagacaattttttggtcgtttgactcatgccctctagtgtgatgtagtgactacgactaggaggtaggagaagagtaaaggttattgttgagagtaaagcaccaatctaaaagcaatataatggtatgaaaattttttctgagatatacgtttccaattgaattacttatcagtaagacccatataactagttgtaagtctgttagtgtcatactgtcatcgacatataatattccctgcatcatcttataatataagatctagaactgaatgtgacattgtattatgtaatgctttattcgatcctatgtatatgtagggattagggattgtttgttactttgtacgtctcctaatataagggattttgacattttacttgtactgtttgaccattcgtctaattcaaaaaattttgaaattattattatttttaacttattttattatccaaaatactttaagcataacttttcgttttttatatttgcacaatttttttttgaaaaagacgagtagtcaaatagcctaagctacagagagggttttttttttgtgcgccccaatttccatgtacacgtagcagtttctcccaaaaggttccatagaaggcccaagcgtcggcccccacaccatggcatcggataagattgccattcctttacttcggtaaacaaacaaaaagaatagttcaataataataaaaaatagaaaatgctcagcagaagaaacgaacggacatggcatcgcatcgcatcgcatccatctctccagaggcctccatccaaagccgcgcaaaacgccaccacccacaccacgctgtactcgcgacgcgagggaccccgccggcggcggcgcgaggaggagaaggagaaggagagagagagagagaggatgatcctggtggcgatcgtggcggagctgctggaggagtacacggcggcggtggcgcgcgccatggagctcctgctgtcgcgggcgccgccccgcatcttcccgcgccgcgtccgctttctcgtcctccggagcctccccttcgcctcgccgccgccgtccccgctctttcccccgccacccttcaccgtcgccgccggcacccgctgatcgatcgatcgatcggtccatgacggctccacgtacgtacggcaaccagcaaagacagtacgctggctgctgaagtagtctcgccttcgaatcatgaattaacctgctcgcgcgtgtgcatagttcaactcgtgatgtttgtagcagcgtgctagattactagctagttgttgtgttcttgcagcttagtaattaattaatcatttgcttagcttctgatcctgaaaaagcttgcatgtagttgtagcccagcgactgagttacggtcacgggctcacggccagttgactcggagcgagaagatgtgtgtaatctgtgtgaggttttgaattacttgaagaaaatttggagatcttgtttgtttttggctgctgatgtgttaaattggatcaaattcgtttgaaatttggacctttttctatataaccgcgcttccgcaggctggcgattcgcaatttttttctcggatcatttcatttcccagcacacaatcttctgtgctagtactaccgtttgcagaattgtgatcagtgtgggcccaccctctctgaactctgattcactagtatatttttgggtcgacacgttgaaccgccgattggacttacatgtgtgtctgtctggtgtggtggcggtttaactttaatcaaatactccctccgtaccaaaataaactaactcctatgatttaaaatttattctaaaataaaccaactcctactccctccgtcccattttaagtgcagtcatggttttccgtgcccaactttgactatccgtcttatttaaattttttctgaaaaaaattaaaaacataagtcacgaataaaatactatttatattttatcatctcataacaacaaaaatactaattataaatttttttcaaatatgacggacgatcaaaattgggcgcgaaaacttatggttgcacttaaaatgggatgaagggagtaccttcttacctaccatcaatccgcaaatcgagaaattttattacttcaatacccctcacctactcatcgagcaatacaaattttacattaattaagggtaatttgtttttttgtttcttttcttaatagttttgtgagattctaggattttattttattagggacagagagtttgattttattaagcccagagggagagaccccgatggtgatttatgcgatgaagttgagaatggacactaaccttttctttttcccgccaggttgcactggtgaagaaaccctttgtagtcccggtttgtaaccccctttagtcccagtttccaaaccgggagtaccaatccgggactaaagatcgagatgaccttttttttttgcatggccctgttgctgcatggtttatatatatatatatatatatatataaaccatgcatatatatgtttcaatacatatatacgcatacatatatatatatatgtatatatatatatatatatattatattatattatatgtatatgcatgcataatatatatgtatttatacatatatatgttatgcaaatgcatatgtatatagatatatatatgaacaaaatatatttacattatagaaaatgtgtacacatgcatatagaaacatatgtagtcatgtattaattacaatccattatatgtcctagctagctacgatttcgacgtagtagtactcgctgctagctcagaagctaaggaccggtgaattgtgtttccgtcgtagtagaattcacccttgggatcaaggatttcttcgttgatgaatcccatgagttgttcttgaaccgccgcgataaattccttgtgtgtggtcaggttatccctcatgcgaataaactatatgaatgtatgaaattgattagtaattaaacaagaaatcgctacgtaatgaaattttgaatttatttgtacgtacatcgagctctcttgtggtgatgatttggtctacaaggcagtggcaatacttgcacacgtaatagccgcacaagttagttccctgcttttgctttgcgcactacaaataaatgacaaacaacgagagatctaattaatatacacttgtatgtatttgaatcggagaaatataaatgtagagcatgtgtactcacaggaaatttgaacttccgcctaagtctttctctccatttgccgcagaccaaatgacggaaccgataccaagccctacatggagtttaaagctatgattcgtagtagcaattaacataccaagatttcttaattaacaaaggaacttatgacggtacctgtctataagttcgaaaaccatgtcaaacgtagactcttttttatccattaagtcatatacgttgacggtgcaggcctccaggtcgatgagtaaaagcacccagtggaatctgcaatgtgcgtgggatgcattacatatgaaacacttagcaagttcgtatgggaatgaaatttggtatgtaggaagacagtaaaattaaactaactctgtgttgtatggcaacagtatgaacgtattgtaatgctgcgccttcaggagatggacgagattgtcctctgtttcttgtggatattggtcgagcattgcgacgtttactttccgagggtcgatgaatccagtatcgaaaaccctccgccgtcgggccctttgaatctccattctacaacgataaaagggagtatattattttctatggtctacttatatacaaggaactaattaattaaaggagacgtataataagaaatctaactgaacgatatacttacaaaatccagcaactcataatagagacgtcgagggcgtccagctggtatagttcgtagattcccctgaaattgatccagagaatgtcatctccttgcaagaagtccgtgtccctgatcctcgctccgatcatctctctaccggtggcgctcatctccatgtacagctgatggaacttgtacatttgtgtaggtagggactgcagcagctcaggcttgataagcggtttaccgagttcgtacatgtatttcacttccgccttttcgattggtgcgactcctagcaattgatccgtagttagaccggtgtcagtaataaattgttctatcgtcatttctttaccggtcaccaacggctcgatctcctggtttggttgctctccaagctgagggactggtttggactttccagaagatgctttcttcagcgttcgctcatagtccgatagcttgatggcctacttgacagatgcagacatacccctgaagaagtttctgacactggggtctataggaatcttccttttttgacttcgaggcttgaattgcctcttgacttctgatgc

SEQ ID NO: 26265 - DNA, 2267 bp, Oryza sativa
tgtgtgcccatgcgttcatcaatcttccttgccacctcctcttgcatgttgagtttgtagctcgatacccggaactctaggtctgcaatcttggcctcggtatctctcttgctcctcatccgactcctgtacgtgtggatgtcctccttgaaaccaatcttccaaggaatcacccctttccctcgagttcgtcctggatgctctggagtctgcagggcgagtgtcagctcgtccctatctctgtctggtcggaacgtgccctgagaggaggcttccactgcatctgttagtcgtcgcgcagcctctcgtatctgatagccgaagaccagtgagccatcagctgggttgagcgttccaccgtgagcatagtaccagaacttcgatcgttccggccaattggctgttgccggttcgatacccctctcaatcaagctagcctccatctgctcccacttcggcatcgcgacgctatagcctcctgaccccaagtggtgatggtacttcttcttggcggcattttctttgtttctttccatcatcgcctgcccttgttcacctgtcttatatgcaacgaactcgtcccagtgatcccttagctttgggaatgtgtcgaagttcggtgtctgccccttcagtatatacttctggtacagatctcccttgaagctctgaaactgttctgccattttcttcagagtccaccttttcactttgtcctctgtacccgcaggaagggtgaatgtctcgagcattgtggtccacagcatctctttctctgaatatgggacaaagctctcatgatctccgcgtgcccttgttcttcgccagtacaccgtactgacaggcacgttatcccgcacaacccaaccgctgtgacgtacatagttcttggcggcttcggccggggcactaggacgtccatcttcttctacttccgttatgatgtgccgaccctcaagcttcttcgctgcacctcgttgcccgcgtgccctcttctgtccaacggagggttgactaccactagcctcctccttctggttcccctccacatccctttccacgtgcccctgctggttcccctccgcatccctctccacgttcccttcctcgttcaagtactggtttggatcctcgttcccctcttcttcattccagtactggctgcttccctccgcgattggatcggacaatatctgttcctcatcgcggtcagccatctgtgatacaagaaacatctgtaagtcacgagacatttatgttttaacaatctaagtcatgtatgctaagtgtaaatgtcgtacattagaaccctacacaaccttacgtgctaagtctaattacaaatcgtgatataagctaagtctaggtgacgtatattatacaaccctagctagtaaataattatatactaagtctaattacaaataaaataattttatattaaaaatcaaataatattacatgctaagactaaaatagtcatgtatatgctaagtgtttcgtgcgtatatgctaagtctaattaagactacaatagtcaattgctacttgtcgcaccaattccgttgtcaataattacataccaagtctaattacaaataaagtaatattatattaaaactcaaataatattacatgctaagactaaaatagtcatgtatgctaagtgtttcgtgagtatatgctaagtctaattaagactacaatagtcaattgctaggagtcgcaccaattccgtagtgaataatgtcatactaagtctaatttgcaataaaataatcttatattaaaactcaaataatattagaacactacacaatcttatatgataagtctaattacaggtctaataatcttaattaattgcattacaaatataacaatcatttatattattacgtcacttgcctgctccaattccttctagggctagctcttccactcaggcttgacggacgactccgacaacacgtcttttctgcaagatacaaaaaaatgtattaggataaatgcgaagtaacatatatatatatatatatatatatatattgcatttcacgttaacgttcgtcctcgttcgttcgctcgttctcattcacgttcgttcgcttgttctcattcacgttcgttccctcgttctcgcttgtcttcgttcgatcgttctcgttctcgctctcgttcgttcgatcgttcttgttctcgttcacgttctcgcggcaacgtacgttgacgtgttcgttctcgctctcgttcgttcgatcgttctc

SEQ ID NO: 26266 - DNA, 2105 bp, Oryza sativa
tttcccgctatttcgaaattctttttaaactcggttagggttaagaaccgggactaaagattatagcactgcatatgattttcgcttacatatgtgtttataaaatagaagttaatgcattaacattatttaaagtacaaagattaatgacaattacttcgaaaaattatttttgtctgtaataaattaagtggataaatcgtaataagcaaatataattaataaaaattccaataatcatatatacttagcatatatatgaatgatattattatattggtaaaaactctaattaagatatgtatgtacatactgcatgatttaaaattaataaaaattgtaatcatcatatgtacttagcgtaggaattatattaaattaaatgctaaaaactctaattaacatatgtaaatgccacatgcatgatttaaaccttttaaaaattcgaatagtcatatataagtagcatatgaaagatagtaaattaaattatgaaaaactctaatatatgaatgatagttttaaaaatatattaaatttaatacttttaaaaattctccagtcaattataattagcatatgaatgatggtaaattaaatgttaaaaactctaattaacatatgaaattgccacttgcgtgatttaaaacttttaaaaatcctctagtcaattataattagcatatgaatgctagtaaattaaatgttaaaaactctaattaacatacatatgaaattgccacctgtgtcatttaaaacttttaaaaattgtaagtatcgcatataactagcatacacattatttaaacttgttgaaacctctaataatcgtgcgtaattaacatatgccatacatcaattgatttatatgtgataatcaatacatccaaaatagtttacatggtgtacacaataattgcggcacgtactttctcctcactattgttccctccttgtgatcgctgcgtgagtaaggggtgtcttcatttgataggaggatgctagggtcaatcgtcaccgtgaaagggggttgcccatccaactgatcgtaatcctggtcagtcttgtcctcaactccgacgatttttcttttgcctggagaaaccacttgacgcttaggctcatcaggccctctgcccttctttcctttgctagacatgtccttcacgaaaaagacttgcgttacatcattggcaaggacaaaaggttcgtccgagtatctaaccttgttaaggtcaacagttgtcatcccactgtcatcaatcattacgcctccaccagtcaacctaacccattggcaccggaacagaggaaccttgagaggaccatagtcaagttcccatatgtcctcgatggcaccgtaatacgtggcaattgttccatcgtgtcccatggcatcgacacgaacagcgctgttttggttcgtgctcttcatgtcttgggctctcgtgtagaatgtgtacccattgatctcatatccctggaatgtcgcgatcgacccagacggtcccctcgccaggaaggcaagttgttggttgatcgactcgttacccatgagatgttgtcgtagccacacggggaaagtatcaatgtgatgccgtgtaatccatgcatcggacttaccgatgttcctagcgcgaactagagccaagtgctcctcgatgtaaggagctaccaatgaagagtgttgcagaacagtgaaatgggctttacggaataaattgttgtctaccgtcgttattgctttccttccgagagttccctttccctgtagtctcccttcatggcgtgattcaggtaccccgattgggcgaaggtcttcgacaaattctacgcaaaattcgatgacctcctctgttccataacccttggcgatgcttgcctctggacgagcacggttatgaacatacttcttcagaacgcccatgtacctctcgaaaggaaacatgttgtgtaggtacataggcccgagaatacggatctctttcacaaggtgacaaagcagatgcgtcattatattgaaaaatgaaggtggaaatatcaactcaaaactgacgagtcattgcaccacttcattctgaagggcttctaatctatccggatcg

SEQ ID NO: 26267 - DNA, 9877 bp, Oryza sativa
  unsure (1)..(9877): unsure at all n locations
ccagagtggtatccaactttttgtgcccctgctcgcaacctgggtacaacaaagttctgtggtcctccaacatcttgtccaatttatgggcctccttttcactttcgcagtcttccctggcgtcctgcaacatctgaccaagatcatccgcaacgtcgttaccatcagcagctatttcctcctcgcccgtttgatttccttcaaatccaacatactgagcaaagtccggaatattgtcgtcttccacttcatcttcttccatttcaacaccttgctctccgtgggatgtccaacaattatagcttggcatgaaccccgactcaaacaagtggaaatgaatagtcctggatgcagaatactccttctgattcttacacttattgcatggacaacaaataaaacccctttgcctgttagcttcggccactctcaaaaaatagtgcacaccgtcaataaactctttggaccgccggtcagcgtacatccattgccgatccatctacatgagtaaaaaaaccgcacacaaataattattcttacaataatgacagtcatacaataattataagatatctttattcatacaaaaatcataaaatattacaccaaataattcttaaaaactatttgtaaagttttaaattttaatgtgttttacttcttttaattttcattttaatttgttttctattatttaagattaactttcacgagagttttccttctcaactattttataaaaccttatttagcaaatgaactaaatttctatatattctttcttccccacacacattttctctctcatcaacttacaactaaattttggagacaaaaaaagtgtgcaaaacataggtgtaaatgtagtatgacaaaaaaaaaacattggaggatgaagttgcaaaccttttaggcacctccgatttgtatgtaatcaccaaaataaattcaatattaattttggcatgacctcccctcttttttgaagaaattttgaagcttgctcgggcagctggaggaggaagaagacatatatataggggtgggactttagtcccggttggtagcaccaaccggggctaaagatcaccgggatcattagtcccggttggtattaccaaccgggactaaagttaagatctttagtcccggttggtagcactaaccggggctaaagatcaccgggatctattaccaaccgggactaaagttaagatctttagtcccggttggtgttagatcccgggggggcctgacaggtcctgacagcattcgaaccgggactaaagatgatctttagtcccggttggtaacacaaaccgggactaaagatcaaatatgcccgttacccttttgaaccgggactaaagatcatctttagccccggtttttattgcatccgggactattgtggaaatcagtcgaccgatgaaagatggtttctccaccagtgttggtggtaaagatccacggtcagtttatgaaatttggaataaatttggagcaataataataaacaacccacctcctgcaaaggagatgataatgggtctaactaaaatttccacgccatccagaatagaacaactgccgtgccaaaaacataacggagcacttttaacgaaataagaaatgaaataacgaaacaatgtagaaaagacaaaggcaaaaatgtacgggacaatttcgttcttgcccctattttgatgttcaatattgattttgcccttattttttaggtttttgtttttacctctacttttttttttgaaatgaatcaaccgtttgcccctattcaattcttgttagcggtgttaaatgtgggtgtaaaaagacaaatatacccttagatatattccggtacttttgacataatcaaaataaaaatctattgatgccatactatagcaataatttaattgtccaaattttgttaaagtttaccaaaatttgggtcaaaattgaaagtagtgtacaaaagtactggaaaatatctaagagtatacttgtcttttttacctcacatttaacaccgttagcaataattaatggactatgtgaaaacggtggtttcatttcaaaaatgtaggggcaaaaacgaaaaccctaaaaagtaggggcaaaatcagtattgaacatggaaataggggtaataacgaaattgccccaaaatgtatctatggtttattaaaaaaggaatatcgcctgttacagaaaagaaaaaaaaagaccgttaaaacaaatcagggattccgggcggctaaaagtagaagcttgaataaacatgagcctcagaaaagagagaaaggatgaaaaccgcctaagcaaaaaggaaaaaaaaagactgatcagaccataatctcgcgatcgatcgccattagtctattgatcacaaacaattatactatgtatgaattactattggaccttcttatgcgttcaaaaaaataagctgtaaatctgcaatacgtacgtacatgtaaattttttgcaacaacattctccggtgaatttgcggtgggctcctgcagagatttctctgggccgtaaggtagtgtgaggctttatttgaagatgtggcccttccaaatagatgtcttggagtccaacataactggtaaatgtccctggcccaaacctaacacccatagcaggccgaaagctgaacttccaaacgggcccttaatctatatgatccatacgagtaattgtcaaagactcaaaaaccgagtcaactttatacggactaaaaatatcaaattaattagttgtagtttgtatctagaggacataattaccatcttcaaaaaagtttataattgtgtgttcatgcaacgtatagcgcgttttgacacaggatttttcacacgatagtggactataaaagtcccaggttattacaagaagtgttttatgctcaaataacttggagactttctgcttgacgaatcctcaagtcgtcaggaaattttcgttgctcgcaattcgtagaaactctctctctgcaagaaaaagaaaaggactacaagttgctcttgatagatctcctgacgaatatatatatctccaaggctccaagcacgttacgtcttgtgccatcgataagataaaaaacctactacctcatattttttaatatatgacgtcattaactttttttttcgacgtttgaccattcgtatttaaaaaagtttatgtaattatcatttattttaatgtgacttgatttattatcaaatattttttaaacataacataaatatttttatatttacacaaaaattttgaataaaacaatggtcaaatattagtcgaaaagtcaacggagtcatacattaaaatacggagagagtatcactaaagtttaatattgttgtgcatatgcttaatcatgcacgagtccatgaattcatcaagccgacaaattaaacaagtcccaggttattacaaaatcctccatctatacacaactccactatataaactggtggaaaaagtacaccgaaggtccctcaacttatcatcgagttacaaaatcgtcctcaaaccgcaaaaccagatatcccgtgtctcttaactaattaaaactggtcataatagattccttgacggttttgatctcggttttatcctacgtgacgactgagtcagcatggaacccacatagccccacatgtcatgatgccatgtcagcaggccgacctctcccttcctttccttctctctctcactcaactactgggcaggcctgccggcggaggggatgaggtcgtcggcgtcggcagggcgaggtggcgtcgtggagggcgaggaggctcccgaaccctaaccctaaccccctccttctccttcaggttcgtggagggaagcgtgtgcagcatctagccgcgcccccgtcgcaccagctgcgctgctccggggtcctcgtcccctccccgccaccgatgcatcaggtcagtaattgcccgtgtccctctctcctgttttttgcccaagctgcgcttgatatttgagttggtttggtttggtgtggagcggtgtggtgtggtttgattcgggagtggaattgaacggatcacctgatggaattccgtgcgtgattggattgtcgcaagctgctgaggtggattttttcctgaacttgttagctgaaatggaggggaattggggagattaggttgcgtgattgatcgaattttccatcctgctcgcgtgattagtcccagattccaaatttccagttgttttatcacttcatttccacgaaatttcacccataatctgttccttcatcctacgcatgacctatatttaatgcatttttacgaattagcatctgatttgggactaatcagagaaaaaactgcactgatgcaggtatgctacccggtcccctttcccaactccgtcgcactgccaccggagctcgtagtgtatccctctgtgccaggcctgccgccttcagccacgccgccgccgtcgtcgtccataggctccagcattgccattgtcgtccttgtcgtcattaccacgaccatcatgatcgtctccattgttgtcattcgatgcagctaccgccgcgggttgatccacgggtcgtcgtcgacaccggtggtcgccgggcacacgacgctacacatcttcaccacattctcacgccatcgccgggtcccagtcctcggggtggtcggtgagccaggccgttgactttgccgccgagggggagcctctcggagccggcgcgcatggccatgttggaaataagagaggtaatgaggtggcatcctggtatgtggggctcacgtgagtcccacgctgactcagccgccacgtaggataaaaccaggatcaaaaccaccgagagacctattgtgaccggttttgattagttaagagatgcgagatatctggttttgcggttttgcggtttgaggacgattttgtaactcgatgacaagttgagggaccttcggtgtaccttcctaaactggtagccaccttagggaatagtacacgcaaggtccctcaacttgttagccacatacaaaattgtccctcaaccgtagaaccggacatccggcgtcccccaacttacaaaactggtcacaaaaggtccctcggcggttttgaccccgattttgtcccacgtggtggctgactcagcgtgggacccacgtgagccccacatgtcagtaagccatgtcatcacctctccgctcgccggcctccccgcgcttccgctgccccgcgtgtggctccagctcggctgccgcggttgcccgccgctcctcctcgtcggcgagcacggataggaagctgacaccgccgccttgctcctctcaccgccgccaccgccgccttgctcccctgagccaacgccgacgcattcgtcccgtctcgactccgacgctggcctccccgtgcctccccgctgtcgtcaccgtgttcctcccgcctcgccgccggatttggacttgggaggagcacaccggcctccccgcgcctccgccggcctccactgctgctcctcctctccgccgcttcttccccgtcggtcgcgccgaccctcttctccaccgcgtnggtgacgccgccgccgccgacacacgataggccctcctcttcgcgtcagttatgatggccacagccgcgcgccgccatcgccgaccgcacgagggggacggggaggccggcgaactcgcacctgcctgagcccgcgcgcccccacccgggagccgccgttgccggctgcaccacctttcggccgcgcgcaccgccgcctgtgcgagagcagagagcgagaggaaggagagaaatagagaaagagagatagggtgctgacgtggcttactgacatgtggggtccacgtgggtcccacgctgagtcagctgccacgtgggacaaaatcagggtgaaaaaccgcgagggacctattgtgaccggttttgtaagttgggggacgccggatgtccggttttgcggttgagggacgattttgtatctggctaacaagttgagggaccttgcgtgtacttttcccgccaccttacggcttcgttcggtttgggtgtaaaccggccttttccccggccctttcgggaaagcccaccacgaggggaaagaattcctgggttgtcaaaaaatgcattcggcttggcccgggaaggtggatatcccggcccaatacccccaaaccctagggatattggtccaccaccctgagcaacacaccgctgcctcttctcgactggagcggcgcccaagccgccgctgctcgtcccgtcgcccgccggcgcggcacaccgcatctgctcgcgccggcgcctcacgtcgcttcagcctcctcctctcgccacaaatgacgccgcctcctctcaccgtagatgccgcctctcgtcagatctgacggagctcaacatcggtgcggccttctccgttcggtctccaccatccggccactgcgtcttccccatcaagaacctcaaggacctcgtcatcttctactaccttgtctaggtatgtcaaattccatccttctcctgaattgattggtttggtggttgggaaggtgaactcttgggctagatctgatcgattatgttgcgggatagttaatcttgggctaggtaatcttgtgctaattttacttgtgaaatctctaggcattatctatcacatcctgttctgatctctctgttttttttttcattatcaatctgtgcacggttagcttttacttttcctttgaggtctatacgctcagtatggatttaggatattaattttgttcatatacattaattagctctgtttttcaatgcaaacgatttcctaagttttgttttctgtgtgtttttattcacatgttttatactctgctccaaaaatgccataaatggatggtagcctgattttactactctgtcattgtttccttttaatctcaagtactgattcctgcagttacatactgttgagtttatcgttgagagagtcggtgctgcttacaggtcataactcatatacgtagtttgtttttgtagggtattttctgaaatactccagagatttatgtataaaaatgaatttattttgtgacatactaagtagtatatatataatttttgcaggatattgaactgtgccacctgctaaatttgtttaggatacgtatgaaaatcgcctttgctcagtatggatttagtatatatatttagcagccatcctaaaccttgctttttcattatcaaaggagattttacatattggtttggtggttgggaaggtgaattcattggtatggatttctgaaagaacatacatctgttctggcatgatctatcacatcctgcattatgagaaagtgagctgcacgcctgggcattagtgtgtgtttgggttaagctgagtggccaatagtgatcagctccattatatatatctgaatctgatgagtagtgaactagtgatagatcactagtgtgagtagtcagtgacatacatatgatagaatcttagctgggcatgcatatgctgctactgttgtgctgttgtctgaagatatgagtatatatagtagctgtagtgtggtgtagtgcgcgcgagtggggttttaattggttaaagcatgttggttgctggtagctaggtgtcaggttctctcactagttgagtacatgattcagggctttttcgaaatgcatgatgtttaaaacataggaacaaaaggaaatacatataattaaaatactctatggattgaaaaaatgaataactgtatgaatgatcatttaaatggagcacaggaaaaaaaaacacagaagattcttttttatggtgataaaaagatatactctgctgtttatctttttaatgctttgtaatctaatctacagaagtacagaacagccattactacctttgacattaactgcaaccttctgttatctgttaattttttgtagtttggtgcttagaagattcttttttttttgttaacatttgtttgcttgatatcacacttttatgtgcttagaagtcatctcacacatgtcaacagttcctggaattaaaatgggttcaagggctaatcattaacatgtcagcacttttatgtgcttagaataacatgtgtttgttcagagtcattagctgaaattggacagcaagtatattccagtcagttagcatagaatctgatattgttctgaatttttcctttaattctgcagtttgggtgtctatcaactgctttgaccattggatttgttaatacaacacgtgttaatacaacatcaattccatctatacactctgaatgtgcttgtgtttcttgcccactgactgcattagtggtgtatatgttggggacctgctgaaattgagctcaattatgaattctgaaattctgaaattatggttcaggttgaggagctggctggctgacagaaacatagtaccatggtagagactgaatttaactgtactatttagttcttgtgaactttgaaaattataggatctcttctggagattgatattttggatatatgaattagctagatcgatcaactttgttaaggttttagctagaaaatgacatgtttgcattagtaatagataataacatgtgtttgttcagagtcatttgtagagcaagtatattctagggtcccatcgtttggcttttcttttaataagccaaaacggcttattagagtaaaaataaatttgtaggtaaaatttttatatatgtgttctcggtgacttaaaagccaatgctgaaaaaaaaactacgttgaaaatatctcaaaatcaatgtcaaaattaagtttgaaaattcaaaatttggctttttctttgtctgaataggccatccgatgggagccctagtcagtatatgctgagtttgcatatctgaaaagaaaatcattctttttcttgtttgaatagtaacaaaaagatctttctttccatgtacttgtttgtaaagtgtctccattggcttcttgcaacatgaatagcatgatgataggtggtcagcctcttttcatttctcttgtagtcctgttgagctcacaatgctctttttttgtgttctttggcattgattttaatattttcttgaggtcacaatgctcatcattttctcctcccaggtcatggagctactattatttggtgaagatcgaatggtggcaaagataggacaacaatgcatgcagttaccatcttcatttcttaaatttatggacaaatcagattttgggacctgggaacttagtttgtggttgtactcaatgttctaggtgttgatgtcctttgcttccgattttattttaccttactgtggtgatgtataagaaaaacttctcagtgggctctttgctaaacactaaaatttaaatgcttgtaatattgtttggagggcacagattgacttaccacatgtgaatttgtcaactgatacaatgcatagcagtgttaattatcgttttaaaaacttggcagtatttttattttctttatttaatgaactgttttcttaattttggttttcttctatatatgccattgtagaaattagttatcagcttttctttttgaaatttcggattattttgtgtgatttcgtagtttgattctatttctaagttgagatgtgctatctatgctcgtttttgctcagtttttattcaaagagatgcgtttaacctgctttttcccctgttttccccagccgaatagcatgggagtttaacacccaacgtggaagtggattgggtggtgggtggggatccacctatacctggccaaatgggccgtgccaagccgggccggcccaagcacgaccgcactgtagaaggcccaggcccg

SEQ ID NO: 26268 - DNA, 2613 bp, Oryza sativa
aaaattttgtctaaaatcaaaaatagtttgtgactaaaaatagtgcatacaagaggtgtaaagccaagcaaaggtggtaagaaagaagtacgtcatatattcagttttatgtattattttatttcatgttatgcgaataaatattctgaaatttgtttatgttgttttaaattttcagaatggacgaatcgaacattccatcgttcacgttaggtgatttcgaccctaactacgtgtcgaggtcattcccaactggtaagtatgatgccaccggatcggctccaacaccaccagttatggagccaccggcgggttcagaagcatccggcactatgagtgggagtgtatcgacgaacaccggctcaaagagatcaagaacttccggtgtttggcaacatttcgatgaggtggccatgacaggccctgatggaaggcaggtaacattcgcgagatgtagaatatgcaaaaataagttatctgcgaaatcatctggtggaacaggacatttgaagcggcatgccgaggcttgtgcaaagaagcaaggaatccaactacgacagcaacaactactactaaatcctgatggtacggtacgtacgtgggagtatgatcctatggtagctcgagaaaatcttgcccgtttaattgctagacaagatttacccttgaactttggtgagagtcctgcatttgaaaattacataaaaaattctcataatcctaggtttcaagctgttagtagacaaaccacaacccgtgatttgaaaaatgtctatgacaaaggttatgaatcactgaaggaattatttagtacatgcaccttttctgtcagtgtcacctcagacatatggagtagtagggctaaagaggattaccttagtgtagttatacatttcattgatgatgattggcaaatgcaaaaaagagttcttggcttaaggttaattgatgtttcacatactggtgaaaatatagcagagagaattcgagaggttattgatgagtttaaccttgcagataaaatttttgctgtaacaatggataatgcatctgcaaattctagggccatggaaattctacaaccattattttgtatttatgctcaatcatttcttctgcatcagcgttgtgcatgccatatcattaatctaattgttaaatgtgggtttaagagagttaatgtacacatcgacgctgttcgtcaagcaatcacgtggttaactgcttcaaacccacggattgcacagtggaaaaggtattgttgtgcatcgggtgagcccccacgtaagtttttaaccgatgcagaccatcggtggaatgccacttattttatgttaaaggttgtattaccttacaaggatttacttactgttttccttcaaacacgtaatggcccaaaaaacagtgacggccagccaatactgactgatcatacctggcacattgttgaaaggttcaatcaatttcttgaaacgtttcatgactgtactctcttctgttatctcaagtatattatccaacagctaatttaattttgcataatattcttgaaattgccactttgttgaaagagtatgaaaatgatgaccttttaatgcccgttgtctttaatatgaaacaaaaatatcttaaatattggaaagacatccccatgttgtattcttttgcatttattcttgatcctaggggaaaattacggggattcctcaatattctttcacttattggagatattattaatgttgattattctacctattatgctgatgtcaaaactaaattctatgaggtatttcgaaagtatgaattaaagttttagtgagatcgcttgcaaagacccccacctgtccttgcagcaggtaagaaaaaattacagtggagcagaatttggggcggttcatcttctagccatggtggtggtaccagttcatcagcagcaagtggggacgctagatcgcatggtcctgccgaagagttgtccaactatttggatagtgatgccatcaggcatgaaacgtcagacttcaacgtactcgggtggtggaatgatcataagatgtcatatcctgtgctatcaaaactagcacgggatgtgttgacggtgcccgtatcttcggtatcctccgaatcagccttcagtctatgcggaagaattatcgaggataggagaacaagtctgagcagcgatcatgtggaaatactattaagcgtcaaagactgggaacttgctgcagaacatgcccaatacactgctgacaaccaagaattggccgcacagttcgaaaacctttatttagatgacgaacaattagggtagctagtttatattttttaagtattgacctgttggctgtactcttttctttgtcatggttttctcaaatatgagtttttacatgacaaagtttttaacgaggcagcatgtatcatgtaaacatcaataaaggtcattactctttttccccatatttttctaatatttttctaagtctaattatttttctatttttctccaactatctattaattttctcttagcttagttaactttcggacctttctctttgatttgaattgttccactgacagagtgacaggcgatagacacacgga

SEQ ID NO: 26269 - DNA, 2071 bp, Oryza sativa
ccacgacccatgggccattgacgtgcccgtgccggcatggtacggcacgacgttccctcgggccgtgcttgggccggggagtaggcacgtgggccggcacggcacggcccgctacaggagtcgtgcctaacgggccgtgccctagcgggccgtgccgcgggcgtgcccgtgccgtgctgggccgggccgcccgtttggctaggtatagatccacccaatcctggactggtggtgtttcccccggggaaatccctacacacgtgccgaaggaggccttagtgatcgtggtagtaacttatgttatgcggttttaattaggaataatgatacctggatcagtatgatatcatgtatacgtatggaggagaaccattttatgctaaatgaaatggcgaaacattaccagtagcagctagtaacatttattgaatataatcttttacttaagccatgtgtcgcgcagtcttttttgtctgatgtgttcaatctattttgcgcggtgcaactacgcgcggctacagtacttgtagcactcctacaatatatcctatcgcaataagaaaaaaaatgcccaatacattcttgttaaaaaaaagtaacggctttgtgccattacaggggggattgaatcgaacttttaacatttgaaccgatgaatgccatacgccccttcttccatctaacaaacaacaacgatctccatgaaccctgatgttatatgtggctgtatacaaccaggttgttgtagaggccgaatttttcccattatcaatgtggtacgatgatgtgtttagcccgtagcaacgctatttcgatgatgtgtttagcccgtagcaacgctacttacctggaaccactctctttgatttatgacatgatccatgttgaattaccgatgtatttgggggggggggggatgaaaaacggtcggaaacggtagcatctcttcggaaacgatgctccgaaacggtagcatctcttcggaaacgatgctcgatcttatcatttagactactcaatgtcgacattaatacgatacagaaacaaattagaaaaaaaacaaaatttttaaatagccaaaaatacaaaaatagcacggtcggaaacggcgctaagtcgatcgagaatttccgagaccgttttcaccccctatattggtaccatcaatttactaatttcaagcctccgactattttgttctgtttggttggtaccacatcaatcaataccgaatacttttatttctgtttgcttggttataacacatcaatctgactacttctgaaatataacaatacttttatttctgtttgcttggttaacacatcaatctgagtactttcgacatatgccagagaactgaagagacatcaagatcaaagagggatcctcttccgcgggaagagggatggtagaaacaaaacaaaggaaataatatattcgagaccagatttccataggaaataatatattccagtaccgattactctttgataacccacaatccgaacaatactagagtttcattatagatagctagctaagcataaggaacaactctaacaaatttggacaacgaacagaccaaattaaatattgaacgacggacttaaactaaccagaccacacctacatgagcttaagatactactagtactagttccgcacggatgaatcataaaaaccgtagtttaacactttagcatactcctgctgggtatatctctggaggttggttggtacggactcggccagaagtgggcggctaatcaagcaagatcacaccccggccacggtcaccgcggtcggcccggccgtcacggacaccacgaccgcgacgaccgggacggtccccacggccgccgtccccgccgcagccgccgtccccgccgtggccaccgccgaggccgccgtacccgccgttcccgtcgcgggcggggataccgccggggccggcgtccccagcggggccaccttgtccgccgtacccgccggggccggcgcgcccgccgtcgccaccattaccggcgcgtggttctcgtggaggccggtcgtcaccgacgtcgccccc

SEQ ID NO: 26270 - DNA, 6865 bp, Oryza sativa
acccgaaaccttcctccaaagtgagcagccatctctgatctgagtaagcagcggcgctagttttttttttttttttagcgagttggggtagaggcggagagaaaggtcagggcaacaggattttatagtctggtaggaggggaggaggggtaaaccctagtccaattcgggatttctgttgattttatttatttatatactttttttattgaaaaattacaaaaataaaaaatagaatacccgtttcggaacagctatccatctgctgacagattttgtatggcttagtcttacacattttttttttacggtcggatgtatttgagatttacgctacgctgagattcgtgcatggcatgagaaacaaaaactcttacacgtaccaggactcgaatccatgatttttaactcatccctttcactgagctaacttgtttttatagttacttacactataactatatattaattacatatgtaattttagtgtatttatgatgtaagtctgaaaattacatatgtaattttagtgtatttacgatgtaagtctgaaatctacttgcccatttgagcccacgtaagttttagattgtccacgtggctcgtttgtttgtttttttgtttgttgtttatgtatattgatgccatccgttagatgttaatctaaagggtaagaaatctgcatgacctatatctgtctcatgatgtatatacaggcagtccctaaaagttttgcatacctatactctccttccgtcctacagtaaggatggagaagaatatttctgtaattttttttccattatttgtttcctaaattggcggaaggaacatttttttttaaaaaaaacattcattctattatttatttttgaaatttttaacagaaaaacatttaataaaaatgattccaatttcctttcagccgcagcccgggatccctgcctattatccgagagacctgccccaggcaaaaaaataatttcatgggccaacttttcttcaattttgctatatatttgtcgacagatttttttcttaaaaatttaacagatgtaaccaaagtatacaactatagtgtaactacaatgtaatttgcatctaactttcacgtaattttgaaccgttagatttgttttaagatttgtgcaagtggagaagaaaaagaaactcactgcacgcacataagtaagaggattctgtcaatgaatgatactcggggaccggatgagtagagtactagggtacgttggaacaagggtctacgtagtacgatatcaagcagacaaaagacaaggattatactggttcaggcctcttgtcaggtaatagctctaatccagtttatatggtatttatgatgatgagaacagattacaacgagagtagtcgaattagatgataccgacgagattgtagtcgaggaattcgacgagatctcccagcgacttggctccgcgtactccggcttcgtaaactatggtgggtgtgttggcgatagaattgaatgcctttcaccgctccctggggtcccttttataccgtggatcatcttgaccccaagaaagatttgtggatatttgatctggtacggtataacagaagctctatccctttcgagtaggactttggaaagagatattttccataatttgaagcggattccatacgatattcatggggatgatctgtgtatgtgaaggtatatcttatcggtatatttcataagtcgtaggatagaaggtatgccttatccgtaaccctgacatattcgtttacatgatctccattttcaccgaaatagcatgttatgaagagatttttgaaagttacatgtaagttatagtgtactatcacgattgtactttaattacatctgtaaaatttatagtaaaaaatttatcgacaaatgtataggtgatcccattgtaacgggatatactattattttcaactactattgtgtattattgttatatataatatgtgttctaaagggtgatatgttttttttctttcacactccaacttgctcgacttgtaaacagatggtcgtaggaattttgaccgaatttacagcagaattatttttacttttatatttttattaaaatatttaaaattatttttgtttcaaaaacttacaaatctaaacgcctcacgcagtcctagatggcttttaagaaaaacaccctttcgaaaagcgttaatgttctaaatgtagctttcttcgagtcttttcaccattcaccaaagtagcctcatgcgtcgtacactcaaacataacaaatctcttaacttgtttgtcctgtttgctaatgctgaaacaactacaaactacaacttgctctcttttttttctcgttagtacgttttttaaactgttaagtagtagattttttgagaaaaaaatatgtataaattgtttaaaaagatcaaataaatccatttttagtttataataattaattaatcatgtgctaaaaagttttctcgttcctaaagcggttgaaggaacgcagcaattggcattgctatctctgtttccagcatagatttatgcgtaattctctggcatatcttatactttttatcataaaataaatcaatttttaatctagaaatcttattactcccaatatcccttatatatagatacgcccatattttcctataactaataccgtacccaatttgaataaacaaggaggaataattttataaagttggttttttatctagttcattggtggtatcattttacgttggaacatttttttagagtgttttttttaactcggagaagtgcgaggaccgatgcttaaattggggaagagaaggacgtcccttatcatagcaaagataagagatactacagttctttttctctcaccattaaaacagtcttgggatgaagggtttgattgtgtatgtttggaaaggaagttttgggtggataagatatggcgtcccctttttttgtgtgtatgtgtttggttggtgggccaggtgggatacaatggcctgaaagggaatattcccattggatgcaaccgggcgagcgcggtgagcggtcgcgtcaccccatggagaggggggcgacaacgatgaagatgtgttgtggctgatgcgggaagtgagcgccacatcagcgggaggagggagtagcgtcgagcccggagatccggagcaaaagatgagcgtgacggctgcaacaacgacgcccgaccggtgcgacgacgacgatgctagcccggcggcgacgacaacgattcactgctgctggtgcgggaagaggacgtggcggtgtgcccgaagatctggcacgagagatgagcgcagaggcgacgatgcgagcccggccgatgacgacgacaatgatgacgattcgttgtggccagtgtgggcggcgagcactgcattgatgggaagagggagcagtggtgagcctaaagatttggcgcgggaggcttgcggcggtggcaagcccggagatctaccctacttttttatttttccttttatttttatttttcttgttttcttttttctctgtgtatttataatggaggtagtggtgtaaaattgttgggaggagtttgatgggggtatatcaccatattaagtgaaaggtaaccacaccaacaaatccaccttactctctccaaccaaagaaaaatttggatcatcaaatccaccttcattccgttgaccagacaaaaaaaattcaccatatccatccaaccaaacaaaaaattgaatcaccatatccagcaaaatatgagcggccatatcacatccacttttgacagtgaaccaaacgcacctaatcatcaattgttgtcgagctggcagcttggctgctacagtacgtgattggatcacttgtcgtggttaaacttgaagataaacgatctcatcttttcgtttatacttatgcatataagctaaaatttaaatttttaaccttaaatttggagttgattttagggttttttcatcgtagtttatttttcggcttttgcttttagattgttatgaacatgtacgtagaagttttattcagaaattatttttgctttgtaaataggttgttgcaaacgatggggctgaaaagtaggggtccggacccctagagttaattccaactccagcaggtagatttggccaaatctctgccatctgctgttctctgaggctgagatgaagccacctcaatttcaactattttttttcttctgagaaattatttcatctaatctttataactaacaattagttgtccaaagaaagaagatatatagtgatttttggcatagtgattccagttcccggccaacatttttttttcgcataagaatggctttatctctattatataaaaaagaaatattgtatactattaacaaggttctgttaacagtgaaatttggtgtttttgcatcaacaggttctcttgtgttattatatgtatacgaggaaacattccgttggcacattattgttaattttgaagaagagaacatgtatactccgttaacttggttgcaacgttatcattgctaaatgttaagaaaataatttttcctttaaatccatgtgattaactgaattaattaggagacgtggcttgttatcagccgtagaaaaaaatagatggcagagatttagctaaatctaaccggtggagttgaagccaactctaggggatcaaacctgaaaattaggattttaccgaggaagaaaagatccagtgaagattgtctgcagtactgctgatgcagtagcagacactgacgtgtgggcccggacccatatgtcagccactgctaccgctcacctacaagcattctcagcgctgtgggccacacgtgcttcacgtccatatgttgcaattgacaaaaagtcactcgctgatccaaatgctccacgcagagagaggttctagtttcattgaatttgctttaggctcgtaattcgactttcatcgttatggattggtaccaaaccatgattaagtcctaggtaagcggactttggggagattatatgagtaaatgcctgaaccaaaatatgtcattgttatgggagcttgtactattaagggggaatattcaatacggatttgttggcaactttttgtaacaagttgacaaccacgatcgcagcacctaaagctttgcggtgatagtagagtcgccaaccaccctaatctagtaagcactagatcaagatgggttttgataagctaaaccggctagcaaagccgatctagatgaaaccgtagataactacccatctgtcaagggataaccctctctagcgggtggtcgtgagaacctcctttgtgagttcggccggtggaccgggcacaacgatcaggagcgtgactttgctctaggtggagtgggtgaagtggaaggcaaacgaattcgaaacgggggattatccaggttcgggctacagagaagcgtaacaccctactcctgtgtgtggattatcttgaagtggttacaagggagctcaagctcaagagaaactatcagctagtcttctcctaaggttcaagcttctgggagtcgtccccctgctcggtgggcaaggtcctccttttatagtccaagggcataccacatgcaccgcctccatacgtctctttcccaaaaaggggcctacctcaacctggtgggaccgctacccatgccttaggcaaaaagtaaggcggccacgcgatcccaggcggggcccagcgtcgtcctccgcctaacacgggggacattccttgtcattccctcataaattcatggagacttttgtaggcttggtgcgtgggatacatcggtccaacatcgatcccctgccatcgatgggacggggcatacctgccccctgtaacatcctgaaaattcaatacaataaaaatcactaaaattttgaactttttaaaacttttgcatcatgctggttgttatgattgctattgcttgccaaaccataaatgatcacaaagaaagtaaagtaaggatcgatatttaagcaatagatataatttatgagaatatatttaatcctacaaacaattatgcacaagatagtaaagtcaaatattaatttctattacaaattacaaatcaggtattagatattcgaaccatgattgatagcttgatgtcacaattagctaaagaaatagtaagattaaatctaattcatttgaatcgaatctcacatgaaatataagaacacatgaaatgatgatcaccactatagtgatcgtgtttataaataagtaattcaccggaatatatagattgatacttgcaacatgtcgccgagttactcatgacaggaaaatcactcatataaaataatggtcatataaataaattaatccttatatataaacaagaatatgtgagtgtttaaaattagattaatgttgtaccgagtcttaatatactatttatagaataaatagattcaacctatccgtgtaaaatatattgctataagttcattcaatgtgctattgtaataataagggccacactaggatattttagaaccctcaaagcctccaaaattatctaggctaattttagaattagacctcatttaaataatacaatagaaaaatatatataagaataaaatatgggtaatattaaaatttggtaaactttcatctaaattaaaacatatattgggtaaacctcatttatgtaaaattaggatttatagaatgaaatttatacaagggataaactaaaatcgggttaaatagaaaatggcactgttcattgcgcctaaggtgttcgatgtgggccctagccttccccctcctcttccacctctttccctagcc

SEQ ID NO: 26271 - DNA, 622 bp, Oryza sativa
taatcaattcggcctttgaatcaattgcatcgtgccccccagctctctgcccaacaccgatcagatcgaccgtgcaaggcctgtcagactgcccgaggtggccggtcagactgcccctggtcaccggtcagaacggccgtgcaatgccggtcagaccgctctggtctacaattttgccaatttcgcacaaaggtttaaaatcaagcacctgctcttctaatatcaaaaatactcccctcttcacattatagccagatgcttgttgtgctaaatcatttacttgagaattatcatgcctagcaatatgtctaatagcaaaatcatcaaaattggcaataatatccaatcattgatcaagatacctatttagtgatctgtccaaacatttgtaagttccggtaacttattgcaccaccaattccaaatcactaaatgcttccatgtgcttagctccaaccatctccatcacttgtaagccgaataataaagcattgtattcggcttgattatttgtacaataatactccaaacgaaccgatgactcataacacatgccattaggtgaaaataaaactactcctatgccttgaccctccttgcaagaagaaccatcaaaataaat

SEQ ID NO: 26272 - DNA, 1137 bp, Oryza sativa
aataacgaccgtcaacagagaccccagggttgtactccaccaggttggagcacaccccacatgagccctacttagactgaggtcccaaacaaagttacaagcccaaaggcctatgacaggtggcgcaacatcttgtttctctatttgtcgacggctgactcagaatttggagatgagactagatccattggaaagaggacttcgagagctttctatcaagtactcatgggcccaaaatggagctcgtatgcaaatttgggggctgtttgaagtcaatgctgctgcaggtggctgaatttgattctagaacttgtgtggcttgatattgctgtctctcggttggatatgagcaacggttgtaccaatagcggctaaccatcattgaacgattaactatttttaattttaatcggtattgcagcattgagaagcgagataattggtgcactcatgccccgccctctgagaccgcttgcaccggcagggcgtgtaatctcaccgtagcacccgacgagaacgctctacgtgtttgcccaccatcctgcgagaccgctactgtttgttcgcgataaccagatggtatacttttgcacttttatcccaaaccagtattttcttacaaatctgataaaaacatatattttcaattttttcctaataatgatttttccataggtccatcaatgacattgaaaatgccattgaagaggcaaatgaacccatagaatattaggtagatacaaaagggacatgcacctcaatttgacgctccttgtaatgttttatacgacctttgtgcataatctacaattgaaactttaactcaattgcctattgttgatgtaaaaacgcgaggcttaggagatctgtttaactccagtgcaggtccaaaacttgctttgggtgtgtgagcgtgccagttgatttgatcctccaatcaacaagaaacaaagacaaagaaaccgtgattaaatccataaacaatagccgatcagctaagtgccgatgatatatcatttatctttgagccgatgtcatatatgcatcgatcggcagtcattaagaagtaagaaagagctaaatctactcgatcggctgtagatatcaacggtatatgggtaccgagctcgaattcgc

SEQ ID NO: 26273 - DNA, 1245 bp, Oryza sativa
atgtcatttaagccgactaaaaggtcagtgaaaacagttataagttatgagttcccttttacttgtaaaaataattattaactatgagtagttgatgtgattgtataaatagatttaatctattggattaaaaaagataaatgatctaggttatttactaaagtaaagatgcactataaaacacctcattaatgtgacctcactaatgtaaagagagatcagatgatagtaatctcactgctggaaaacccttctttagttccggttttgtcacgccccgaactagtaccgaccggaactagcccgtgacgctccaaattaacctgttaatcgataccagtcccaggaaaacagtgctggtatcacagggagacagaatatcacagcaacagaggtctctttattatagagtagaagtacagtcatgttgggctgcggacagatcccgagctcacaactgcattacaaaagggaaacgggagccaaggcttggactaaacatacaggcgtgacttgggaactagaccgaaaccctaaaactcatcgtagccgacttgctcctggaagaactcctcatcaacgggatccacttcatcttcttcagcaactgggggaggattatttatatagagcaagggtgagtacaggagtactcaacaagccatgggaattaagtgtttaatgcaggcttcaagaaaaggctgttgtttttgcaactggttttatttaaactcctttttgaaacaactaagtgagtgcttctcaaacgacacggatgagacagtgtgtctcgtccggtcggagtatgtgcaatgtatcagtctttgaattgattcaaggttggcacccggccaacagctttcaagcggccacccaggcctggctgatcccatcagccgcagatttttcaaacatcgaacccattccacaacagtaatttcacaagcagtagtcaaacaaaactacgctaggaatcacctcacatccgcccatgaccgtgggcacggctgttcgaacagtttaataacctctgcagagggggtacactttacccacacgacattactaacccgaatcacccagcccgtgcagagcggccacgtctggagaccttgaggctttcatgacaaggcatttcgaaagccgacacaggttcaccatatgccaacgagaggggtcccagaccaacaccaggttaggtcccagaccatactgtgccaggaaacccgggggttctccccggca

SEQ ID NO: 26274 - DNA, 1900 bp, Oryza sativa
cagttttatttacgcctaattcgattttttttatccatatatagattattttgacttgaaattgtgaaattactctctacatcatcaaaaaaatcaagttattttgttaactatttgattggtgttgacaggtaggggcaccttttttaatgatttaataccggcaacatcataccctattttataaaatctttgtttatgcataccagctaaattaaggagttgatttttttttctcaaatgagcagaagagctgcgcatcatcatattaaggaaaagagatagcaagtaaaaggtcaacattttacaaagatatgtattcaaataccgtatatcataacttcataagagaacagattaatagaatcaatacaaggccatttatcatgatagacacccaggaaaaaaactcggagaaaacatagtggaaggaagcttccttatatctgacatatgttcaaatgacgcattatagcgcacaaaaatagcaccccgagcaaaaaatagcatcccggcatgctcgatcacatgcttaattcttagctttgtcctagtttctatcctcgttcctctcctgagcgcgagtgtagcacacaatttcggaccgtcttggacgccatctttactgcccccaggcataacggtttgtcttctcaaggataaataggacgaatacactgatattcggttttgggtccaaaagagctccaccgcaatgcaaccaatcccttgtctctccgtcgaggatcagtaatgcttcacgacgattgcatcggtgtaattgtttcgtcaacacagatctttgctcagtttttcttgatgtttctgagcctcttctatgttatcgtcttaaatttttcatgtatcttgtttgtgcgtatgctcattggattgtaactgagatgacgacatgctgctccccaggccaatcagtacatacctgcatacatgatacaatagttattatgaagtctatagtgaaaaaggaacgcacgatgtagaaattttattcaaaagcatcagatcaacatgaaacctttcggatttgggtccgtggcagcagtaccagagatctttttttttctatgacatcctgtgagctgcaatagtcatacatgtgcaaatttattggaatggtctgttgttcctataattctttcttataataaaaaatttcaggtaataaaaggtacttacaggttcattcccatttaattttacaggagggactctcaagccccatagctgctcaaattcttgatttctgcgatgacggcctaggtgatgatcttttcgctgcagtggccactacctccgagcaatttgcagcctctttcgaggatggttcatcgtcgtccacagccacacctcccttttgcagcaacagcaatgacatcacagctgttgcagacacagctttctccccattactctccttcgactccaccctttaagctttcttgagcaagagcaaaaccctgaccaggacaccaagctacttccctccattgatgaaacctttactgcaccagcatactatccagctgccaccgaggccaacatagaacaattcagccaaataatggttccagagcatacagatgcaccaatgcccccaatgcaaacaaacaggactgccaatgccttgctgcctctagcttcagggtatgacgacgagtgtttcacagcagcactagctggagggtacatgggtctggatggaactctgtatgaccaaacaggagtaatgattccaaattgcaatgtggagacaccacaagtaggatttttcaaccataatagtactagtaacaatggtatggtgatggatttgaataattttggagagtaccacaggatgatggaaggtgaaggacttgaccagaacatatagcgacac

SEQ ID NO: 26275 - DNA, 1054 bp, Oryza sativa
attattctcgtcgctccctccgcattgcacgcaccctctaggacctctatgagatgcatgtacacaccttccgttgcattgcaagcatatatgcatctatgccaagccatcacgtatcgcatgtgtagggattagagcataattaattacaccggccgaacccatgcacgcatgctacctaccactgttgatgacataatttgctaatggtgccatccaggatatcactatagagagataatagagatacatgcccatgagcatcttcggatcatcattgacaccaccaatcaatcaaaccgttttgttaactgctggcagcgatagctagcattgatagagtgtgccatcgatcgaccttggccgcgcgtatataagcactcgccgcattcccatgagataactccacacacaaaactgttgcactccactgcgctataaatagctacgtgctgcattcgcgcgcgtgtgcatgcatggcagcaattggtaacatgaatttgttcgacttgttcttcgtcttgcagcttctcctgtcaggagtatgcgtgctcgtcatctgctaccgatatcagcggcttaaatccatgaaaaaatgtagcctatgggttgtccagtggccgatcgtcggcgtgctcccggccatcgtcgccaacatgcaccgcctcctcgacggcgtgaccttcctgctggccacgtcgcagctcaacttccagtgccgcttctggctcgccggcttccggttcttcgtcacctgcgacccggacaacgtgcgccacatcttcacgtccaacttcgacaactaccccaagggcgacgtgttcgccgacatgttcgacgtcctcggcggcggcatcttcaacaccgacggcgagcggtggcggcggcagcggaacaaggcccagatgctcatgaccacgccgcggttccgcgccttcgtggcgcgctccagcctcgacaaggtggagaagggcctcctgcctttcctcgcgcacgtcgccgacgcccggaagacgtgccaccttcaagacgtgttcacgcggtggtcgctcga

SEQ ID NO: 26276 - DNA, 576 bp, Oryza sativa
atttgtgaaataccatcagtatctaacccaattattttacctgaacagatgggagaaaacgcccagcacatggtaactggatgcaatgatagcccactaacgttgccttcaacagaaggctcaagcttggaagataccccctacaaaggtgtgcgtctaacagctgaacagagaaaggaaaagatctccaggtacataaagaaaaggaacgaaaggaacttcagcaaaaaaataaaggtaatattgaacatttcaagaacataactacatgcatcatcttaccaaatttattgtactgatgtaaaacaaaatgcagtacgcttgtagaaaaaccttggcggatagcaggcctcgggtccgcggaaggtttgccaagaacgacgaactctgtgaagctaccagatcaagctcccaagattttgaacaatatgaacatgttgtaagtgtctaactatcttatcagaaaatagccaaatttagctgaaaatatcacaaataaatatgcaagggcaagattacctcattagccttagagacaattcatcaagatggttattcaatcatctcatcattttt

SEQ ID NO: 26277 - DNA, 644 bp, Oryza sativa
ctggcttggccatttgaacttctcgtgcagctcaaatgatgtcacctcatatcccaaagacgctgaaaaaagaccttgaactgcaaggaatttcaatacctcagtctgcactagaaatttttcttcaatgcacttaaccatttcagaatctgtcagtgaattccctttagatgtcagcttcagattttttaaaacacaaggaattgtagtcactatccaacttttcaaaaggtcagcactcccttggccaaaaaggtccttatcttccattgaaccaacttccgaattctcatcagttgtctgactttgatcagatggttcgtctgtaacagagctttcatctacaaagagtgacatcaaactctgcacaagacacaaacaatcttgaccacttcggaacttggcaaccaaatctttaacagttctcgtttttgtcatgcagtcaaatcttccaccagtatacttctgcaagttagtaataacagcaacacgtcgatcattatcatcactcactaaacttactaactccttcagaaaatgttggccggcattgtgcaaccatgacgattcatttgacagaacatccatcaaaccatgaacaaccttgctggacagaattacttgaatcgaagatggggatagcc

SEQ ID NO: 26278 - DNA, 3194 bp, Oryza sativa
  unsure (1)..(3194): unsure at all n locations
aaaccaaacttatgtgcatcacaaggtgtgattttcaacataattgatacaaaataagagtgaaagttgccataatcacaggtcgatttcaaccaaaaggcagtaccattgatgtcagggggatatcttatctattaaacaagaagccaagtacaacatgcaaactgaaacaccaaagttttcataaaaaatgttttcaggtggtatgaaaatggttgctttgttacaccttttgagaaatttaatttaagattgtcctttttgctggtcatttttctgtaacaattttaaatgtatttgatgccaatgataacctcttatgcgatagaccttcaactaaattttaatgtccctaattagattacacgcataaaaagcatagtcataaaaagtgcagtatgtgcctgaggcgcgtacttttccagctaaatccaggatacggcaacagcgggctcagttaaatatcgtttcttgctaccaagtttgataacctcatccacaaaatccttgacaatgggagaaccttcttcatgtgcccactgtcccgagacccgtccagacctaacaattgatccataaccaaataatcgtcccaaaagattgtccttagcttcctacaaaagaaaaatgaaaaaaaatgagtaaacaaattaacatcacaataggcagaaaaaatcagcagtaactaatcatcataattaccggtcccctcattgaagctgaatactctaacaaattaggtatcaacttcatgattgcttcgacgctgattgcatgaattgattcgagcacaactgcaagacccaatgcgaatccttgccttgcaaactgcaaaccaagttcccaagcataagatacgatctaactgtagcggatgaccaatgcaatacacaaagctaaacttcgtcatggaattggaaaagcatctctaacctctctagaagaagagataccgcgaatgagccgccgaatggcgtaacgcaccgacggcgcgcagttctccaggccatcgtccttctcggcctccatcctcgacgacccatctccaccctccgcttcgctctccccctccttccgcccacccttctcgtgcgccacctgcacctgcctgagctccgccacgagcgcctccgccgcggcctccctctgcgacgcctcaggcgaagccaggtccctgaacacgttcatgtgaagcccaggccccgacaccaccggaatcacaggcggaggagccacgggcgccgccgcagccgcagccgcagcctccggcgccacctccgccggctgcttcggcttagcggcagcggcgtccgattcagcggactggcggtgcctctccttgtcaatctccttccgctgcttcttccgctccatggccagcttcttcttcttcgctggcgcctccgcagccggggccgtcttggctgcggcctcctcctcctcggcggcggcggcggcttcgggctcggagagcgcggtcggcggcctcttcttcccggccattgctgcgccccccgcgaatctcaagctcagctcgaggcggcgatggctgcggagtagaagggtttatgccgaggcggcgatggctgcgaagcttggagccaaccaagcctagggtttctcctctccctctctttctcttcttttttttttcttttgtatacgtatagtcgaggaaccagaggcccaagaagcgacccacctatgcggcccaattcagcccatgtgccaggccggcccagttaggcccacatgccgggctagtatagtgatctcgatgacacgtggggtcgggaggttgacacgtgggggtgaggctgacgtctggggcccaccgaataaagcagaggaggggggaagagaaganaagggnaggtgcagcaatggcggacaagccgagccgcgggctggtgctctacgccgcggggcacgcggcgctgctccctccggcgagcgtcgcgtcggcgtannccggagtagaaggggaaggaatccacctcgacgccttcgcgtctctcgcgtcatgtggcttcctctccctccgctcgccccctctcgagagtgggtactactgatccagcgattctctcttctgcgtcgtctctctctgtgattctactcgctgctctgaccgaatggagattttccttgttttggtcgttgtaggtggggaggagaagcgtgacagcacgattcttgagctcgcgcagctgctcgacgtgtacgatgatctcttccctgctaaggtgagatcttgcttccaccggttcgcacttaggagggttgattgtgcgagaatttagagtaggtagtgctgattgtaatttttgcgtgatagactgagaaaactggtcaagagactgcccaggtggatccactgcaactagcagttcccaagctatctgaaggttggatgtgtgtgatttttgctttgttttctgtaacattgttcatgaattaggtctaactagctttcatgtggtatttgtaatgtcaggtttatggggatcagagctgccatggtcaccaattgccccctgttagttcttttgcagcaaatcttggttttcatgtatccgggactgaagatttagttgcacaatctggatcttccgctgcttctaaggaggctggaattatttcccaggcgttaagtctgcttggattttcagaggggaatgttcaggagacatctgaatttgatctggtgtttctgcatgttgccatggagaatacaaacagcaagttgggaaaattgggaatgaagactgatctaaatcggcttgataaattagttggtgcaatcatgaaagcggcgcccataagttcagctatcgcctcccgtattcttgtatctgtgatgttgagctatgggtctgctgctgaaaataaggatgagttttccatctcaaaatcttcgactgaaatagattctgacttgaacttgcttcgcccacgccagagctatactatgaaagcaggaaatacattggatgatgttaggtaggtgttgttctttgctgcaaatgaaatccaaaaagttatttccaagtagagcatgttttgtctgtagtaatcatatttatgttacacataataagaattccattagattttgtctgctatatatgtaaggtgaatagtttcacggtcttccaaatgtaattactgttgatctttcgctgcatataatg

SEQ ID NO: 26279 - DNA, 4920 bp, Oryza sativa
cgtgcatgcgcggcccacaccagaaagtacgtctgacacctccggcgatcgaccaccgggttccgctcgccggcaaagtcgccgttccacgttcccgccgccggcgccgccaccgccggccgtaagttgaatctgcctccgaaattcatcggctcgatctgttttaactgttttagagattatctccattattattgttatttttttccgtttttgtttctgagcatttcttcctcagttcagagctaaccgtgtcacagttactagacaagctgaacgaactcaattttgaatttctagttactcgaggataatctgattaccgagtgataatccacggtatatacatcattatctctccttccgaatcgcatgttagagtagaggatagtgctaattaactagaggatgagataagccgttggacacattcctgcatgcaatgcaaacgcaaagcaagtgtgatccatccatgcgtgaggatcggagtacgtgtttatctgatggaatccgcagattcctccggaatcagcagcgatttctccctccctcccgatgaatcgccgccatactctcctcccctctatataaaccccacccgcgggactacgtcatcatcctgccactctacaaagagcttaattagctagctagtctcttcgatctgcttctctctttggtttccatggcttcttctcgggttgtcgtcgcggtggcgctgctcgtggcggcggtgctcgccgcgttcggtgcgctggcgccggcgtgcgagggcgcgagggtgatgcgcgagggcgccgccgtcgtcggcaagatgtcgagctaccagccgccggtgaggcataagcctcccgtcccgccgtcggggccgtcgcacaggcacaacaagagggcgacagtcccgaggaagaggaagcacttcccgccgtcgggcccgtcgtaccacgatccgcacagctgagctccggcgatcgtcgtgcgcggccatggaaaagacggccggccagtcagcatctctctctgcagtagcttcattaattaattgatttaattagttaggaattataataataatagcaggagagattatctagcttaattggtatttccttcttttgattagtttggtaggttaatttgaggtgtaatgcaggtattgttaattagcatttcgtatagaaatgcgcatgatacatgcatgccatttagtttattttttagatgtttctctacgaattattcattttcttaaataaaagtactttgcttattaattagttattaattgggttaaatctctactatcttaaaaatggagtcgttcttcttccattctctcatcctacatagcacatactaattacacatggaggtgagaaaaacattataggtgctgattttaactgtttcggcacctatagtgttgatctctatatatattttagtagtagtagtgacgttacacggaatactggtaatattataaaaatctcatttacgatttaattatttgccctcgtaatattgaaacactaattcatacgctaattcatgtatctttggagacgatttctgccgaccgttgctactcttaattaaaatgggttttctaattgcatctgaacaaaattcactcagcctcaagattaatttctttagtgaaatgttcacttaaataagggtttattttattttcatcactagcaaaaataatagatgaaacaaattatataacaatccgtgacaaatcttttaaaatgttagaggattaatttttatggaaactgaactaattcttatgaaaatcatataacccaaatatttctttcccaactagcaaaatacccaagctctgctacagataaaatatattatattataatatgtaatagacaaaataaaaatatcaaatatattattatcacttatatgcatgtttgaatatatggtattcacgtgttttaactaaatatttaaactattccataatattagaaaatatcaatggtaaatttgtaaaaagttataaacagtgctggcgtgacagacttttaaatgagcatagatgtgacacgatccaaacatttttttaaaaaaaataaaataaatacacccacaccgccacacgaggtcttgtgcacgtactagcctgcaagctgctatataaatataccacaaggaagcaaagagaactgaggcgcgtctcgcactcttgctcccttctccctcctcgactgatcactgatcgatcgatcgatcgccatggctcctccttgccgccgtccgtacgccgtcgttgtgccagcggtgcgggtcgccgtgcttgtcgtcgtcgtcgtcgtcgtcttgctcgtgctgctctgcggaccatgcgacggcggcgcgaggcacatgctgcaggaggagagtggtggcgcgtgggcgcggcggtcgccggagcccggcgccgccggcgtcctgcaccgccggacgtccgacttcctcccgccgtccggcccgtcggagcggcacaacgctcgcctcgacgccgacgtcgccgagcgcggccagagctcgccgccggcgtcgccctgacgatcgaccatgtgtgcaagctgctcatgaatattaatctactctctcctcttctcttctgattcagtgaaagtttggaaatatatgtgtgaattatttcagatgttttctatcccgagtgtgataattcagctggattctactctgtcatctgtccattgaaagatgtatatatatttgcagagattcagagaccaagaatgtctggctttctgaaacttcaaagatgtttattcttggcagagataagactgtatttggttgatattttgttcatctagcatgcttgcatagttgcatgaaactatggaacatttgttagtttaattctgtcctattaagttgttggcattattgtagacttgctgcacatggtggagtggttgttcagttatgtgatacatattcaagtaagctagatatcagcaggtgactaggtcttccctgtgcatcatctagtcatgctgctctaatgattctatcctgaactagatagatagatttgatatgcttaaatgatgctcaatgatgatgtaactgttgcataatgcatatatacttgcagttgtattagttaaaaaaatgctaaaatgttgtggattaggctctgcatgtagatcgtgttggtgtgtcactggccagagcttgcaacagatttacctgctcccactcaccacttttgcacttcacaccagtatgctgcatgtaacctgtatgcatgcagctagccagttccccccaactgaatgctagaaatgatatgaaattgcacatgcaattctgggataatatggcatgcattgacataatttaccaattaccattgagatctgttgattttgttctgaaacggtaatatggtactaaggtaaaaaagtgccagattgttcatatggcagatagagtcatcacacactgccaggctatgaggaaaatgcatgtacaacaagccgagttgccaaatttggcctcgaattgacaaagacaactcatttctccaagcttgatgcttttggaagatgatcaataggtgatataagctaagagcctagagtatcagctcatagatataggcaaggatccatgatactgatggtataaacagttattggaatttggaattgcatcaagatcatggccggctgaacgctggttactgatgccctaggagagcatcctggtcacattatctgacaactcatagacaacctcttccatgtcctcagagataccattctccttcagagtgaaaaaaaaaaaggcaaagtgaaacagagtaaaacttagtcagacccacaaaaacaaagatacgagggaaaaaatgcactgataatttactcataagatttaccaagtgtcaggctaaaatttaagcactgtcatcatactggcagtaggcaaataccttcgggcctttattccctctaatgatgcacgttgaagcactgatactagcactctttaaatagatcttaggattggagtttagattgattatgccatttggataagcagatgcacgattcttgcccttttcttgtgatcttgggggacttatcatagttcgggcaatagaagatatcgctctcctctcttcattgtcagagtcttgattattgctatctactgatgagcatactctttccctgtcacatgattttttttgtaaagaagcaagcagaacaagaaccacataagattctctgttcagataaaaaaaaggattttaggcaattttaagtttcaggagctagtgaattccagctatataccttggcaaagacgcatgctgtctccgcaagggggtacttctttctcctctgctgtagttctcctcaagatgagcaaactgccgtttgaaacgatcaaccccactgtaaggagttagtattagcaaaagagacatggataagggtgttggttatatcacctgccagcactatcagcatgaaaatatatacaaattatgttttttcactatcgtaaaacaatcatattccccggagagtagaaaataaagcaaaccagctaggtatgaagaaataaagcaccaccgaatgaacaatactttttttaaagcacgccagcaaactagatttaaaaactaatttgctcaccttggatagaggaagctaatttgttctccacctctgatgtactcctgaagcatttggggatggtactctaatatctgtttactttcagaaaataaaaaagtaattttgagtgagatggatttatcagccagcccataacataaaatggagcggtagctttgtacctctcgataaatcatttctcttacatcatcctttgtcagtttccttcgctcaaattcaaactcaa

SEQ ID NO: 26280 - DNA, 20191 bp, Oryza sativa
  unsure (1)..(20191): unsure at all n locations
ccacgctgtacgctttatgctttcggctctgatgacgcgcgggatggctagcggtccccttctcacacaggaaacagatatgagcagggtggagcatccattgcttttgttggtacgtttctcaagttaaccctcctagacgaaatcaacatgcaggactgtcaatttgtcattgcaaaaggagggggaaaaaataatcgcaggattggtttgaaaaaggaaaatcaggatatgggagacaaacttgaaccttcgctttatgggcctagtcggccctcggcccattcgagcccaaacataaccctaacataagtcttggtccttgtccctcgcagcagaataaaaaatcgccgccgccgccgccgccgccgccgctgcccgtccccgcaacccaacgcctgattcgcttctccatctgcttgcattcaaccgggttgtggaggaggagtaggagaaatccggtggatatcgatcggatccagatgaacactcgactggattccggcggacagaagtaaatccggagtcggttttttcgtaaatcgcaggtactctacgcaatttttgatcctaattgttatactagtagtaatacagtgggagatgtgagtaataattgctggattatttctggtttttgtacaaggagaaatcgaggtacagatattcatgctgcctcgatgtgttggaatcaacaagatgaacaattaacatccgaagcacaaagaatttcggataaatccaactaatcgatcgatcgtatatgcaactagtgcatatacatatctagtagattcctgttcataatttggaggaggaagatcagttatgagttaccggcgatttgtgaatctggtgcttgataaggtccaaggcaactacacagtgcggcgcatggacatgtcacgcttcttcctcccccgtaaattggcaacgccgctggacgccggagcacacgacggcgcggcggcggtggagtacggcaatctgccatgcccggtgatgagcttccgtgcatcggtctgcccgatggagacgatggagttcatgctccttggtggaaggcataacaagatagtcggcaccgacctgacggggcgcaccctcctgtacgaccccgacgagcacgtcgtccgctccctgcccacccttcccatgcccaagttctcccccgtgtccctcaccatcggcgacgacgacctttacatcctcgacgacatccagggcccgttcaccggcggccatgatcactgcttccacgccctaacctatagtagggagagcttcaccgacgccgacggcgactggtgttgcaacactctcccgccgcctccttacatggtgaagcaacgcggcgacttccaattcgactcctacgcggtggtggatggggtggacatctggatatccaagcaaggcgtcggcacctacaggttccacacggagcgcggagagtggagcgcggtggcgagcggcggcgagtggtgcgcgatgccgttcaccggcctcgccgtgtacgtgccggagcacggcctgttctatggcctcgcgtccggcaccgacaacgtcctatctgcgtctgatctcattagcggcgggagaaagccggagcagcacagcctccttcctctggagtacacgccgcccaaggcgttgacgcaggtgtcttcccacctcgtgcacctgggctctgccaacttctgcatcgccaggttcttcgagaccggcttcttcgacgccgacgaacaacacaacccggagctgttcgctgtgttcaccgccgtcgaggtggagcgctgcgacgacactggagtgctccgcctcgtgaagcacaagtcggagatgtacaagcttatcagcgaaatatattattgggtgctttaatcagctattactccctccgtttcagattatatttattaaaatcaaatgcttaatttatattgggtccgtgaggggacagtaaagttctttgcttaatttatatttcttatttcccaatttccttgtaaatcagatgatatattttgcttggagatatcattggtttttccttgtaaatctttttactaattcatatcattggtttttcctgactgcaaatcacagttcaggtcctctcatgttgtgatttaatgttcagaaggctattatggtttatgggtacttgctctaatataaattttgtcaaaatatatgtcgaagttaccataatattgcagattactctttcatctaatccctgaattttagattggtgcacagtgattagttaggttattttctgactaatgctgataaaatcgacgtgtacactcttgtatgaaatgaacagtttctactattctatagggacaaccatatatctttgagaatattgattttatccgcgttggtcgggcnntnaccaacccttgcccggagcccatgatccttatagagactgctgttggccttgaatttatcccccaacatttgtatgcatggaaatgtggtgaaattttttccagtgattcatcaatataatctggtgagttgatcatgagctggatataatccaaaagcttctgttgatttctacctatgtcctttctgttgatcgctatagggtagattgaatgagctggatatatctttctgttgatttctacctatgtcatattgcagcatagggccataggggccatgcacatttatttgtaattcagatgaacctcatcctgtgcaaataagattgttaaatgctttctgttaatgatggacgctcaactatcaattctaaatttgggtgcaatgtgaatcaggccacataggttcagttggatctgttgagtttcataaggaagaggtgcctatgctcgctgattcatcaaacagctccatcaaagctgtagggcttgggatagactaatggtatgacggaaattaaaaatgattactatggtcaaggcattttttttttgcttatattcttcgatgcatagatatttggttgtattgttgacaaaaatatttgatataacattttattgattcacgcagattaaaaattgatttcacaagcaaacggaagcgttgtctctgctagtttactggctgaagagagtaccaactaacacaagaacagatctaagcatggcacaaaacttcttcactttccagaagaagttcagagaaagacagtctcaccgtatcatgtcagagaaaacttcagcagattcccaagtgcatgtccctgaacttccgcttgattcttcctggacctaggctttcctgggattgaaaaatggcatgcacatctcatgatcaataatatacataatttaaatcagaatcatgtacatctcatggtcaacaatatacacaatctaaatcagaatagtttgcgctctcatcgatccaaggttgccactttaattgctttataatattttaacaatgttgttttcttctccatagcaaattaataaatcaaaacgatggaacatgaggctcaattcttgtaataaatctcatactattcttgttgaacttcattagaatgatagattacatatttacagtgattaagcatatatagcattatagaaaaaaagcaataggacaagagtgcaagaccatgactaattcagacattaattcagtgactattaactattgattcaccgggtgcttagttgttcttctagctgctgttgctcgccgcctaatctgctagctgctcggctgtcagcgtcggtggtctcgttgcccagtcgccagtcgcatggtgccttgcgccctcgcctgctctaccgccatatgctgctcgccggctcgccaccgcggcgcccggctgctgttgcatgcctgcgcccgcctccacttattcgctatcgcgggctcgccgaagcacctcgttgctggcttgtgcttcacccaaccacccagccgcgagtccccaaccctaatctatggagagagacgtgtgcgtgaggtcacggctgcaccaggatcgcatgacgatgacgccctggatggatgagtggggacgacgtctttcagcgaggcgccgcagtggcgatggggaggagagcgcggaggaggcgcggtgtatgccaggagcggtggagggagcggcggagagagggatcgagccatcgagggcgagagatcgcggtggttgtgaggaacgaggagaggtcggcgactcggggggtggggaggggatgtgcgtgtctgccaatagcacgcattctgaagcgttagatatctggatccaatgggtacgattgcgtgtgtctgtcagggttggagtcaccgctaccactacagaattttaaagtaatagagatacacgctatcatttactaagaaggtgtttcttttccatcctattgtcacttgaggtgccgttgaggagggaaggtgttggaattgccaagaaggctgaactccaccaattggtctaccactcctttggcaagatcagcctcaacctgggactgtggtagtttgacatgttaatcaactaccatcctatgggctatttgacttggtgttgtaacacattctgttaacaatggttttcactaattagccccaaaagacaatagattgattttgtaaaactgaatcattattagctttcttttgtcagtgctatatatggtcatagattaatgtgatccattactttggtcaccacttgggacaaccatgctcaaaccaaatgcaagatcttcctttggatggcgcacaagcgacgtatcttcaccaatgacaggcgggtgcgacgcggacttgcaacttccgcgtgctaccccttctgccccatcgacgaagatgtggaacatctcttccttagctgctccggagtggcagccatttggcactcctatggactcgatgaacaacaagtcgcctccctagcacatctcgaagacctatggggtctccctccccctgacaatgctctcaccccacggatctggcgcaccatcttactagccacggtttggaacatctggaaacgccacaacaacaagatcttcaactccattgatgaagcccactcggtagttcttcatcgttgcgccaacgatatcgaattgtggtcaaaccgatgtatcgacgttgtaggcaaacaacaacttcactcttgggcgctaaatctttctgtaattaaccactaatttttagtttcttccctccgtccctctgtacctccccctttgtaaagtttttttttaccatatgaataaagttcaggctggtgttcaaacccgccgtagtttcccttaaaaaaaagatgacgtatgatatctaaagacaatacatacgtaatgcatatataaaattagatttttgtttttttatcggctcataagctagctcctattatttcagctattttgtcgtttcgcatatcaacgaaatttcactgcatgattttttcatctttttgtgtaccataagctacctcctgtatttttcagctattacaatgtttttggagattaacaattatcatgtttatcatcacggtttaattctcccatgtatgtgtagtagcacaaatagttaaacactatctagattttagttaagcggatatgccaatgtgtagcagaatagtttaaagcactatccacctatcgaataaggtgggcaaattgctttcttttccaatgtactcatgtaactcatcatgcatgtcgaatattcagtttgatcatttcagattccatagagaatgtatggatttttttaaaaaaattttagacatttttatttttttaattttattaatagacattttcgaaaaatattttcaaatgtcacatcctgatttttgtttcaggatttataaattatttaataaattcttaatagaatttatattaaatgttcattaatttacaagtgaagttaaatgtgggaaataaaatttcctaaatataaagcatggatggatttaattttttattaaattctccatggttaattatactctctggaatattctcggattttttggagctcaattcctaatttttaatcatacaaagagcatttcagtgattacccacatattaaattaatcattaaatggtctaattataattttgttaagtactttgagtgtccaagtatgttcaagatttttcttggaattatttgagcattggaagtatttttaacaattcaaagatcatttcattgattaatttaattggaaaaagtaataaaaatcctcctcctcagcttgggccgaatccagcccattccctcctttcccctctcccttcctctcagcccagataaagtctgtttgacctccctatcgctacagtactccatcttcctcctccagacagagccgagccagccgtgctcgtgcacagtgccgccgcctcctcccaccaatccgacctccccattgctcctctttccaaattagttgcgggaatggaatcccctcaatctcctcttccttttccccaagaaatccccaaaattttctatggaaattctttccaatttcgcggatcaaatccttcctttttccggcgagaaccctagactttcccgagtttttcccgtcgttgtgggcttgatcccgagctcccgtgcctatataaaggaccccctagtcgtcctctacccatcccctcaagtcccgtccgccgccgtcgccggaaacgctgtccccgcgctctccttctctctccaaacgccggcgcgctccagccgtccctagacgccgcctcatctgcctccttcctgcgccgccacctccatcggctccgcaaggtcgagctccaccccggccggcgttccccttgcgccgaaacttcgccggaagccgtcctcgccatgaaccattgggttgctgtcatgttccgatctccagccgtagctagcagccgccttagccgccgcttttggtcgccgctgccgccggtgggttcgcaagaaggagagggagcccagcagccatctccccgaagccgaaatccaccagagctccatcgtcgccgtcgcgttttgatctcgggcgaagccctgctgctcctcccgtcatcgccaagcttcgccgctgcctccattggattcgcagctgcgaagtgaagcccggccaccccttcgttgtcgccgcacatcgccggaaagtcgtcgcctccgtggacagtacctcgccgcccttcggagctcgtcgccggccatcttctgtcgctgcccgtcatcgtgtaagtgttggtaagaatcgccgtcaccttctctacctcccggtgccctccgtttgcattattgtaccgtggttcgccggcaaccgccgctcctatgtcgttcaccggtgtagtttatccctagagtcttaattccatctaatctaatcttgtttggccctagcgtcatcatcgtctccgtgtgttgtcgtcggaccgtagccgtcgcctcttcctctccgttcgctaccgtttctcggtgaggcctcctctccgattcctagggtagatgtttatgtaagccacgtgtgtgtcgtcgtcgctgtgtcgtagctgctgcacgccgtgcggctgcggtttgccgtcgctctaccgagcctcttagccaccgctgcttagtcgctaccgcgtcgcgccttgccacgttgccccgcagctgcttgccgtgccgctgctgcgcgtgtgccggctgagccgcttagctgcagctgcttgccgctttgccgcgctgttgccctagaggcctagacttagcgcagccgcagtccgtcaccgtgctgctatcatgcatcactaccgctgccgctgtttgccgctttgccacagccgcagccgtgccggttgcgtttttgctcgcagccctgctgctctagccgtgcatggtcgctaccggctgtgccgtcaccctaaccctagctgcgtgtttccgcctagccgccgcctagccgagtcaagttgtcttagtgccgccgtgtcgcagctgtgtgccgcttaaacctagccgctgcttttagtcgagttgtgtagccgtaggtgcaaccctaggttcctaccggcctatcgtttgtcgtaccagggctttaccgtgaatcgtgtctagccgaccggtttagccacagccgttgttgagtcgttcgctcgttcgttcgaacgaggtgttccccgtgcttcgttcattcgtccgtgttgagtcgtcctttagtttagagccgttcagagccgtcggttctgttcgccggttttggttgatcatttaggtgatctcatgtcacgtggagttgactcgttgagtcggtatctcgtgaggctcgcttgccagatcaatccaagccatccgatcttagtcgactcggtcaaggttaatctcagctgtccaaaatcaatataaatcctctcctcttttcagtggcatattatttctttttaatatatgtcatctaccaaatatgatctaatcttttccggaggttgctttaatcttttatctccgttataaatcatttgtaaatgatttaattaatttggaatagtctccgtttaataggtttaattggaattaaatcttgtaaaattcataataaattcatatgaaatcagaatgaggccgttcaagtctcataattcatctaaaattatgatctacatgtttgtttactttttatgtattgtttatttggtttttattagtcttttccttgttttgcgtgttagcttgtcgtttccgtcgttgcgaaggttcgcgagtgcgccggaagtattcaagaagattaattgaagaccgattattgcaaggcaagtcacacaaatcctaaacacaatcctttgagcatgttgatcctatatttaaattctctatttatttcaactgtgcatttattttcgaatgtcattgggtggaattaacctattctttgttatggcccttttgttcttgattactttattccttgataccttgggtgattataattggactagttgagctttatatatattggttcaactagatattagatataattgcttagccatgcttagaaacattagcacactattgggataacttatgactcactgttatttaatgatggcttaatggtagctcacgatggttaatcgtgttatgataattaattggtaattaaaatatgattaatggtgggttgtgagcacatggttttgaaggtcgtgctcatggcaattaaggaccggttcgcgagctacagttgtgaaacattaaccgtgccaaccacaagccagcgtgagcaacggctttaccttttgtataacatgattcattacggagcaccagactgagaagtggcggagataagcccacgggggtcgctggggagtccatgccttgttttataagggggtgattatgatccaggaatggtgcactgtggtgagttgtgttgtgcagagggtattgtcacagcctctattcgggtactttccagtatcgcgacgcatggtagacatgatgttgaggctgtgtcttgtgggtacagtggtacacctctggccagagtaaaactattcgaatagccgtgcccgcggttatgggcgagttgagcaatgtttttcgtgattagtctcacacctctcacaatgattaatgatgttataactggtaataatttgcttagctcctggtttggaatggataattcctggtttggagattagatctgtacagtcgggtatggttgttcaggatggtcgggcctgtgcagcatgggtgtgctgttcggtgttgattaaaatttctgattaactactctactgttttatttctcttaaatgttttgctaaacgctgcttttgcaaatgagcctatattatgccatcctttggtatccttgtgcacttgcatatttgctgtgtggcttgttgagtatgtcatatactcattcttgcaataatcaatcaacctcagttgaagaaaaaggatccagaaggagaagacgtttggcttataccccagttgagctgcctgtgggagtggagctgaagccatcgctagaccgtttttccgctgctgttttcttttcttttgtaagtgtgtaacgttattattatgatgaatctgtatattaaattgtcagtttgtgtacctcggctgattcctggacgaggattttatgcacaaataagtttggaaattacttgtgaatttccgggcgtgacatcaaatatgaaccttttagccacactagggtttcccttaccgccggtaactgcgtggttaccacggtgcttaccgcgggggtacggtaagggttaccggcggtaaggtttgggtgaaatttgagcaaattcaaaaattccaaaaaaaaacgaaaaaagcaaaaaaaaaatcatggatacagttcttggtttttaatgctagatggtgatttttttaaaaaaacaaagagtaagataaaatcaaatttgagggcaaaaccgataattgtttaggaaatggaaaaacaaaaaaaatgtattgggcttcattttttattttacatccacaagttaggtttgcaagtatcatatatattattctaattatccctactttctacacgcatttaagtgttttttttattttttagtatttttcattttttttcatgttttctgcaatatcgcggttaccgcgtcaaaccgcgaccaaaccgcgaaaccgccaattttttaattcaattttttcgagatgaaattcacacggtttttagcggttaccgttggggggtaacctccccaaaaacggtaaggtaaacctgggcgtggccaaatcactttgtcatgtcacacacagtcggcgtggcagtggcaagaggctggcgtggcaaaacaacgctaccacactagctacttggctggcgtggccaaaaatttcagttttcggaaatatttttcggaaatgtctattaataaaattttaaaataaaaaaatccgaatatttgctatgttgtcgctaatgaccccatttggacatggttaataactatgttatttacgcatgtggcaatttaattaacaaaataataactatgtctatctatcttaaattgtgtttctaaatgtcactgtagtgttaacacagacagattactagtattcaatgaaattgacacaccctgtatcggttctatctatctaccctatagttcaacaaatactttcactcattctttcattcatcactctagggttcagattattcgtatgagatccaacgctcctgatcttctcctcctcccacctctgtattcgccgctcttccaaccccatcagcgcccagatcgctccccctcccgttgccccctctccccctcctctttctcgtacccacccgaaaatcacgccgcgagatccccagcgccaaacccatcgtccaccatggcgactcctcgaaccctctagcgtcgccactcagtgccacagtttgaaggtgtttttttttgtgtgattatgatggctcatgctctgttgcaacggttgctatgagtattggacgaactgattagatctcgaggagaggatcatggccttggttgcctcatcgttatgcaggtggatcaagtgtattatttgattattcaaggccgcatgctcgccgtcgaccccaacacccctggtgacgatcctcgtcagatcaaggccaaaagctgccccccatcctctgttccacccctgcaggtacaacgaatttcctctcttccttttcatgttctctttagcgtgtcatgatagtgtatgtagagtttattcttatactccctccgttttaatatatatgacgtttccgacagcatcgagaaaattaaggatagagcgattttactattttgcccttcatcccttttcatcgcagtgttcgcgcacgccggctccctccactccggctcccttgccatctcccccgcgctgcctcgacgccggctcgctcgtcgtctcccaaacgccgctgctcgcgaccacaggagaaggaacccgctgcacaacgctcttcccggacgccgcgtcgccctttcttctcagaccttcccggtgaaagcggcgttggagcctgagatcaagcggtccttctcgattcagtcctcctcctttctcgtctccaagcagcatgtcctccctggacctcggctcctcactcgtcaccctctctgtaagtgagctcctcgatctcgccttctccaacttccagcttgttttttttttctcatttcctccaattttaattgcctcattgcctggttttgcccaatttacaatttaatcagaaggagaggagaagccctggttctggttgatctccagccgaacggcaagaacgacgatgtcatctgcagatgcagtacgttctgcttggtttcagccgagcggcaagaacaacagtggcggcagcagcaagcccgacgtccggctccctgtgcgccatgctgcctgactcttgctcgccccacaggccacagctcggggtgggttgccgccaaattggggtgcggcggcggcgcacgggaggcatgaacggcagcggcgcgtgggaggaggagacagtggcgagcgagtccggtcgcgatgaggacgaggcagcgccgtggcgatgttgagatgaagggcaacgatagaaattaacaaacgtgactaggacgaatgaactggtagcgtcaaacaaaaaaaacgattctgatttgcactgtagcgtcaaataaaaagaaacagagggagtacaatacaaagatcaaaacagacttggtggtggtgattgtattgaccatcaagcaggtaatttttcttgtgatgttcatgtttactattatgtccaaactccatagacaacttacacatttagaattacatcttgtatagacaaataagtgtatgtattaaaaatgtctgaagaaaatggactgtatgatcatagtgcctttcaaccgttgttttgtgcaatgtccatgatatctcctcgagattaatcgatttctacttttgtaccatatgcaatgtttaatttttaactgctcaggctcatgctatttcatattttggtgcttctgaagcgatctatatttcttgattctttgctatcgtcctgacagtgcaccataattgtcagaaatctcctaacctgaagctaatatatttcttgttttaacttcactgattcttcatatgtttcctttactgaatagagttttgttgaaagctactccctccgttccaaaataagtacagccatgggtatccgtatctacgtttgaccgttcgtcttatttgaaaattttatgaaaagattaaaaaaatagtcacgcataaagtaatattcatgttttatcatctaataacaataaaaatactaatcattaaaaattttcaaataagacggacggttaaacgttggacacgaatacatatagctgcacttattttgggacggatgtagtatgttctatggggtcaattggtcaaatcaatgcattttgctgggaaggtcgaaatcagcccatgtctacctgccacaatgagaaggcagccggtcagccgcctacacaacagactcttatattgccaccatcataagtttatttgttagtatgtactacgtaagaactaacacgtttatccgttaaaaaaaataaccaacaagtttgctttagtgatgttcagtgcagtgcaaaaatgccgcaagtcattgtgtaagttgtataatgcagtgaccaaattaagaagttttctagccttctgcattcctgcagttttctagccttctgcttgattccttcaacaaaaaataaacggatacacacattactaatctattgcaatctgtatttatttttcaataattctgttccgtacaagatacagcaagtttgagaagttcgagaggtacatgggatttcctccgcctttgaaaaacgtctaataggttcgagaggcgcttgacatttcctccctcttcaacaatgtcacacagcttgattggatgctctttctcattatggacagctgcttggtggagttttttacctaagaaaacatatgtttaccctgtagcaggcttgtgtataggagaaaaaggtggaattcttaaaggtaatcgtggggagttttagttcttttttgaagatttctctaactggtactccctccgttttataatgtaagactttctagtattgtccacatacatatagatatatatatgtctagattcattaacatataaatgaatgtgagcaatgttagaaagtcttatattatgaaacggaggaagtacatactaaccgtttggagttttggtctctcgttactcactgtaaaaaacataatggtaaaaaacaatttactcctaatggttctctctttatcccattgaacatttttatcgttgtctcattgattgctatcaaaatggaaaaacactggatgagatgtaggagagccgcattgatggcacattttgaaccagtggctcaggatccctgattctcttgatcgtattactctataaggtgaggaggatgaagcaggtgagttactctataagacaattatttttctttacaaaaccattatttttgtgtggatgtatattgtctcatatattggtattgaagtgatttgatatacttattgacggtattgaattaatatttttaggtaatataattattatacttcgtcataatatgtgaacctacatcaaattaaggttcaatcggacggattctaggaaatttatttttactagcatgtaattcgttaaaaaaagtattatgataccgtagcgttagcacgggcaaattactagtggaaaaaaaaatgcaccaagcggttggccagggatagcaatttgggttgccaacatgccatcttcttgcaatatttatccataagaagtcgcaacattgctctggtaggcttgtccaagccacatatatgtcatcacaagtaatgctatatctttttttttttttgcaaactactttttcctaatgtgttgagtcgttgatacaagagggagtgtgataaaagaaaacggataaaccaagacagtgcatctgcacgcacgcacttagaattagcacttagaatttttattatttctaattgtatttctatgtggactctaaactcatctttcaatattctttaatttttaatttcgaatttcagttacttttaaattgtattcctatatatgtattcctatattgacattaaactcttattcccatgtttttcttaattttgaattttagttatttgtaaattgtatttttatacggactctaaactctacttttaattttattatgtttattccaaattttagttagttttaaatttctatatggactctataatctacttctaataatccttattttttaattccgaatttctatttttttttcttaattgtatttctatatggactttatactctatttctaatattccttatttttaactccaaatttctttcatttcctaattgtatttctatatgaactatatactcctcttctaatattccttatttttaattccgaatttcagctatttcctaattgtatttctatatagactctagtctcctcttctaatattccttatattttaattccgaatttcagttatttcctaattgtatttctatatggactctagtctcctcttctaatattccttatattttaattccgaattttagttatttcctaattgtatttctatatggactcgtttattccaaattttagttagttttaaatttctatatggactctatactctacttctaataatccttattttttaattccgaatttctatttttttttcttaattgtatttctatatggactctatactctatttctaatattccttatttttaactccaaatttctttcatttcctaattgtatttctatatgaactatatactctacttctaatattccttatttttaattccgaatttcagttatttcctaattgtatttctatatggactctagtctcctcttctaatattccttatattttaattccgaatttcagttatttcctaattgtatttctatatggactctagtctcctcttctaatatcccttattttttaattccgaatttcactatttttaaattgtatttctatatggactttgctttttctttttcttctttttctccgattaatatgagaatttctaggccatgagagcgaacgtggaggctcttttttctattcctttaattatataatagatatttggaggaactaatctcgtttttgttaagacgtgacgatggttttgggtccataatagcgttcgcttcgagaagcaagtaagcaactaactctcgcgacccatattcctcataatcataaatcattttatgcctcgtctccaaccgactcgccaattcgaatcttcttctagaagccgagaggcggtttcaaacaaattcctcgagctcgagctctcgagcaccccaaccaaaaatggcgcccggccggttcgtcaccagcagcatggaggccttctccaagctggtgatgatgccgatcgcgcgccacagcccgcttcgccgccacgccatgagcgccgccagcgaaatcctcaccgtcaggcgaaggatttctgaccgctccgactccgagctggtgtgcgggcaccctccatgccgccaccgcagcaacgccccgagcgccgccgggctgcctccacctcgctgctgctgtgattccacggaggaattcgcggcggggagaggattcattcggcctcgcctcgggctcggcaacctcctcgtcgacgttcgcctcgggctcggcaacctcctcatcgacgtcgagagagaagggagcgatcgccgcgccgacacggggccgtctccacctcgccgctgcgatttcacggaattcgtagcggggagtcgcttcatgcgtcgtcgcatcgggttcggcgatcgccgcgccgacgcggggccgcctccacctcgccgctgcgattccacggcattcgtagcggggagtcgcttcatgcgtcgtcgcatcgggctcggcgatcgccacgtcgacgcggggccgactccacctcgctgctgcgattccacagaattcatcaccgggggacgcttcatccggcgtcgcgtcgggctcggcgacctcgtcgtcgagagcgccgccgtggggccgtgtccacttggctgccgcgattccacggaattggtggcggcgcggatacgctacattcggcgtcacctgggcaacctgttccttgaggcggttgggaggatgaagccgcctgacgagatcatcttcagtatttgcctggatcatcgcctcctctcctcgagtctccctcctcgccgcctccacggcatcctctcccagggctccgcgccgccgccggatctccgcggcgtcgctggtcagtaccaactcgcggcgctgaaacgcatgaagcgaatcttgtggagggcaacgccgatggcatcagaattcagagcctcagccaaatcacaccgtgtcgtagaaatccatggcgagccacccgaacaagagaggattggactgcgtgtgttgctgcggaggcaatcatcatcgccgccacgacgacaccaaccactgagagcaagcgctagccatctgcaggtcctgaggaggtggtgttcaaattcacatgtccccaatgtgccaccatcgtcgtcgtcgccgccgccgccgccgtcgccgcctcagccaactaatcctgctgatttttggtaagcttcattacccaatctattaattcaagaatggaactgaaatgcaattgaacgttgtatttgtagtcagatttgttatttttacttcaacttgtctaggatgaattcaattttgcatgttagtgcatcacacaattatctgtgctgtcattttcttttcagaatttttcattaccatttcaatcacatgcaaagaataagtgaattttccccatgttctaattccttttgaactctgtacttctgtttattaggaaaattaacactcctctgaatcctagtgctactaaaactgagaagagtacaattgatgaaacacttcttcagctgaaattcgatccaaaagagtttgctagatgcaataagttgatggagacatacaatgtgttaggtcaagaatggacattcactaagctgaaggaacagaccaaatatctctttgattcattgattgtgctggttgagtcgtttcacgaggcaggctattgtttctctcagatatccacaagcaccgttctggtaacatcatcttggaaatttgttctgctagaggggtgttttgctcttaataactggagtgttgaaggggttagaaaggactacagagatattgctgttttgttcaggaagctcctatccgagtccatgggtgaagagacagttcatccccctgattttgggatgctactcagcttgatggaaaaggatggctttcggtacaagtacttgattggtactcacgtatcattgttacctgatgataacattaacattgcttatatgaagattcatgagttcattcggaaaattttgctggctgaagagaaggataaagccaggcaactgaaactcggtataacacgttacagtacaattagcacaagaataagaagacgcattccttacaagaatatctggttgaccaaggctcgaagcaattcattcatgacagcattcttggagcaaaacgaaagaaatatggagttaggagggacatattttgaactgcttgacactattagacatttcgtatgtcacaggctggacttgctgaagctcggtttcagatataaggcaaacgaggtagaccgcatgtggtatgcagagtttcctacacttttagctgagttgcagttagctctgttcctggttggtcgacttgaagaactggaattggagaagaactttatgaacagaaaaccaatgcgacccaaagtgtcaagccatggtactttctaactttctattcatttcacttcctcctcacccccccccaacgccttcttttttttttgtacaatatgcttgcctgcagttgattaataagttcaatgaaatacccagtgaataaattcaatgaaatagtaggggacttgaattaatgcagcttggtgtgcattgggacattttgctgcacatgctaacaccctacaataactctggcagaatcttactcggagcagcactgacaaggatgaggtcacaaaggcgtgcctctggaaggatgattcatgagttgagatgcagagaaaaacaaaaactaacctggtaattttggatgcttgttcctggatatgttagtgaagttgatagctcaagccctttgagttccaggtcttagtacgttctactgtatgttccctgttcaggatgaaatgtatgttgcactttatttgccctgagttgcagtcctgttaacatgaggatgccaaatggcatgatgttgataataacttggatgctgagtgatcctccaagtacaagaaacttcttggttcggcactagttcaaagggtggtggtagttcatatctttgcaaatccttgttgctgttgtcaggattggttttgtttagctttctgaattttcaatcattgacaatctttagctattatttgcaagaaatgccatgttaccatgtccctctttgcaatttcatctgtgcagcagtctcttccacttctttataaattttgatatagttttcactaacaaatatagtttttgctgtattacttggctacgttcaataggatgggttgggcacggaaaacggatcagttcattaatgtgtgatcaattaagtattagctaatttttttttctaaaaatagattaatttgatttttttaaaacaactttcgtatagaaactttttacaaaaaatacaccgtttagtagtttgaaaagcgtacgcgcggaaaacaagagagaggttggaaaccttcatgttcgaacgcagccttaagtaggctgtagttccgaaattttactgttttgacctgtcaagcataattaattatatgcattgctatttgacacttcgttttgaggaggactgactaaacgttgctattatatcagtattatacatctcagtattaacaaggtgtttttattcttgtctgaaacaa

SEQ ID NO: 26281 - DNA, 20325 bp, Oryza sativa
  unsure (1)..(20325): unsure at all n locations
attcgttggctcgttgccccgtcgccagaaattcgtgactcgcccaaatgcccaatcccgcgaagacatctcagtatgtaatgtgcttttgccctcttttacgatgtactaaacgggtggaaatgccttttgggctttggctcagcgatggctcggcacggtggccaggcagcgcgaggaatggcccggcggcggcggaaatcgacagggcgacgatgacgaccactatccggactccgggctgccaagagaaggagtgtaacggctcaaagaccatctaaggatgctacacgagtgaggaattgcgccgaagctcacccgggatcaaggaatcgacgaccacggccagcggccggagttgaagaagaagggctcgatctcctcgatggcgacgcctcagctcgattccttcgatgggcttgctactgggatcttggcaattctcgtggcgcgaagcctcggcctgagatccaccggattgacgggaacggcgacgctatccacggcggcgctccaggcttgctccagaacagcaatagcaaggtccgtgttccggaacatcgactgcatgaaatcgactgaacttaaggggaatggaaccagcactgagaggagacaagggaacgaacaagagatcgagacaaccgcggctcaatcggcgatggcgacggtcgtcatccttgcggccggcggcaagaacttgagcggcggagaggcagaggctctccctctcgagctgctcggttttgggagggagtaggaatgaggcgatgcagnttggagaaggagaaagcgaagctcagcgtgtgacacgtcgaggccacgcgtcgagcgcgtccgagagagatcggcgccggttttccttttctccctcgtgttgagcggtgagaaaatggaaatggacagaggctgggttagctggggaggctgccaagtgggtccagagcggtgtacactaggtaggcaagaggggtataggtttgagtttgagtgaacaatgaatttagatgattttcaggattatttcttttcccatctttgttaattcatatattaatttgtggtgcagatgagttcacgtgaattttattggaggtagatgaatatacctagtttttattttctttggttacactcaaaaattataaatagattgctcatagaaattaggagatgacgagcttattggaagctagtttgaatttttatgagacctgaaatgagaagtaaaattctagaaaaattatatttagccatgataaataatctagtatttaaataatttatctctcatgtataattctatgcagttcaatacatattttggttaggtatggtaaaaactacagttaatctattttttgattagtttgattgatttatttgagatatcaaatgtagatattaaattataccaaagttacagtgaattaaatgtggtgatcatagcctacattaattttttcatgattttatcttgcacaaattattttagataattagtaagacttatctttatatatgtttcccatttctaaatgcatgtaaatgtttataaaatttatatctggactcctcttaacctgaaggggtaatattagacttctttttcatgtcttcaatattattactcatgaacgcttttaggttttgcttagtgaacttatcttttaatcatgctcatgagacctaatatgaaatgcaaacaaagatccaaatgcactagaaagactcaagttaaaccattcatatgtgagtatgcatgtctacacttgtgtttgcatttatgtcctaggttagagatgaaaaggttttaatttaccctcaaattttattcatgcaagagttagatcaacttcacctaggtttagaatggaaatttttggttcacaaaattgaagaactttttgatggaaattcctcgctcctagaattcgggtatgttacatgatcgtagagtcaccaaccaccccaacccagcaagcgttaagtcaagatgggttttgatagattaaatcggctagcggagccgatttagatagaacgatagataactacccgtctcgtaggcaaaacggaatttttcgctgcggcagtggacgatatacagcgcaaatcgacaaagatggacaaaccaaactagaactaattcaaagtacaaagcaatattgaaaaaaaacgattattttgattgattgtatgatcttttacaattgaaccagccttgtcccttatataggggttggtcttgtcctctacaggtcctcctccacgtccaacttggatagaaaccaaaggaaacccaaaacataccttcccgagtaaggaaaactcgagacccgataaaacagacttgggctcgaactctgtcggtcagatcggtcacaagccggtggtctgaccggagttcaggccgcggtctgaccagcctatacaaggcgaccggtctcctagaggaaaacacctatttgaaacttgggtgtaaacaagtgagtataaacattaatgaagaaccagttttatatttaagactgaggggtttgagacaggatgaccctccgtcaacttggtagggatgttttgtctaggattttgagctctgcaacagagaggggattttaagctctgcaacggagagggattttagagctctgcaacagagagcgggttttagaaggactggttctaaatattgtgaatgagggtttatcacacttacactaatttgctaaaaaataaagatgtgatgacactaaagttttttctctaatgttttgagtaaatgtcaagaatgaaaatccattatcagaaaagtgagttactgtgatgaggtgagtaaagagagagaaccaaattgcatatatgctaacttgtaaagtgtgggacttcccaataattttatttggggctaccataaagtggagagaagattggtaagaaagaactcatgattgtgggggtgaaaaatgtgaagatattaaactcttggaaaaccgactacttatcttatggggaagagaaatgctaataaattcatatttgtcaagcataggtctatgtatgcagtgggcttttataggctacctgagagcattcacaacaaaatggactctgtgaggggaagattttattggaaggaagtggataaagagaaaaaatatcacatggttaagtaggaggctttatgtagactaaaagtattggggacttaggtttttttgacacaagagttatgaatatatgtttattaagttaatggattattaaactggaaattgatagtaatgatttttgtttggaagttcataaacattaatggagaaccaggtccatattttaagaccgaggggtttgagacaaggtgaccctccgtcaacttgctacatgatgttttctctagaattttgaactgtgtaacaagagatggtggttgtagaggattttgagctttgcaagtaacaagagagatggtggtggtagaggattttgagctttgcaaccgagggggttttagagctatgcaacagagagcgggttttagaagtactggttccaaatcttgtgaatgaggagtttatcacacttacaatacatataattttgtttgctaaagataaagatgtgatgacactaaagttttttatcttctgttctgagtaaatgtcaggaatgaaaatcaattatcagaaaagtgagttatagagatgaggtgagtaaagagagagaaccaaattgcagatatgctaaattgtaaagtggtggacttctttataatttaataatttatttgggactaccgtcgagtggagaaaaattggtaagaaagaactcatgattgtgggggtgaaaactgagaagatactagattcttggaaaaccgactacttatcttatagggaagagaagtgctaataaattcatatttgtcaaacatatgcaatgggcttttataggctacctgagagcattcacaacaaaatggactctgtgagcggaagattttattggcaagggagggggtaaacaagaaaaaaatatcacatggttaagtgggaggctttgtgtagaccaaaagatattggagggttggtttgtttgacacaagaattataaatatatgtttattaagtaaatgaattactaaactggaaattgacaataatgatctttgtttggatgttattaaacattaatggaaaaacaggtccatatttcaagactgattggtttgagacagggtgaccatccgtcaacttgctaggggatgtttttttttttgggattttgagctctgcaacagagatggggttttagaggattttgagctctgcaacaaagggggttgagatggggttttaaaggattttgagctctgcaacagaggaggttttagagctatgtaacagagaacgggttttagaaggactagttccaaatcttgtgaatgaggttttatcacacttacaatctgcatgcatatgatacaattttgtttgctacagataaaaatgtgatgacactaaagttttttctcttctgttttgagtaaatgtcagtaatgaaaatcaattatcagaaaagtgagttatattgatggagtgagtagagagagagccaaattatagatatgctaaattgtaaattgtaaagtgggggacttcccaataatttatttaggattaccatttagtggagagaagattggtaagaaagaactcatgattgtgggggtgaaaaccgaggagagattagactcttgaaaagccaactacttatcttgtgggggaagagaagtgctaataaattcatgtttgtcaagcataactatgtgtgcaatgggcttttataggttacctgagagcactcacaacaagatggactctgtgagggagagattttatttgcaaggaggggataaactaaaaaaaatattaagtgggggctctatgaggaggagattttattggcaggcgaggtggtaaagaaaaaaatatcacatggttaagtgggaggctttgtgtagaccaacagatattggaggtttaggtttcttggacacaagagttatgaatatatgtttattaagtaaatggattactaactagaaagtgacaataatgatatttgtttggaagttcttggaaaaaaatacatgcagcaaaaggggttctttcagagttatgaggtagggggtcataattttaaaagagtttgcatgagatcaacttttgggtgaataagtttcaggaaaagaaagtcaacaatagtgaaagtacttatttttgggagatgtttggtgtgatcatgttcccttaaagaatctttttccttacctatataatgtaaaggaacaacaaagggctacagagaggtgaaagatgatgggggctggaaactctcttttagaagaaacttacaggggataatttgagagatccaaaagaactaatgataaaggtggagggggtttgtttgactgacaagagagatgagttgatttggcctctagaaaagaggaagaactttacagccaaatcactttatagagaaatattttttttttggggggtggggggtgatagatactacaatggtcaccttgtggaaaggaaaacccttgaagttaaacattttctcttccccatagccgcattcctccactgccgccgaaccatggcactctctcgttgccaccctcgtcctctcgactctcatcgccggcgtccatagttgcccatctccaccatccaagctagccaatgagttccccgtccttcactcgttcttcaaccgtttctcctacctgccaccattcatcggctcactgtcgtgcgtcgccggccatcgatctccccggtggttcaactcccgtcggtccaagatggcgtggctgccacgtcggccgaggtgaccaccactatgccacccacacgctggtctccctcggaccaggctgcggcccgcggccgcgcaccactttcgcccgcgccggtctcgcacctgggccaggccacgatgctaccaggcccaaagtgggcatcgatctcccttctctctcgtactatctaggcccaatcaaatgaagcccatttacctacctcaccaggcctcctactctcttggactgaacccaccaaccctcaaaccgaaaacagaaggtctaactttcctttagcccaaggaatattctgaatattcagttccaatttcaattcattatttcctattattccataaatcattttaaattccaaagatcatatctccatatctgtaactccgattgacccgttcaactttccaaatctttctaaaattgagataaacccaatggaactattatttattaataataatattttatttttagggttttcttgattttctctcttcgaagagttgaagatgaagagctgagataagtcaccctttgatcatattactcctagtttttaaaattttttgtttgcgaaattgcatgcaatgtgcacattaatttaacatgcctcggttcatgtaactaatcgacagatctacctagtagttgcatgaatccaataggtagttgatgacaccaatcccacgtcactccaccttgtggtatctcggtcctactcgtataacttgtttgtcaaagtgggaaaatgggttacaaaacctttttaaaacccgacaggtagtgttgtgtttgtgaaatgaaagtggttagtgaaaactcgtgatgcaaatggataccttctgtttttgcatataaggacgatttcctttgggaattgcattataataatatgtaggtcccccacgtctggctcgtcttggtctcgctcactttggaattttctacccttgagagatcgaggaaaaaaacagcagaaaggatgtctcaggctaaataaaggatgagtacgaccacaccggttgtactggttacccttggctaagtaattagctaaccaaagatgccttgtacgtcaatagttggggattgttgagatgatgtcacgtcctgataaattcatcccgaaataaaaataattctctaaaaggaataatagaattaattaaaattcgaaaagaaattggcaaacactaaaatacatacaagaaaaattcgaatgtggcctggagaatttttgttaaattctccttggtctaaaaggagtcctcaaattttactcgaattttcagagcatcggaaataattattaagcaacaacaaccattaacaaagtttattaaaaagaaaaactaaaaataatcctccttcctcctttgggcccagttcggcccaatgcccccacctctccctcgccctgcggccaaagtccctctctcctccctctcttttcctcacctctctctctcttgggccgcccctccctcctccctccctcctctccttcccggcccactccctgctctcctcctcctgggccgcctcggtttcgcccggcccaagccgagccgcgcctcccacccgtgccgcgcacgtgtgcgccgttgccacgcgttgaccgcgcctcccgcgtgggacccgcctgccaggcgcgtcgtcctcctcccgcgcggcctcctctctctctcccgtgcaaccctagcttcttcctccctcaaatccgctcgattcaaatgactaattccaaaattgattagggggattaaaccccattgattcctctctctttccccctaatttcccccttgaatagcgccattaatcgcccggaacggccgcgacaatcccggtcaccttccgtggccgccggccgccattcccgccgccgttccccgctcctcccgtggccagatccctcccctcacctataaaatggaatccccttcctccgttctctcgttttagcctcctcccgcgtctccccgtggccgcaccacctctccccgtcgccctcgtctctatcctgtgccgccggccacctccagccgcctctgccgcctcgcctgtgtgccggccagccgtgccgtcgccatcctcggcctcgcaggtgcatcctcttccccggcgtcgccttcgtttcacggggaaaccaccggaggcgcgttcctgccgtagtccaatggcgttgccgccactgtgccgcctccagctgccccggtcgtcgcgcctaagcgccggccgacgctgccgtctcctcccttggcatggtgacgtcgccctccaccccggcctgccctcggattcgtccagagaccgccgccgccgcaccagcctctccttcctcctcgtcaacgtctcctccggcagccccttccgccgtgcccgtgcaccggccgacatcgtcgtctcctcccttggcatcgcagcggcaaggtcgccctcggtctcgcctcccctcctcccgaaccccgccggtgtcaccgtcgtcgtcttcatcgttcgttctcgtcgatgtactcttccggtcggccgttcatcctcgccggctcgtcgtcccgcggcgccacctccgtcgtcggcattgtagcggcgtgttccacgccgtcctcacctctatgcaactgctgtcggctgccatcgtcgcctccttactggccctggtcgtcgtcgtcctctcgtcgttcccgatcgtcgtggcgttcgtccctccgtcaagccgtttgcgtttgccgcccgcgtttcgtcaagtgtgctgtagcctcctcgtcgtcttcgtcctcggctccgcgtcgtcaagccctgcgccggccgcgtctcgccttcgtccaagaatcgccgccgaagtcgtcccctcgctgttcgcctccgtcgtccccgagccatctccgccgcgcccgttcgtcgtcgtcattccacgccttgtcgcgtgatggtaagggtccctcctcgtcctttcggtatcgccctgtgcccattgtgcggttgtcgaccccggtacccgtgtaccggtgtcggtagtcgttcgtgtgtgcgtgtggtgtccgtgttaatgtgcccgctcggtagccgcatggtttctacgtgtgtagcccgcgtggtgtctagtggagtccgtttgcggccactcgcctcggttgacacacggggtccgctttcgtcgacccgtggaccgtctctatgtactcggtccaccgtggtcccttaggttgacatgtggggtccgcctgtcaacagcgcagccttcccgtcttttccagggtagcgcttacacatgctttatagttgcaaagcttaattataataatccgcaaatctccatataacagcattaaacttcgatgaccatgccttggtcatacgaactccgaattgacccgttcaagtctcttaatgtttgttataacctaacgaaccatgtgctttctttttatgtattgttattgcttttttatagggttgtagctttgcttgtgtatttcgcgtagcttctgtcgtttcggaggtttccgaagcatggttcgcggtcatcgccgaaggttcggaaggccgttctctctgagcaaggcaagtcgcatcacccttgagcatattgaatcctagtttataaaactattttgatttaaattattgcattatcgctttatttaaattcccacgttatcactgttttatttagcaatacctattaatccttgttatagccttatcattgatattgtttattatcaccttgcttaccctaggaaaacaaattcccagctagtgggtgctctattaatagttccactagtatgaatttaggtagatgcttcgctgattaattaggcaacactagatggtttataactttagactttggaagttctcatatcaattggacattatggaatggtttgcgtgtgatggaattaaacacacaccttccccctctattcaaaactcccaaaatggttttaggctaggctcgaggtgcgtggttttgctaggagcacctcggccaccataaggaccggtcttcgggcctctgttgcaaagcactaccgtactaaccacatatctaatgggtaaggcttaactcggtgctcaatctaatcctaaacagaaggaaacggatggagatggacgaaatcggggcccgatggacatctctagggcaaatgaaggttacacaagctgcggctcggtagtcgagatgttatggcatagggccggtgttctgctgctaggggctcaatcctgcctacctgtcccaggattccggacgtaggcgaggttgggtcggtacttttgttcacggctaggatgggtgaatggttatgtcacatgtttacgacgggttccaaggctttggaatgcggagtaaagatgtgtcttgtgggtaaagatgtacacctctgttcatagtataatctatttgaatagccgcgcccttgtttagggcaagcctagcaatgtacccaagttagtggtttaatttttaaaacttgcttaacaactaaaatgtggaatgattggcctgggttggcttgggacgagctgggacccaggtcgggttgccagttcggtctgaatcatcgtaggccttgggttaaggcaggttcgtgtgggttcacggccttgattaataacattgtgtagctctaggatcatgtttacaaaatagctttgggcaactaagtgacttttaaatgctgtttactgtaaaacctaacccctattattaccccttgtacccccttgcattaatcatgcatctcccggtgtggcttgctgagtactatggttgtactcattcttgctctatctttcccccgtctgtaagagaggctttggagaagaagttttaggtggagtcctggcttataccccagttgagcgcctgtgaagatggagtcgtaggcccgctagtccactgctgtttatttttgtttgttaggccttaagtgcctttgtaataatgtaaatattatcgatataataaagatgtgtcttttgtatcatgtttgtgtggtgtaccccggcttttcctgggacgaggattaatacactagcgtttgggaaaaggcaatttttccgggcgcaacaaatgaggagatgtgagatagtttattgcgttgggcacacattgaacattaacatgctaggcacgaatggttgaagacattccgaattcatgggtagacgagggctgaggcttgcctgatgctcggttcagagagaacccttctatgtggcatgaggtatcttcggttggctttggaaatgtcttgtcgtgaaccttgcttcaccgattgtatctaatcaatacgcgttgggcgattggagtaagctcacgtcgtgtgggtaaagtgtacccatttgcagaggttatgaaactgttcgaacaaccgtgcccatggtcaagggcggatgcgaagtgattcctcttgtgtagatttgtttgcatgtgatttgcaaaaataatttgtgggaatgaaaaccgttactaaattcagctaggtgggttgatgggtgaccgttacgtggtctaaaacaatattgtgtagatcaagatgtctaatggcatcatagattacgtttctcgagtggaagttgtgtgtatggctcttggagccaaagaaatgtgttatgagatgcgttgatgcccgatggtttgaaagtgaaaagaaactaatatttgggaaatgagttggaagttgcttgatggcagaagatcatgcaccggtttcatggtagggcaactggtagaatagttttaatcaactaaaaagttcctttgcccgcttgagttgttgcaagcaatttgcagataggattgaggcaaaagcttctttccgacacttagtgttttgaaaaatgtattctaaaagtttacaaaacaatcctagccctcctttgcatcctgcaaccccacatttccgtgacttgctaagtacgtatgtactcaatcgttgtttttcctctacaggaagagtgaagtgaagttgaagaatagagtttccttattagtcccaggccattgcatgtggattgggtctagctatgttaggtttcgttgttgcttttctgcttgccggttacactccaggagttaccccgaaggtgtgacctcttaaaggtacaatctatctatagtatgtttaattgctatgatgaatctctgttggttgcaggtacaagcaattgtatctttggactggtaccagcagcgaggttttgtgggattcggttcatgtggattttctgcgtcgtaccctctctggtgtcactattatgtgatgccaaggcagggtgtgacattcttccaagagttgttgctccaattgccattgatgcggccattgcaatcatcctccttcctcatcggcaactcggccgatgacacctccacgttgctgcttcgtacgatggcgctcatggtggtagcgtcgtcaacacgccattactgtgctctcctgcccgtgggcctcctcggacctccggggaggctggcgtcgagaagcgttgagcggttgacgacggcggactcgatttggaatcccggatctcctccatgacacgcttgtgggaagagaggaaagagagattgagaggggtgaggaggaagatgaaatgaagagaaagtcgttgacacatgggtcccaccaattgactcggcgagtcatagtcaatctgccatgtcagcggaagtcgaagaaattggtttgcaacgaatttcaaatatagaggcgacttacaaagggccacggagggacaattaggacaaaacatcctgaatttttgaagtagctaaatatttagtttcttccgaatatccgttgcaatgcacggaagctttttcaggtactaatatatgtctaagacaaactaaaaataaggttgcttagacggatggaataaactataaagttatatatatacatgtatttagcgtgtgaagcataatattgttatagctcgttgtttcttcttacttaaattttacacattttcgttgatagttccgtttcccattttcggctcttttcggtccgtttttcacgattgttgtttttctttaaaatcaatcaaagaggattactacgagtcgcctactactactacactagtagtaacattgtttatgttttcttctcccatatccaagatggcaatggcaagtccaaagcggcagtgggacacgatgataattttgtgtaatcactccccctccgattaattaacccctcccagatctaatctcctcccgcacatcctaacccaggacataatattccactcccccccccccccccgggccgcgattaaacaaggtggctacagacgttgaccagagaagcgagatttgggaagctgcggctcgacattggtcgcgccatgcagatggagatggagatggagcggtagctgccatcgattcgggtcgcatattcgcatcgtcttcttctttgtttggttggtctgcgtggtggatcggtcttggtggttgaggtggaggccgacatggagcgcgttgttggcgacttcaacctcctcctccaacgcggcggcgccgccggtgaacgtccgtgtaggcgccacgccgatgcgcttgatttgagcttcttgatctgcaagaacgcgtcgagatggtccatgagatgaaggtgtttgtttgtatgcgtgcgtgcgcaggtgggagcgaggaagggggagggggatcgccggggacggaggaggcggcggccgtcgcggtgaagcagcggatcgcgcgggcgctgcggctgtacaaggaggcggcgggcgacggcggcggcgggtggatggtccaggtgtgggcgccggcgagggacggcgcccggcgcgtgctcgccacgcgggggcagccgttcgtcctggcgtcgcagtgccaccgcctgttccagtacaggaccgtctccctcacgcgcgtcttccccgtcggcggcgccgccgccgccgacgagcaggggcttcctgccagggcgttcgacgcgacggcgccggagtggacgcccaacgtgcagtgctacggcagcggcgagtacgcccgcattagctacgcgctcatctacgacatccagggcagcctcgccctccccatccttgaccccgacgacgcgagctcccccctcgccgtgctcgagctcgtcaccaccgccccgctgctccgcgtctccggcgaggtcgccaacctctgcaacgctcttcgggtaatctctctgtctcgatcaagaaatgattagcaggagtgattagattagtgaagtgattaacatttcttgtgttcatatgcaggcagtgtcactgagaggtgcagggatttgcaaccgtgcagccgaggtgagagttgagatcacatgaaatttcacgagaaattgcatgatccgttcatctactgatccagtgttactcgcttgccgtgaaccagatagtccatcgagatgcgacccgggcggccatggccgaggtatcggagctcctgatcacggtgtgcgaagctcacaagctgccattggcacagacatgggtgagatgctggagctgcggcggcggcggcgaggacacggagaaggccgcgctgacgaccgccggcgcgccgttccacctcgccgccggcgcggacgcgcggggcttccgcgacgcctgcgtcgagcaccacctgcagcgtggccaggggctcgtcggcaccgcggcgcgcgcgccgggcggcggccgcctctgcgccgacgtcgcgcggtgctccaaggacgactaccctctcgcgcactacgctggcatgtacggcctcgccggatgcctcgtgctacgcgctgagctcagcgcggcggccatggcggacgccgccgccgccaccgccggcgacgaagaggactgcgtcgtgctggagctcttcctcccgccggactgcaccggcgtcgcggagcagaaggcggcggtggacgccgtctccgccacgatcaagcaatgctccggcaacctgaaagccattgtgatcagcaacttggatgatttgttcttggatactatggcagatggtgatcaccaactaaggcatgaaatggatgatcttggagatgatcaaagatgctcggacgaggaggatctgcagctgctggagaacacaaacattggtgagcttaacattcacaatgcagatcaaatcagaaatgaggatcctacatcacaagttggcaagaacaagacgaaaagaggaaaagctgagaaatctgtcactttggaggagctgcagaaacacttctctggtagcttgaaggatgctgcaagaagcctcggtggtaagacaacatcacacttgccaacaacctgcatataatcatcatgataattgatgagttaaatgaatcagctggatattcagtggattatcttcatcaaaatcctgatgtttatgcgcaaattaacacgcaaccactgaaagttggatcaccaggtgacagttttatcctcttgttttgcagtatgcccaacaacaatgaaacgcatctgcaggcagcatggcatcccaaggtggccatttcgcaagatcagcaaggtgaaccgctccctcgacaagatgaagcgcgtcatggaatccgtgaactgctcgccgtcgccgccggtggccatgcctgctcacccagctcttcttctccctccgccgccgccgccaccgcggccatgcctgtcaagtaccgtaggagagacctcctcccatggatcatgccaggcgccgccatctcacgccaaaactgcattgcgaaaacctccgaggtgcggcaatggcgacggcgtggtcaccatcaaggccagccacagaggtgacatcatcaggttcagggtgccgtgctcagccggcgtcgcggcggtgaaggcggtggtggccaagcggctgagcctggacgccggcgccttcgacgtcaagtacctggacgacgaccacgagtgggtgcttctgtcctgcgacgccgacttccaggagtgcctcgacgtcgtcccggcattgccgtcgatgtcggtgacggcgaggtcaggctccggagcggcggctccggtggtcgtcaggctgatggtccaggaggtagctgataacatcgggagttcctgcgctagctcagattagttgtaaaaaatgtagctgaaagtgtgaaaccagtagcaggaacatcaaacagatttctcaagtttttactactgatacacatacaagaaagttcagacctgtcaaaaatcactgtaaaaaggaacatgccttagagagtgtcaatataccatgaacattgtttcatcttgaataataaccggaaagagaaaggcacaaattgcttcagatctttttgctaggatgacagctacattagcaaataagtacagaatttgatgcatgtttgatatcattatggaacttgcttttctatatgctcagtgaaaatatagacaatactgaagagcgaaaatgtgctgatgtgcagtggcactgacttacaaggctgcctcgattttcaagcggcgacgaatcagaaaatggtatactcttgcagcagcatgaaagatccaattcaattatacattctgtaggaatatttcataattggtactttggcagaatttccacagcccaaggatccttttctgagcctgatggtgtgcaacccagtgggagtgcctgtctatcaatgtagtccctggacttcagtatatcaatttagaatgtgaaagtaactgagctaaatgtacatccaaccaggaaaaaaaggccttgcatttcatggtaaagtgaaattttgcaaatcggatgcatgatagcaatcgagtacagttcaatcttgcgctaggttttatagctgcaagttacaactatggcaaactaggagccaacagatatctacattaatttacaacaagtatattgttctgcattgaaccttcgccatcaattgggtactccagtgacagcctccactctccatcaaccaagaatttgatctcatacctttattttgcatacaaacagataagtgagattgtttagttaataaataaatcatagcaaatcagatcgctctgcagaattcacaaaacacacctcccaggtctaagattcagagttgcagagaatcttgcttggtaacctgaatactccatggacattgcctctccctgggaccagccatcgaaggagcccataatttgtacattctgatgtgcagacaaaaaaccaatgaagaacaatagaggacataaatgatagctgtagatatatgacaatagttctgttccatataacgagttaagtcaaaaaccttgttttacctcagcaatgccaacccagaagacagaaatttcttggtgctttaaagagtctacatccttaatttgttccataaccttatcatgaacagctataggaaacaaacatttcgtcagaaaatttcattgttaattcaacttggagcattgtgatagagataaccttctaatctggtgagaagatgtgactggatatattttccatttatcttcctagacccagatggaacatcaaaattagcaatctcttcagctagggcaaccagagcctgtggacataaagaaacagtgaatacatacaaaatgtaaatacatttagagtaacagtatcaacaatactgatcactgataaaagtttgaacaaaaccaagaaacaaaatatattgatttaaagccagtcctaggggagacaaagtacagaggcatacaaaatcatacaatcctttagaggaagccagacatacttcattcatgtatttacagtctgatatctttatggaaaaggaaacatgaagttatgaatgaattctcaagatgctagatgagttaaaggcatgttgatagcatcccctgtccccaaagggcttatgattgaactatgaaacaagaaaagtctgttagagctaacctgcagttcaagttccataacggcaagttcactcttgaacttcacaacgtcattatccttcatttgcaactgcaagaaatagtacatttctatctagttagcaatgattcagtgcttaataagagaaatggaattgtgcatatttgacataaccacaactctgtatggacagctatttatacaaaaaaaatgtaatctcacaaaaatattcatctgatgcaaaagaagcttcaatttagcaaactagttcatgaatgattttttaaagaaaaatatcctaagatactttcagtagttcaaagtcctggattcgttaggaatatttaaatacatttgtactacaaaatgcattatagattttttataaaaaaaatgtaatttttctggcgatatagtgcgtagcataaagtgaatcaacaacagtaatctacaagtaaaaggggagttctatattctattcgatcctgactgaacaaaattgctagttcttgctgacttgcatcatgacagcaaatacagtgcctggacagagtaattgtttttcattttacaaaacgtctaggcgctatcttcagtagaaagcataaagttcaagtcgcagataatagaaagctattcagtatgaacaattctgtattatgttatttgctgataattgtgaacagtatatatgatgcaattcaatgaacactttggaaaaaggtacaataatagaacctgtctcttgaggaaccggttgtattggtttgcttcactaagctttttcaaaagcttagatcgttctgaatcagccaaaagagatttcaactgcatgccaaaataaaaagagaagcacaacattagtcatatataaaataatgctagtgtctgtaggttgctaatcgaaaagaaaaaaaaaagaccaagttgcaacgttgttctttgtactttggaagtatcaatctttcaagtgcgatctacgaaccgaaacatcaactgttagagctacaatcaagtttgccatttctctgttgagttcatttctgaaggaggtcactctctaatacttatgattataagggttaaggagaatatctccttaagctgtcttagctgctagggaataagaccacatagatatcatacagatacatatttctcttacgcagatgctacattaaaaaccccctgttgacctaatatttgacaaatacaaacaataactcctaaaaatggactgaaagatttatgcaggaaagtataataacgtgaggtatgccttgaaagtagagatcatttatagtgaactcattggaggaattgaaatgctggctctgctaatctttgagtgacatatggtacaggaatgcagagtgataagctgcacgggtttgccaagctattgcaaatgaactccttttaaaatctaatgaatttcggacggcgtgtccttccgccgtcctggcaaagaaaaaaaactgcatgggtgaaacaatacacaattggatgatatgatacctcgtcagatttaagtttccgagaattcagattttcagaagggtcaccataaacttcaccaccatcactagtttgctctgaaggggatgatgttgagtcagaggatgcaggaccatcttccaaattcagacttgcagcaaaagatctccaatttgaacgtctgccagctattgggctaacaggatatgccatagttgtgaacttgcgacatcgtcttgagtttgtggaagctggaaaatagcatagaacccttctttgaatcctttgtttttcagacagagcttcgctcggacatatgagattatactcccttcccggattccttcaccaaaaacatcacctaaccatgttaaagtaatgataaaaggggggtaaaagaagaactatgcattctggatgtggtttcaacagggcatggggaattctgaaagtcgtacggggattaactaacttaccaagctaaaatcagattacggacaatatcaatagatcatacatacatgcttgtcatgttggagtattctatatctgaataataatattgcacaatcaagagaataacttacctagtaaaacttgtggtcagacactccatagctattttcctgaacaaaaataggaaataagatagatcaaaattacattttcatagcttccaatcgagaacattagccaaaacataagtctctcatacagtagcagataacagtatacacgaaaagaaaaaaaaacaactatgcaaaggaatcagtacagatacacggcagcaagaacctaaccccttctcttaaccacaaaccacaccagaactaacaattccctgccactccaccaatccaatccggaagagaatcccaaacctaagtgagccgcacacacgagccgagccgtatcaatcagaatcagttaggtggggggaaatcaaaccgaagacaagtgaagcgagcagcaacctcgcagcgaatgtggggggggggggggggggacaaggccaact

SEQ ID NO: 26282 - DNA, 6669 bp, Oryza sativa
atccaagtcatgagagaaatgtttttgatatctgcacggtcttgaaatgcaattttgaccactacggcttgaagaaatagctagagataccggttagtgtgccgagacaaaatcatgggatgaaggtagtaactagtaagtaaaaaatatatatataagattatttatagtgaggcttcattaagtcataaccaagactatcatagcctccaaatctccattcaataactggaacgagatatctgttcaaacaatgcatcataacagaataagaggaatggttcatctccctacacagaatgcagcaagaccagaatgtacatggtaggagcacagccttgcagcaaaactgcacgcgattgctggctcctgaacacttagctaggagaggtacagctacaccaaaagggttgcaacagatcacgcgataaactgctgggtgaaatcatcaacatgatgcagactcaaagtactgagaatagctgttccaccaggaactaaaaacccaaaacacggtctttgttgctttggctcctaaacaaggctgagttctttacagcagcaataagttgtacaccaccaaattcagtcttgattgtcaagaagaatgacttcaataacatgtagctgaagggtaattgttctgccaaggtagatgaagagcgacgccgttgctgctgctacttcgctgacacttcagcaggatgcccataatcatcaccttcacactgaagtagaaaattcaacgagagagattgtcagagatgatttcaacaacaaaaatgttagttagcatgcagtttcaaggtaaggtgtgcaaacaacaataatagcttgaaatatcgtaggcagagaatagaagtagtaatttcacataccagatcagcaagcatatcgattgtgagttctgtatcaaattcatgggccttcagtgcttcaacaatgaagtcggcagacacatctgggaacatctttgagagagattctaccacagcaagatgattatcaacaccattttgctcatactgtgatggatcaaacgcactgtttgtagcttctccttttgatgaagattctgcagaaatgttgagctttcctaggctttcagcatagtcatccaaagaaagggaatctgggagctcatattcagcagacttgtcagcattctcatccttttcagtatcacctacttgcttctcagaggcctttcttttgctcaagctttcttcaaatgaaggcctggggggaggcacaaagggagtggcgtttggattcaaccgagaagaccgctccattattggcactccagcagacctgttacatgtgcaaggaactcttggtaaaatgtgtacaaatagtgaagattcatcagatcataaactgcattttcatgtctgccaaactttgctgagaaattaacttattccacacagcatgcctactatgaggattactcaaccgaagaggcagtgcaaaaaaaaagtattactactatctaataagaaataactagctgagatatctctctgtctgcttcttctgtcacatagtagtttggtttccgtataagttaacgcacaaaagttgcagatcaccatataaaagttttccacaatactatgtccaaagtgatcaggtcctagataaagtattccaacaaccaaaaactgatctcatacttcaatcaaaaataacttgccatccagaaaactaaaccttggaattgggaacataaaacattttagctatgtacagtttaaaaaagctgtaggcaacagttcagtactattagtacttagtaaagatgacaccacagtccatatacatttttttttcttaacagtgcaatcttacataaaaatggtcaacaattagggacatgaatagtaatgaaaaacagggtaggcatagaacgacagcaaattgtaactgcaaccataataaaatagtttttaacatcctattgcctcgagctccaaatctgtcacccaacttcaaccaatagcctaatcacacatagttgcaacttgcaaggaacaagtgcaaaaatgtatttcacatccgcactccagtgcaaaaaagtgcacaaatgtattccacacccgcactccagcacaaagctaccataaggttcctagatatataatgcaacttgaacaaaacgaggatttcacttccttcctggtgacacccctacatattacacaccttcatttcagatttctcaacagacaggctgagaaattatagcaatgtctggcctacaaggcagcccgaggcacactgcaactcgatcaaccaaggcactaagcaaaggatgcgttacgcacgaaaaaacaacaggaaacatctagaaccagcaatcacgaagcatggaggagaccccaatcccccctccacagcatcaccaaccaacaacaactctaaaatactaggattcgcgcgaaatccagagcatcgaactccacccgcaaccacccaacactgcaacgtagcaggatacacccaggatcaaacaacaacaacccacaccacaaccacaggaggcggctcgcgtgggggatcgctcgcaagtgggacgaaggggagagagagagagagaggcgcgcgtgcgggcataccttgtcgtctccggcgacggccgcggcgggggaggggaggaggaaggcgcgacgaaaccctaggtcgccgcggctcgcctcgcgctcgcgcttgcctcgtcgtcggggaggatgaggaggagaggggaaagggaggaaacggggaacggaaggaggaggggggggggggggcccggccgcgaggagggaaacggtcgtggagcccgatcgacggctggagatcggcgcggttccccggatggacggtcgggatcgtctcttggtcccacaacgtgttagttacactttcaagttttttgggggcttctgctattgatggacagctttttctgggaaataggccgctttttggccgaatttaaatagtaaaaacctattttgctcttattacaatgatgatgagaaaagaaattacaaaagctactccctccatttctttcttttttgcgatgaaccaacgccaaatatttttgaacgaatggaataataaacaggtcaaatatgagtcaaacagaggataaacacatgtttgtattcgtaaaattttacgacttgattacactatccggatacatcgacttcttttgaaaaaaaaaatagtccgtcctatccaaaataaagttgttttagactcacgtagaagcaaagtaagaaattgataacggaagattccaaacaagctttttcccactcttatatgcatcgtttaatttcatgttccgtgcacgaagctgcaatggatgaacacctaccagaccacactgacagggattaaaaacttcggctaccaaacttctcaatcaagatctaaagattcttgctttcgttgctaagaatgatgacatatcataatcgcttacgggcagcattaaacagtcgcaggatagcgaaaaatctgcactcagaagtgccataaataatggtaaacagaaggcacacaagggaacacataatacatgaaagagttgcgacacaaagggttttctactctatccaagcaaattacttgcgccttgctaattgctgagcagaagcaaaattactagagccacattgtaagcagagagccattggccagcctgaaggctacacatatgttataattggcagccaggggaagaacaactcaaaacacctaagcctcaacagtggtcacttgctgccattcgccatcgacggcttctttccatagggtcacattatcattaccatcagacactgccagaatattcccagtcaatgaccaggataacctccacacaggtgtctggaaatcatagagaaccctgccttcccactgctcgccttctttcggtgctgtccagattacaaccgttccatcctgggaggcacttgcaattgttgactttgggaggcctagatttggagcccaggcaacatctctcacccagtccctgtgcatctgaagagccggaaagcaatccatcctccaactcccgttgtacagtttccataccttgactgtattgtcacaaccaccagaggcaagtttctgaacatattcaaactgaccggaaggccctgtattgattagagcacccggcgccattgcaggagcccaagaaacagaggtgacacccactgggtgagcctgatcgatgcgtgttgtgtcccacccaccatcagaacgagcagtgaagactgaaatgttgccatcagatgagccacaagccaagcacagcccaagctcatgaggtgcccaagcaatggaattgacagaggacttgtgctcaatgaaagtgtgcgcctgcgcccattcatcaggcttgctcccttccttccatatgataaccctcccatcatagctgcaggatgccagcaaggaaccatacttaggatgagcccatgcaacttgccagacagggccctgatgtccactcagagtagcaagctgctggtgagagttgccacttacaccaatgatctttattgtgttatcagaagaggctgtagcgatgcgcttcccatagtaatccatggcaatgtcatgcacaacatcctggtggcctgtctctatcttatggggaggcattgttccaatttataatctcctcaaatcagaagtatcccagccaactccaatgtattcacctcaggtaacctatttgataggaatagagaagctaagatcagatggggtacagatcaagtagatgaaaaatataaacggcgtgtctttcacatgtgcagctacggtgccacgcaacagacgcatcaaacagagaagcacattataaggaactaatatgttgtgcagcaaataaagtagcaggagttgatatgctagccagagttagaaaaatactgaaaaaccaacatgattagtatttttttatgagcattgcaaggcagaccttaattccccaaaatgctatcagctgtttacacaagcaggatgattcatctccgaataacccaagcgcaacgcacatcacgagcagattcaaaaagtaataataatttatttgacgaaatatgaacaaatctcgattgctcgtttatcccaacagcaaaacatcccacagaaacgcgaggattaagaggcgtcactgcgtaaatctcctattgctagttttgctacgctaaccacgcaaactctccccccaaaccgaatcctgactaaccctagcgcgcggcgtacgagggcgggagggaagaagaggaggatccgcacagagaccttgcggagaggagggagggcacctcaccgtgggccgagacgcaggggcggaggagagggagcgcgtcgacggcgagcgcggggatccggaggggagggaggcggagatcggaaggcggcggcggcggcggcggcggagatcggggggaggaggggagcgaaacgaaaggacgcgtcgcggcgtcggcgtactcgcgtttcgtgtgtctctagtcgcacgccttattttttccttcttttttttttacgcatggctcgtagtactagctagatcctttgacgtggctcgagcgcagctgcgtcgtccgatcttcatcgcacgagcgtgactgcttcgttccgttgtgtgcattctgagaaacttccaaccacacgatcacaatctaacggttcagattacatcgctacagtagcgtgtgctacaatatgtcggaggctagacaaatctgtcaccgttgctaggctattactgttggcattggagctctctcccgtattgcagactctgcattctattttcatttatcatgtttagaaattattatgtgtaaatatctttagtgataaactaagtcacaagaaaataaataataattatatactccatttgtttttaatagataacgccgttcacttttaatcacattttttaccatttatatttttaaaaattttatgtaaatgtataaaatataaatcatacttaaagtactttgagtgataaaacaagtcacaacaacataaattatgtaattacataaattttttgaataagacgaatgatcaaatgtgtgactaaaagttaacagtgacatttatttaaaaaaagaaggcagtatatttttaaattaatgaatagttaaatatagagtaaattttataaaactacatatactttgcatgatctatcacaaaactgcatatttaagaacttgtttcacaaaactacagatttagtgtctttgtttatcacaaaactacatgtattttgcataatatatcacataactacatatttaagaacttgtttcacagaactacatatttaatatcttcatttatcacaaaactataggtttagtgtcttcattatcacaaaactatatgttttagtattgttaaaacctattgtcggtgacatggggccgggggtatcatgactagaggcttaggtagccgcggtcacccacgtagcctgaccccctcaggggggggggtcgggcccgagggtgacgtggccacccctccctctgtctccccgagggctggggcgcccccgtttcggccccgagggctggggcgccccgaccccctgtggttttggcgccacgtgtgtgggttaggtga

SEQ ID NO: 26283 - DNA, 14725 bp, Oryza sativa
agttggtatgtcagtcccggtcaaatccattccaagcttcagcgcaagcatggcaaggaagtcgctggccattgaatgaaggttgaaatgggcgtccaccggaaaagctggcgagcggggcagaaggcgtgggctctgcttgtcagaggtcacttccggctgtagactagccctcattgtaaaaagcatgtttcctttcttaggcagctggaggcccatgtggtgacccctgaccagataaaaaggaggcccaggcctaggaggaaggaaaaagggggagaaagaggaaaaaaagaggaagaggagttgggactctggcgaatgggtgctagagcctgaactctctctcgctctccggctctctgtattccttcacacacagatccaccagaacacaggagtagggtgttacgcttctcagcggcccgaacctgtctacgtcgcccgtgtcttgtgcacttcctctctcgctgacgttcctcagatcgagggcgaagaacctcacttagcgcccccggccgaaccggcaaaggggggcctgcgcggtctcccggtgaggagccccacgctccgtcatctggcgcgccaggtaggggcgcgcgtgtctttctaagccctcgtcctctttcgtgtgcgccaagcttctcccgctcagcccaatggccgaacgggcagtggcgcacagcctctctccgagcgctagcggtgacgacggggagcggaacccgcgccgtcgggctcgcaccccaccgtccccctctcgccgaaatcttgggcggggggaggcgctcggggaggtcgaaggatccgcgacttcgccgcccgcgggcgacgggggaggacggcgagacggggcgcgtcgccgcctcgtctaccgcgatggcggcacgccccagggcgcgctccaggctgcgggcgcgctcctgcgtcacccgcccgtcgtccccgatccagagactccagcccgacgttggctggatgacgtggccgacttggtcatgacggcgcagcagcgcctaggcgccggcggtaggcgccggcgggcggtcctccgccaccgaggcctctggcgctgccgccgccggctccatgtcgtcgaggaggagggcgcggcgagcggcggccgttacccgccgttcgtccgccattccctcgtcaacgcctccgacccaagaagatgtgcgtggggggccggatgcccgcctcgatatcgagcaccggcgcgacgctcgtcgcgccgcccacgcaacggagggcgcttcctcgtccggagcgccacttcggtccggacacgggggccggccccccgtgtccccggttggcggtgccggctgtcgagcctttgtggagagccttcggaacgtccgttggcccccaaggttccggcccaccatcaccgaaaaatacgacggaagcgtcaaccccgccgagtttctccagatctacacgaccgggatcgaggctgccgggggtgacgacagggtcatggcgaatttcttccccatggccctgaagggtcaggcgcggggttggctaatgaacttgccacccgcgtcggtccactcttgggaggatttgtgccagcagttcaccacgaacttccagggcatatatccgcgcccaggcgaagaagcggacttgcatgcggtacagcgaagggacgatgagtctcttcgctcgtacattcagcggttctgtcaagtccgcaacaccataccgtgcatccccgcacacgcggtgatctacgcgttcagggggggcgtgcggcacaaccgcatgctcgagaagatcgcctccaaggagccccagaccaccgcgcagctttttgagctcgcggaccgtgtggttcgcaaggaggaggcctggacctggaactcctccggttctggtgtggcagctctggccgcccccgggtccgccgcacggtcagggcggcgggacaggaggaggaagaagaggtcggcccgttccaacgacgagggtcatgtcctcgccgtcgagggcgcttcgcgggccccccgaaaggggaggcctgcgagcgacaaaaagaaggaggccggcgctcccagcagggagcgcccgaccggcaagtggtgtaccgtgcacaacacctccctccacgacctcgcggactgccgcgcggtcaaaagtttggctgagcggacgaggaagtgggaggaggagaagaggcaggagcgccgtgagggcaaggccccggcggctcccgccggcaaccggcgaagtgaggccaagcagaaggccaccgccgaggacatcgaagatggcgacgatgacctggggttccaggagcctgaggccaccgtcgccaccgtcgatgggggagcgtgcgctcacgcttctcgccggagcctcaaggccatgaagcgagagcttctggccgcggcccctacccatgaggcgacgcggcgggcgcggtggtcggaggttgccctcaccttcgaccagaccgaccacccgccgtgcgttgcccggggaggacagatcgcgatggtggtttcccccaccgtttgcaatgtgaagttggggcgtgtcctcatagacgggggtgcagccctcaacatcctttcccccgcagcctttgacgccatcaaggccccggggatggtgctccggccgtcccagccgatcatcggtgtgacgccggggcacacctggccgctgggtcatatcgacctcccggtcaccttcggtggttccgccaacttccgcacggagcgggtggacttcgatgtggcggacctcagtctgccctaaaacacggtcctagggaggcccgcgttggtgaagttcatggcggcggtccactacgcctatctccagatgaagatgccgggccccggtggccccatcaccgtccatggcgacctcaaagtcgcgcttgcttgtatggagcagcgcgcggaccacctcgccgcggcgtccaagcccgcgggtggcgacgagaggctcagcacctccgtcccggccgccccaaggcagcggaggtcacgtgcgacgaggtcccggtcaaggaggttgccctaggcgacggcccgtccaagaccacacgaatcggtggtcttctggacgacaaataggaagacgcgctcgtctccttcctgcgggcaaacgccgacgtcttcgcctagagaccggcggacatgcccggggtccccagggaggtgattgagcaccgtctcgccgtgcggccgggcgcaaggacggtccggcagaaagtgcggcggcaggccccggaacgtcaagccttcatccgcgaggaggtggcgcgacttctggaggccggattcatccgtgaggtcatccatccggagtggctagcgaacccggtcgtcgttcccaaggcgaatggcaagcttcggatgtgcatcgactacaccgaccttaacaaggcatgtcctaaggacccttaccccctgccacgcatagattagattgtcgactccaccgcggggtgcgaccttttgtgttttctagatgcatactctggttatcatcagattcgcatggctagggaggatgaggaaaaaactgcattcattacccccataggaacttattgttatacgacaatgcctttcgggttaaagaatgcaggtcctacttttcaacgtactactcgaatttctttgggtagccagataggacgcaatcttgaggcctatgttgatgacttggttgtgaagacgcgcaaccaagagaccttactctcggatctagcggaaactttcgaaagtctccgctccgcccgcataaagctgaaccccgataagtgcgtgttcggcgtgcctgcgggcaagcttctcgggttcttggtctctgcccgaggcatcgaggccaaccccgagaagatacgagctatagagcggatgcgccccccccagcaagcttagggatgtgcagtgcgtcaccggctgcatggccgccctaagtcggttcatatcgaggctgggagagaaggcactacccctatttaagctcctcaaacgctccgggccgtttacctggacggaggaggctgagcgggccttcactcagttgaaggcgtacctcagttctcccccagtcctggtcgccccggagccagatgagccgttgctactctacctggcggcaaccccgcaggtggtcaacgcggtgttggtcgtggagcacgacgaggacaaccctcactccgcgcatccccaccctgtgtcgactcgacccgggagacagcagggaggagaggcccccgagccgaacggcggcccaaggcccccgacggccggagctggccctccgcctgcttgtccgacggtgccaggcgcccccgacccccaggatggccccggggccactgcgggaaggccgcgcctgtcgccctctgaccccaaggtcttcggcacagaagccgagtgcgccccgcgcggcctgtcggacgaagagcgccctggagatgcggcccctggcgaagacgatcggccccgccgaaaggtgcagcgggcccgtctacttcgttagcgaggccctccgggacgccaagacccgataccctcaggcccagaagatgctttacgctattctgatggcttcgaggaagttgcgccattatttccaagcgcatcgggtcacggtggttacgtcttaccccctcggccaaatcttgcataaccgagagggtactggacgggtggcgagatgggcaatcgaactctctgaattcgatttgctctttgaaccacaccacgcgatcaagagccaggccctcgccgactttgtggcgaagtggaccccagcttccgagcccgtctccgcccccgaggccagctcgggcccctcgcagctgcctcacaccgcctactggctgatgcagttcgacggctccctgtctcttcagggcgccggtgcgggggtcacgttgacctcgccgagcggagacgtcctcaggtacctggtccgcctcgactttcgggcgaccaacaatatggcggagtacgagggactccttgcgggactcagagtggcagctggactagggatccgccgcctcctggtgttaggcgactcccagttggtcgttaaccaggtctgtaaggagtaccagtgctctgacccgcagatggacgcttacgtgcgccaggtgcggcgtatggagcgccatttcgacgggatagagcttcggcacgtgcccagacgggataacacggtcgccgacgaactctcaaggctcgcttcctcgcgagcccggaccccaccgggcgcctttgaagaaaggcttgcccagccgtcggcgcgacccgaccccctaggggagacggacgcgcctgaacggcccccgaggcccgtcggagtccaggcctcaggacccgaggggagcgctcccagctcccctagattgattgcttggatcactgagatccaggcgtaccttgcagataagactctacccgaggaccgcgaagggagtgaacgcgtccagcgcatctccaagcgctacgtgctggtggaagggaccctctatcggcgcgcggctaacggagtcctcctgaagtgcattcctcgggaacaaggcgtcgagcttctcgccgatgtccatgaaggcgagtgcggagcccactccgcctcacgcaccttggttggcaaggcctttcgccagggtttctattggccgacggctctcaacgatgcggtcgacctggtccggcggtgcagggcgtgccagttccacgccaggcaaacccatcagccggcccaggccctgcagaccatacctctttcgtcgccgtttgctgtctgggggctcgatatcctgggtccgttcaggcgggccccgggcgggttcgagtatctgtatgtcgctgtcgacaagttcactaagtggcccgaggcttatccggtcatcaagatcgataagcactccgcgcttaaattcatcaggggcatcactgctcggtttggggtgcctaaccgtatcattacggataacggcacccagttcactagtgagctcttcggtgactactgcgaagacatgggcatcaagctctgcttcgcctcccccgcccaccccagaagcaatggccaagtggagcgcgccaacgcggaaatcctcaagggcctcaaaaccaagaccttcaacatcctcaagaagcacggcgactcgtggatcgaggagctgccagcggtgctctgggcgaaccgaaccacgccaagccgagcaaccggggaaacgcctttcttcctcgtctacggtgcggaggcggtcctcccatctgagctcaccctgaggtcccctcgggtcaccatgtattgcgaggctgatcaagatcagcttcgccgagacgacctcgactatttggaagagcgaaggcggcgcgcggccctccgagccgcacgctaccagcagagcctgcggcgctaccatcagcgctacgtccgggcccgatcactctgcgtcgacgacctcgtcctacactgcgtccaaacacgtgctggactgagcaagctctcaccaatgtgggagggtccgtatcgagtgatcggcgtcccccggccgggctccgttcggctggccacgggcgacggcacagagctgcctaacccgtggaacatcgaacaccttcgtcgcttctacccctagtgggggtcgggtgtcatgtctcgggctcgggccaaccccgcaccccccccccccggggcgtgcagggttggccgggggctaccacatgcatatacttatcttttttctcttccgtatttcaataaaagcattttcgatttcctgaggactgtgtctgtgccatcgtttccttttgaagaatcttggcttgaattagcacgctcgtgctcgaccctgccctcggtggcccgggccggctaaaatcgccaaacgggcccagaaccgagccgtgccccggggcgtggtgaactccgggggggaatcggcaaaggcccacaatcgggtcatccataaccctcggtcaccgcgctcccggcctggccagtctcgacacgaggatctccccaggcactagccccgacccgcgccgtttgaggctgggacctgggcaagagcccttgttcaagccaagacacagaaggaccgcggcacagaccatcctcgtctcatacacacaacaaacagaactgacgcagaaatttcctctttacttgattgcagattaaatcagtctatacaagaagggggcccgaaggcctcagaagaagaaggaaaagttattaagattggcgggggcttgggggctcactccgacgcgcccgggtcgccggcctcgtcgtcgctgtcgtccgcagcatcgtcaccgccctcctcgtcggagtcgagcgcgaacgcgagccgaggggccgtaccctcgaagctgtggacgatgtggttggcggcgtcccagacctgcgcgcgcgcgccgtcctcggttccgggagggaactcttccagcgctgcccacggggagaagtcagggtccctggcctggtagcttgccagtacgagctccaccgcccccccgggtgaggtccctcgaggatgacttgatcgtctcctcgagctcctcggggagccgcttgagggccccggccatctctgagaggcgctgggcgaggcccccctggttggcggcgtacttcgcgtaccgcccgccccagaggcccgcctgccgcccggcgcggtctagacgggagacggcgtcccgaagcatgccgggccctacctcgctcgccaagcggagggcctcgacctccccggcggacgagtccagcacgccctgcatctcggcgatggtgtgttcggcggcagcgaggcgggcggctaggtcgccgtggcccgcggccgccccgccgctgtgcactctcgcgtccagctccttcgcccgcgcctcgagttcagcggcccgctcatccagtaaggccctctcggcgcgggcgccttccagattgcggcgcgcctgctcctcccgcgctgcctcgcggaggaacaagctgtccgccagccgctgcgccgcggcctcggcctcctcaagagctcgcccccgctcggtgagcgcgtcctcgcggaggcggagtgcggacccttctttggcgcaggcggcctcgtgcgccgccagtgttgcctcccgggtggcgacggcggcctcgcggtccgccaggtctctctccttcgcgtccagggcgcgggcgcgctcctccagcgccgtggcgcgagcctcaagggcctcttcgcgctgccgggacgccgcctcgttctccgccgcccgccgttcacgggcagcggcggcgtcaaggacaccccgggcagcgtcgagcttctcctctagctccgccgcccggcttccgtattggaggcggaggtcatcccgtgcctcgtcgagaacggcggtggcgatgagggcagtctcccgctcctcctccacctccctggcgatctccgccaggtccctacgacgggcctcgagctgtgaggcgtgccggcggtgtgccttgcggcccgcctccaccatggcctccaccgagcgccggccctcctcgacgcgcgcccacgccgcgtcgagctccgcccgctccgcctgcagggcctccatctgggcacttaacccgtccagcaccgtcctgttcgcggcggccaaggcctgcaggaggggctccgcgctcagtggggcagcggaaggcataggggagagccgcctcggtgtgggtgccgcgcggctcggcccgccgatcgacgtgccggactcgggggcgtcccccgaagctggctcgtcccaagcgtcgcccgaggggtcgggcccgagcagcgcgcccgcggcctcgtcgtgggtggcctcggaagtcgtcgtcgcctcgggcggagtcgggtcgggggcttggcaggccgcctggcgtgcgcgcgccgcctctgcctcccggacggactccccggcccggcggagtctagcctcctcccgagcggcctcctcagcctggcgaacccggacggcctcctgggcagcctcctcggcttcccggaggcggtctgcggcttctcgccggtcagcttcccgcctccgggcctccgcggtcgccgtctcctcggcctcagaccggccggacttggaatggcggggggggcgcgacgggatctcgctgaggcagaagaaaaaccagaagacaaaaagaaacgggtgagtgaaaactcgccttgggagatgggagaatgaatacggccgcggtgggcgcggggacgaacctgcggggaggtcggctaaacgaccacctcgggggcgagatgaggttcccccggcatggctcggtccccccatcttgcggggccgtttcttctttcgctccccctcgggctgcggcgtcggcacggcaccctccgggcgcctactgctggcacgcaccaccccgccccctcggggaggagatgggggaggggtaccctcctgcttcctcttcccccgggcgtcggcagggcggctgccccccgggcccccgtcgcggggcccagaagcacgaccccctcccggggtagattgttcccccctgcggctcccgcccgcgccatcgtggcctcggggggcccgctcccccgacgccccgaccacctgcatggtggccaggatgctggcgcgctctggatcgcagcaaagggggaggaccccttgggggatgagggatgcctccacggagctgagattcagcacccgttggaccaccatcctgaagtcctcagggtcccagtcccatttgcgcccctgatgggtcctcacgtagtcctcgggcccggtgtactcccaggcgccccgggtgcgccgctggagcggcgcgatccggcgacgaaggtagtcgccgaacaccatggcccccgtgagcccctgggatcgcagacccgccaggcggtcaagaacggcgtcgtagccgtctcccagatctaccgccgcccgccagctggaggcctgcgacgggggctggctcggaagtcggaggcgcgcttcgtcggcgagaggggtgtagaaccaatcgctcttccagtcgtcccactttttgcggaggacgcaaggaatgtagcggttcagcacctgcccccgcggctggaagtagcagccaccgactaccgtcggcggcgacgccggttgtacggtgaagaaccaccggaacagccggagagatgggcgcacctcgataaacatctcgcacaggtgcgcgaagatggccaacgtcattatcgcgttgggggtgaggtgcgccatctggagatcataaaactccagaatatccatgaaaaaaatagagaatggcgggaccagccccgccattgcgaaagagaggaagaagacggaccgccccgggtagtgtggcgccgggcgtccctcgcccagcgcgaccacctcccggccagtggcagattccggcatgaatcggcgcggcagcccagcctgcctctcgctcacgatgcgggaaggcggcagcacgctaccgtcgagcggtgcggagccccgtgccatgacgccggcggaggaggagcttgagagcgagcgagtgcggcaagggtagggcacaggaaacgaagagttagagcacaagtggcgaaggcaaggggaagagtggcgagaggaaggaaacgaatcccttcctcggcgtctttacacccttgccaacgctatgcccggctcctcgcttcccgcgcccactacctcgccccctcgtttctcgcgcccacgcctccactaaccccactcgcccgtttgcggcgcacgcggcagatgtgcggctgtggcggttgagatgggacagatcgtgcgcgcattaactacgctcgccaaccgcgaaaagcgccatcatcatgtctccaggcgaaacgaaccggctcgtcccgattcgcgcgctgctcgagtaatgtagcggtcttaaagaggccgctcattattgtcggtcggttttcccttgccgatgcgcgcgatttgcgaccgctgggttttctgcccgcctgtagggacctgccccacctatcaccgggcctaaggagtggcgtcacgcccgagcgcttccctcgaggggggcgatcgccctggcgtaacgccgggggctactgtcggtgacatggggccgggggtatcatgactagaggcttgggtagccgcggtcacccacgtggcctgaccccctcgggggggtcgggcccgagggtgacgtggccacccctccctctgtctccccgagggctggggcgcccccgtttcggccccgagggctggggcgccccgaccccctgtggttttggcgccacgtgtgtgggttagatgagcacagcggggctcacctaaccgcatttatagcgggttggacgagcgcgccacgccgcatttaatgcggcgcagcgcacgcttatccggtccgtgaccggtcgcggtgtgtgaccggtcacagaccggtcagatcgcgggttaggtggcaacaggcggcctgtcacacgcctcgccccgtcccgtcggaatgatgagagcttcctggctctcgtccctagccggagccggcgtgctaactcctggagttggtatgtcagtcccggtcaaatccattccaagcttcagcgcaagcatggcaaggaagtcgctggccattgaatgaaggttgaaatgggcgtccaccggaaaagctggcgagcggggcaggaggcgtgggctctgcttgtcagaggtcacttccggctgtagactagccctcattgtaaaaagcatgtttcctttcttaggcagctggaggcccatgtggtgacccctgaccagataaaaaggaggcccaggcctaggaggaaggaaaaagggggagaaagaggaaaaaaagaggaagaggagttgggactctggcgaatgggtgctagagcctgaactctctctcgctctccggctctctgtattccttcacacacagatccaccagaacacaggagtagggtgttacgcttctcagcggcccgaacctgtctacgtcgcccgtgtcttgtgcacttcctctctcgctgacgttcatcagatcgagggcgaagaacctcacttagcgcccccggccgaaccggcaaaggggggcctgcgcggtctcccggtgaggagccccacgctccgtcacctatagttttgtgataatgaagactttcacaaaactacatgtttaatatcttcatttatcacaaaactgcaggtttagtgtcttcattatcacaaaactaagttttagtattgttaaaccctatagttttgtgataatagagacactgaatctataatcttatgataaatgaagatactaaatgtgtagttctatgatgaacgaatacactaaatatatagttttgtgaaagaagttcttaaatctatagttttatgatagattgtacaaaatatctatagttttgtgaaacaagctcataaatatgtagttttgtgataaattgtgtaaaatacctattgttttatgaaatttactcttaaatataaatatatgttcaaaatttgagtgcatcatctattagaaacataaaaaccggaaatagcatgtgtccgaatacagggtcgtgaacctactacacaaggtatccatgtacaggcgtacagcaaatatttgcatggttcaagtgagacaattcgtgacagaatcatcaaacaaactctgcaggcaaagaattcatgagcaaattgcatggcagctgtgctgcgcgcgtctataccaattagtattgctaacataacagtgaatatcttttcctttcagatactgtcacaaaaaccgatacagcttaatttgatagaatctactcatgtagctgaaatgaggaacaaaacttagctcagctcaaaatatttctagtgactatcattttcgaaagggaacaaatacagtctcctcataaatgtaatgtcatttttgaaagcgaacaaaagcagctcctagctgtgcctcacaaagggagagcgtttcaggattcaatttcttctgaaaccggtctttgaggttaagctttgtcactgtctgcaatactcgggtgcaaaatctccggacttcttgacgacgtgacttgttttctgggatctttgtaagaacttcttgtatcagctcgcacaactgagaaaggtgcttcttcaacaccttcgatgcactcgaatcatcaccagcccaagatttgagtatgcagtctaccaattctagcgtttgaactcttcgatattcagcttttgtgcatccaatcttctgcagaacaaatccaaagagctcctctcctacccaaggattcctccggacagcctccttcacaaacccaagcttcaaccgcgatttcttgttgttgaagtagtcggtcaatatatattggaacttttcgacaacactcgcaagctcctgtttcgaatgactctttgaattgatgatcttcagaagccaaaatgcagcattttgggctacagaagcaaccgtggtgtatcgtgaccgcgatgccaattttagagctttctccagcaaactttcaagagtactaatctctacaccatcacccttaggataatccttggctttgaatatccttttctgcaatataccacctatacgttgcttgaattgctcactgccatcagcactatgtgacttcacaaaagcttgcattaagaaagaatagacctccagcaccagattatttcctgtggagtttagggcatagaaggttacacaacatataacaaatgtaaatactacagttaaaactgaatgaaagctggaccatttcctaataaaaaaccttgcagtaacaattaattccctgatgtgattttggaggcagattttcggcaatgatcaatttttagagtatcctttgactattatatgcatgtatacaacttaaaatgaatgaaaatatgaaggaatatttgaaatgtacctgtattcctctgaagatatatctcaagtaatgtaaggacacggagcttgacccgcataagttgagattgcttagtttcactgccaggaaggttgcgctccttgaaaatcctcgcaatgtaaggatcaatgcggaacatagcatcatcatccataccatctgatcatctgagtcatccccatctttggtaacttctgcaccatctccatcctttgactcatgggcaactgattctttcaaatcatcttgaccttcatctacttcatcagctgaatcatcatccatttcctcatccagtccgtctgcagtagaatcagtgtccccaacctccgcgtcctccacaatggtttcatcatcatcttcaatgtcaacacatgcatcatcttcatcatcatcactacctgactggcgacgagaacctttcaaatctatcttcacaactctcaacatgtcaagaagccctgtttctgtaatttcatcacagaccacacggaagacctgttgattcaaataaaagaccaagttagcgcagccaagtcaaatgtttagcaagaaaagcaacaaataaccgccattaaacagaaacaagaaaggaaaatgagggcagcacaatctatatgtactggtgattttactatgtttgttatttcgactagtatgatagaaaatggctatttactaggattaaatttctgctagtacaattgaaaatggctgtttagaaaggagtgtatactagataatttaaaactgcatgcccctaatttatttcctattatcatcaacatacgattcttcaaaaatgga

SEQ ID NO: 26284 - DNA, 2331 bp, Oryza sativa
  unsure (1)..(2331): unsure at all n locations
atgtatggagaatttggaatgcaaacaacacatgattacaaaagctggtctataatgagcttcagagaaagacaaacactaccagcacaaagtatatgccctttcccacttctacaagaattctctccaacactaaaacttgtgcaggtaaatagtatttgtgaactgcctcacgcaattagaatacaccctatattgtggctatctgtataccatagtaccatacctccattatggagattaggcttcagtatttgtttgaactggatgacgcccatcaacatcaagttgaaatatgttacactcaccaagttaaaatagaagatctaagacctgtttgtttactctagcatgatgataagtgttccattttactttccaactgcatgtgttgtataccgtgtttgtaagaactaagaacccaaaaacttgcatgttttactcccaaagaccagaacatgcaccttacaaacatcatggtcaaataagagcaatcaattgctaatgtaagtggataacagcagagaataaacattatccatgaataatttgagccttcagaaagtatttaatatatgttgcagaaacttgtttggatgaattacgacataatattgttattatatcataactgcaacataacttagctacgcgtactgatccaatgacaaagaagaaacaaaatgaaccagtaaacaataagagtaactattgcgtacctggtacagcagttccagggcttccccacatttcagcggctgatttctatccatggacaggcagcggtcacacagttccatttgaataaaaagctgtttgttctcaaaccaagaagtgaaatatccaacaatgttctcatggcaccctgctaagacatgtaacagatgttataaccatgtaagaaatatagctgaaaatgaggaggttatagttaattttgctacctaaggctgccaaagcttgaacttccttcactgcttgcctcctgcaatgagagagacaacatacaagtatgcaacattagtttttcatggttaataattaagcataacgactgctgcaaggctacctttccctgtcattatgcagttgcctgatactccgttttactgcatataagcagccatctatcctcttcagaactttgaacacaacactgaagtttcacgtccaatttgctgaaaatcaagtgtgctcataagcaaaaccaacataaaatggaagtgtataacctgacacagataaccaatacatattcaaactttcaaagcaaacctcaatctcatggaaatcagttcgatagcgtgaaaggccatcaccatcaacagaaggagaaaaccctgcatataaaaaatgtgtattgggagatgtaaggctacacggtactgacaaacagataaatgatagttttgaggggatgtatcgagatgattatgatacaatagcatacaatgcatcaaaatgctacctgatgatttgcattgtctcccaccaaaaacattatcatctatttgatgatctgtattgaggtatggattcctgatgcatggtggaggcatcacccggcagcgaagagccactgccgattgggagacataactacctctcttgtgcgaactagattccttcagctgttcctcctctgaatcatctagaccttcaaactgaactggagcaatccactggctatcaaaaatgtcattggagccaaggcctttgggggaacaatctgtaagcattggcacacatccaattatacagagaataaataaacaaagggagcatatcaaactagtataagtgaagtctcacctctcttgtatctcttgctcctacagactgatttctctggagaaatggggcaagggatattctnctgcagatgaaccacagaacggacaaaaaaaatcagcaaaaattaaagtaaagctcaatatccatttctaatcgatcaatctcgcatcccagaaactaaagcgccgcctttcccccaatacccccaaccttattggcgtcgaagccgctcccgagctgcggcgcatctggcgtgatgtaatccggggtactgcagaacagcaagcaaatagatgaagaaatagggttaatccaaccgcactccaccccctcaagcacacgaaagcacagctcggagccggatcgggaaccctaccagaagaaatcctggctgaggatgccactatccttctcctccacgacctcgtcggcgtccattggcgtggcctgcggctgcagcggaggtaggggcggaggcggggtcgggtccgggtcgcaggacccctcgagcagctcctcgaagggcgtgaagggggt

SEQ ID NO: 26285 - DNA, 14900 bp, Oryza sativa
  unsure (1)..(14900): unsure at all n locations
tttttctttctcgatttgggcgttggtcgcatgggccaaaatggcgccctttgtcacatttgtaaggcctgcgaaacgaaaaataattgggccacaatcccgggcccttctagggctttttcgggttaatccaaccccaagaaaattaagaaggattttgagagatataattctacacctatcatgtgtagaattatttcccctcaatcatttttccttaaggattaatccaacaaaggctatgaaaaaagagctagagtttcgcctgtcataaacaagggctaaccgtccgaagcattgttcggttatttagggattgcagggtttaaattatctctttaaatcccctaaattcttttgtggtttggattaaccgaataagatcttatgggtatttaggcccacatatcagggtcattatgagagcccaaacccatgatgtcgtcttatcgttttgagtacgtatcaaagataactaaggtgtgtttcatttttacatacgtaattgttatagaagtattatttaggccatagttctaaaaggattatctctaaaattttttatatcatactttctctgtctaaaatatactcccttcgttttacaatgtaagtcattctagtattttacatattcatattaatgttaataaatatgggaaatgctagaatgacttatattgtgaaacggatgaagtatatagtagcttaatagtaggtggggcatcatcaagtcctacgagtctagatagcatcctgcccggattgataacatttggaaagggtgaatagataacttttttaaagttatttattgtttgataacaattaatttatttgtatgagcaagctttgtctatctataatctacccaattatctggttagaacaccgttatcttctagtgtaactattttcaattactacataggatacgcatatgtagctattgggaaatcatgccataatcaggttttgcaaagtcgcacgattatcatgtgcggtaatcttctcagttcttaaaaccgtggtaatcctcacgacaaccacacggttttcacagtaatcgcggtaaccgtcttatcgtgggggtgacattaaccccatccaaaatagtttggtgaactccgatcgtaacgtaatttgtctgttcaaagagtaaagttttttttccttcatagaagatatactacttagctaccgtatgaatcaggttaaaaatccctgtttgggaaacatgggtttattccaagtccctgttacatcggatgtttgatactaatttggagtattaaacatgcattaattacaaaacccatttcataaccttgaactaattcgcgagacgaatcttttgagtctaattacgcaatgatttgacaatgtgatgctacaataaacttttcataattatagattaattaggcttaaaaaattcgtctcacagattagctctcatttatgaaattagttttttattagtctatacttaatactctaaattagcatctaaacatccgatgtgacatggaagttttaacccccatctacacaccaaccttcgtggggcaacatcgcagtgactctgcgtcaacgtagtaccggggtagaaacaaacacgtccgccgccgggcgccggccagaaaaccggtagaaaagggaaccgacgagacgagacgagacgacatccatccgcgcgtcggcacttgacattacacgcggacaccgacaccgcacccaccaaactgcccccagaattcgtcgtcaacctcaactctgcacacgtttatacgcccaaacacctgtattctgatgtattttaagcctcaatttaaaatagattattgactaaattattgttacgtattagtatctgctaaattgtagtgatagattatatattttggtaaacaaagttaaaaattaattcaggacaagtggcctaagcggaagaaagttaaaaaaaaagagtgtttgttgacttgtaaaaaaattagtccgtttcaataattcgataaatagtatgagaaaacaatacgcataaatttctaaacagccagctcccaaatactagttaggtagttgaagattatattagttgtagttgttaggtacatgcagcaacgtgctctcgaggaaaaagaatacatgcccgatcacatgaggaagcgtattattgtagtggtatctgtgattccatggcctgtacgttttctttttcctcctttctgtaatgcaaaaactcgcaggggcatgtgaacctgtcggtgatcactgctggtggatttttttttttagataatgtagcggtgatcactgctgatgatggatggatactatgactctataagcctcataggttacccattattattcctaacaagtcaagacgtcttattaataaataaaagctaacttgtaaataaaacttttatatatttgtccgtagcgatttagaaaccaacgctaaaaattatacattgaatcttaaaatcatgttcgaaaatttaaaaatttactcttgttctgacttattagaccgaccgatgtttcaagcacgatagaagaggggaatggatgatggatcattagccaattaacaacgttctatcagtcgccttaaatacctagcttagctctcaccatatctcgtgtacagtagtacgatcagacttatcagaattaatgctcaagactcttgacgacgatgtagcagtacaccatcattgttgttgttcttgacagcttaagctaccattaggttgaactgttgaagtactgaaccatcagatctgactaaagcagagtgaagcggcagacgcgtgtgtacgtaccatcccgtatacaagatcgtgtgtgtttatgtacttgattagtatcatctatctaaccttcgtttgttctgatgcacttatcctcttttaattctgatcaaatgcacggcaccaaatgtggcaggcaagcaactagagtacatcgactgtgcagatctaaaaggacggataagtggataaccttgtactgtacaatatataagatatatagaaaaagtttcagctaaacatctgggcctcctttgaatggaacgaacagataaatggaaaaaatatataaaattttgacagtaaatgcaaagcagatgattaaaaacacacggaaaaaaataatcgttcgaagaaaaccgtagaaatcgaatgagacgggaaattcaaatgaaatttgccaacacattagagattttgctagtttttctttcaaaatattaatataattgtctattacatagaatttttaaagtaatcgataggactcaatccgtgcgtttcaaatgtcctcgtagaaattttttacaggaatgaaatactcaaaaatatcatttattttttacaaatcaagcttgtctgaacattataggggacgaaggaacgcacaaattccgccattttattctgtcatgtctgatgattgatgaatgatgaagatcgaaacaagtgtgaaacagaagacaatctttcatacatccttcctattttgttccatacttccactcggtttgaatgaaaaggcactttttaaaagaaaaatatcctcccaaaatagtgccctctggtagcaactttattgactcgttattatctcccctaaattaatcacatgttaatcaccaaagtactggagtactttacttctattttgagatgactgatgcgatgcgaccaggtccgggatcatcacatccgatccgaccccaaccacaaagcatgttggttaacaactgaaacaaaactactttgccctatcattaacccttaattaatcatccccttttgtggccccgagaatttagattatttaccatcaaatttacatgactcaacttttttaccacccaatccgtatgtcttctataatatatcattaggagtactaattagtataattggtaccactttctcagtttttcaagtatttatcatttcttttctcaatttgtattctttttcaagttttgtggactgttttgcccctgggcccacctgtcaggtgaaagggtgatttttcctcctcaggatcgatcgatccctccagcctccaggcgtcgttcgccaccaaaccccgtcgccgagcgccgttcgccgtcaatcccgccgccgggcgccgacaaccccgccgttcgccaccacctggacgagcgccgccaaccaaccgccggcgggttctaggccatgcgccgagcgccaccagcgacgaccaccgtgcgccgagtgccgctcccagctcaacgcccccaacgccgagcgccggccgcaacgtcgagtgccgcgccacgaccccaacgccaagcgccaccacaccgttgccgcccccgccgacactgtgcaagatggaggcgatgagcagagctggatttgtgcaaagttgtagttttcagcaactggaagatcagatagttttcagcacctggatagtggcaagtctgtagttttttcttcagtgtttcttcagtagttttcggtggggatgctgcagttgaaattgaaattaacgaggtcagagtgtctaaagtcagaggcattgcaggcaaagtttctgggacatatgttcttatactgttagattccttttctatggacaatagagaatctgatgacaatgcagtgacactggaagctctagaaaattcaggtggaaacttctcaagattttcacataggaaggttcttgagatttaaccagctcttcatttcttgctagagcaagtggagaggctgatgattctgaaggttgtgaaggggagggcatgatcgatgtaagggaaacgctgatcatagccacctctccctctctcccttcaaaccctaggcagcacgggggagacgtgttcggccggggtggcggcgccaggttgcggtggccggcggcaatgctcagcagtggggtggcagcgctcggcggcggggtggtggtgcccggcggcggagtggtttctcgctctagttgacgcgctcagcgagacgtgtgttaacagtgaaatttggtaagcccggagtagtcatcggcttagagccaacatcggcttcaaagtccagagattagccgatgagaattgtcaagtcgtcagttgtcggattcttgctatatttggttaaggaaattgatctactaaaggaagcttatccagaagagaccgaggtcaaagagaatgcggcatggaaagttatttattaattaggaatagtttgttagtttccttttatgtttaggaaaatgtgtttagtgtcctataaggactttatcttttccttttatctttaggaaagtttctttcttgtccggcaaagacttgtatcaacccatgggtataaatatgtacacccagggtccatgtaatctatcaattacgatcaatagaattcggcgcatcgccaccttttaccttttctgctttattttatcgtccagcgggacttggcacctgacgcggggttgcatcggtgttcgatctccggcgaagggataagtccaatgttccgtcggtccaggcaattgtattgtctacgtcggcgtcgttcaaggctgcatcagtacattcgacctcttggattgctctggtttggatgatatatttgcctacctatttatcatatgtctatgttaatctagtcttagcatatcaatttagctctatcggctgcttctcgttttagggtttctgccggtattggctaaatcgtgttgctatattagattagccaagacatctaccaccctgaaaatcagtcaacggcttgattgtctagatattgtgcttctttttatacttagtgctgcatcagttgagcttgatctactaagtcgtgcttagaaccataatctctagcctgctttttgactgccaataagggtttcatcggggtttcagctgatgagttatttggacgttgcatcggctcataaggattgcatatacatatgagttgcatctagccgatgacaacaaaggtttcacttattaatctaatcttgtggatttcatgacatcggacctccagccgatatgtgctttagtcttcggatcaatgcttattccatcatatcattatagccgattggtttatactggactatattattgttatattttattatcaacaaccgattgcctttacatcatcatctacattggacatatagccgattgcttacaccttatcgctatcggctggtatcggcatcggctattatcggctatcggctggaactactccatcggcttatcagccgatcggctgttttgatctactatttgcatatattgtcagttgcaggatcaaactgactggcacgcccgcatctcattaatctttggacctgcacaggagctaagcagatctcccagaccggtgtgttcgattttttcatcaacaacgacgagacagagagattgatcgatccagactcagagatatatctcaccctttcacctgataggtgggcccagggggcaaaacagtccacaaaatttgaaaaagaatacaaattgagaaaagaaatgataattacttgaaaaactgagaaagtggtaccaattagactaattagcacttctaatgacatattataaaaaaacatgcggattaggtggtaaaaaagttgaggagtacgaatttgatggtaaatagtataaattctcgtgggccccacaacccagcttcctccgcctcctcggccggagcgagccggccggccggccggcgagccgccgctcgtctccgccgtcggtggtaggtagccaagccaagccacgctgtcaccgaggcggtcaacgagacgacgtggccaccaacgcgcttccccccactgcctctgctgacacatgcggcggctgctaattactgggattattacttggtaaaccctgctactgcctccgtcacacaatataaaagattatgtttttttcttaataaattaacaaagtagtaaaagaacatgttatagtataaattgtgatggatgagagaataaaatatataagatttgatagatgaagaacaaattagcgcaccttccgtaaaaaaagaaaaatctagaattagatattagggtacgaatctaaacatgtgtatatctaggccctgtttagatgggactaaaacttttaagtctctatcacatcggatgtttggacactaattataaatattaaacgtagactattaataaaacccatccataatcttagactaattcgcgagacgaatcttttgagcctaattaatacatgattagcctatgtgatgctacagtaaacattctctaattatggattaattaggcttaaaaaaattgtatcgcgaattagctttcatttatgtaattagttttgtaagtagtctatatttaatactctaaattagtgtttaaatacagggactaaagttaagtccctggatccaaacaccaccccaaattcgtagtattagaatgtgtcacattcggtacagattgattttttatggggtaaatattattgaatcgtactaccaatttcctaccacggtatagatgaagtacaaagttgatatttcctcccacgaaaaacaaactatattttctaatacaacgaatctagatagtgtactagaaaatatcatatctaatattatattattttttttatagtacagaacgagaacgagtatgtgtgataaatgggaaataaagtatcgtcttaggatcagaaatctctttaggagtattatgaatggagtactaacctcgccgttaattgcataataatctggacaagtgatgcctaattaagccatagtttaatcggcaatttgcttcagatccagctcggcatgagactatcagaggcataagtgtcaaagcatctctcgagtctcgagtcttcccttctcagccagcttcgcctcgctcgctagctatccatctcttcctcctcttcttctcccttcccttgtttgcttggaaggagagggggaagaaaagtaggaggacgcggttgcgggttggtccagatctagggcaaggcggtggccggagtttgagctgggcccgccggcggcgagatgaagcagtcgatgcggagccggcaggagccgcggcgggtgagcaacggcgtcatcatcgccgccatgctgctctccctctgcgtcctcagcatcgtcaaggccagatactgctccacccccttcggtacgctccgcctccgccgtggcggcgcggcgctcttcttcctcctcctcctcttgatttgtgagttgggagtgtgaaatttggttgggtgatgtgcagttaagcccgacgaccagctacaggagcagatgaactccagcatcaggatggagaccgacgagccggcgaccatggcggcgggaggttcgtcctcgccctcgctagctctccggattgtgtgtgatttgtgctcaacgagtgcgttcttgaatttgcagagcaagaggaggacgaggaggaggagagctctggcggtggcggcgctgagcctgaggtcagcgccacccctgccgtcgtggtcaccgccgcagccggcggcggcggcggcaagaggaagccgacctgccgcatgacgagcaagcggtcggagcggtgcgaggcgagaggggacattcgtgtggaggggaacgcgtccaccatctacatcggcgggatcgacaaggagtggaagacgaagccgtacgcgcggtaccacgaccccgtcgccatggccgtcgtccgcgagttcaccctcaagccggtcaccgagtcgtcgccggcgtgcaccaggaaccactcggtcccggccttcgtcttctccaacggcggcttctccggcaacctgtaccacgactacaccgacgtgctcgtgccgctgttcctcagcacccaccagttcaagggccaggtgcagttcttgctcagtgggctcaagccatggtgggtgaacaagttcaacctcttcttcaggcagctcaccaagtacgacatcctcgacatcgacaacgacaaggacgtgcactgcttcccccggatcgtggtcggcgccaccttccacaaggacatgggcgtggaccccaagcgctcgccggggcacgtctcggtggtggacttcaagcgcgcgctccgccgcgccttcgggctggagcgcgtcgcggcgtcccgaggcggcgccacggggaacggcaagccacggttgctaatcatttcccgcaagaactcgcggcggttcctcaatgagcgggagatggcgcaggccgctgccgctgtgggcttcgaggtgcgcattgccgagcccgatcagcacaccgacatgtccacattcgcccagctcgtcaattccgccgatgtcatgatcggtgtccatggtgctgggctcaccaacatggtgttcctcccccgcggcgccgtcctcatccaggtggtgccattcggcggcctagagtggctcaccactgtcaccttcaagaatccggcgaaagacatggaggtcacctacatggattacaatgtgcagctggaggagagctcgctgatcgatcagtacccgcgcaatcaccaggtgctcactgatccctacgccgtgcacaagcaaggctgggacgcgctcaagacggcgtacctggacaagcagaacatcaagatggacatggacaggttcaagaagacattgcaggaggcgctcgacaggttgccgccagcatgagagcttgatgaactgatgaaagctcaagcccacgaggtggtggtggtggtggtggtagatagataggttggtgtatctatctgtgccttctcttgcttaacttatttttccttttgaaattctttttacgccttcttcttcctttagcaacattcatttgatctgttgttttggaaaagaaaaaaagaggatgaacaagaacatcatgttacatatgcctagctgatgagtaatttataccctttgtgattattaattggttgtttatttacaagtaaatgtcaagatacaaaattgtggattactagtaagtatcaaatgtgagtgtacctccctctaatgccaggggggcaaactgtattctcctatgccttcttcattgtatcaattcaattcatttcatccagtacattgcctctaccaaaccatgccaaaattgacctttcctctgcaaatgaaccacgattttcaacatataaacgaactacatttgatcttccattgtctcattagtcattgcacaacaaattagtagagtgatcagtcattgatgctagaacagtggatcaaaggttccatgttcagtttggcagatgattagtgccataattgggggataaataggccatgaacaggaccaggattctccctggattcaactaacacaatgagaatgaaatggaccaccattggccattgcctaccacaactacctgtcatggtggcattgcataagcaatggaaatatttcaactttgtcagttcctttctcttgtgaatcctttggtttgggaagagatgagcttccttcctgctctgaccggatcacagcaagccaaattcatagtctgattggcatgatgatatatcagaaaaagagagaattttttggccaacgaaggtttggctgatctgctcggccttagtcaaatctgtctctttcgacgaactgcgttgcgttgctaatttgtcactgatgacaactacttctacctgccatctcatatgtgagcctgtcagaaacatggagtgatatgctagtaggaacactagaagcttccttctgtttcctgtagggaagaactgaagaatggtcagcacatcgtcgaccgtcggatcttgatcagatggtatccgcgacgcgggacccagccatcagtggttgggactaggaattttgcccaattgcaatttggcatgatgaatgtgttgtcctttgtgaaattttctaaaggcaagcagggtttgtacttgtgtgagatgtgaaattgattgggtaataattgacttgttcatggatgattgagttttaatgggagagtgattgcaggatgaattacaagttatcggtcatatgtgatggtaggtaaattgacagggacaacacaagctgaagctgaagaaagaagaagagaacttgttcaggtcagcaactagcttgtacttgacactgaattatgaatgtgctggagcttgctgatggctaaggtgatggcattgtgaaattaaccagctggccagttgatttgcagctgaaataatcaatctctctcgtcagcatttgttgcttgtaagcaaaaatcaaccaccgacaaacaatatggaggcactgttcttgcaaaatccttttggcacaggccgggctttggagcttacccttggccggttttgaatcaacatgaattccagtcgaatttattcggaattggattagttagttccgacgttttttttttataaaaggaatcgagtagaattcagatagccatcctatattgattctcgggataatggagccatggactatactcccttcctgtcaaaataaattcactcttatacacaaatctgattagattcgtacataagagttgatttattttagtacataaaggatttccttttgaatgtgtgaaccatttgtcggtgtctgcttgagtacgaatagtgagtggctcatcatactcaagcacgatgacctcttaaacaaaagagcacgacgagacgatgcttgggatggcgttgaattgatgaattatacatccggaatggaaatgccgtcgtcggagaagcacacgaaagatgacatcagcattcccggccggtttccgccgccgccgtctcgccggcggcaagccgtcgtccgtccatacgccaccaacctcaatgactcgccgtcgtcaatccatcgcgtcgctttcacaacccaaccagtccaaaaaatccaaatgtccagaactgtacggccgcgttaaggcagaaacggatgattagccacacatacaacgaaagatatgattagcatataattaattgtgtactcctattaattattaaaaagtaaaaaaaataagtttatttttaagcgattttttatatagataaaacttgcacaaaatgtataaaatatatcatttagtaatcccttcgatccaaaagaatcaatccagattcatagccagagtttaattctttttaaaatgagtgaagtaatttaaaaaacatgctaatgaaaattgaggaagtagtcaatccgatcttcactgtaaaacggggcctactggttaggcaactacccaccaccatcatccatccaggactgcaatttctcaaattttcccacgtaatttatttaaagaccatagaaaagtttgtttaaagaagtttagtaagtactgtttagtaatgttgatgaagagagtttttgcaaaaaatgagctttgtaagggtgataacggtaatccgtaatctgacagctaaaagtaacacatccttatcagagaaattaaagatgttttcttttgtttggtcaagatgaagtttcgttagatgaaaaaggaggcagcatgcaacacaagttgaaagttcatccgaggaatcaagccaaataaataaataaaataaaataaaagcatcaaagcaaagtgaaaactgatgcgtgacttgtgaactgatcaaggcaggagcccaaggaggaaagggaagacacaaggaagtgcagccagggtggttcgacttcaactggtttccatatcccaggacaatgaccaggcaacaacctaaccatgctatccagctaattactccctctgtcttaaaatataagaagttttagagttgaatacgattattaagaaaagtaggtataaatgagtggtggaggattgtgattggataaatagtgnaggtagatgagaaaagtgaatgatgtagggttgtgattggttggaaagagaatgctagtgaaaaagttgttatattttgagacaaattctgatggttaaaaattgttatattttgggacggagggagtatttccttcatgctatttccatttttcctttttcgcgcaaacatcatcacacatgcacacacatcggtttacacacgctcaatagaataactttaataacagaattattgatccccttgattttatagaaaaacatgtatccataactcagtggagtcgtatatctaggagaatgattctctaacctcatacaaagtctgagaaatctcattcaccctttttgctctctcctcgctcccaatagaggtctttttttttttgggggggggggtgttgtctagatatacccataactccctttatcgcacatatacgagatgtatctctcgttccaagaatatattttctataattgatgatctcccattcttgtatatactatcagagcacagttatgtcaattaatatgcatagcccatgcatatattaagcaagatctgtatgcatcccatgaataatacaacccatatgtgtacctcataatacctccaacacagctattatcacaaaagacatgccaatgtgatggcttattaaacccaataattttgtgatggcatgttaacaattaagattccatccatccatccatccatccatccatcaaaatcaatgagtcggttcgttggtagatggtgatctaatgacaagccccatactaccgaccacctctgcgtcctcatatgcctaacaactgatgatgcttcgaattggttatggctaaagatgaccaatggcatagcatggaccgttctttttgcatcctatggattctggagacgatgacactcacaataccaaataccaaatgcaggttaaccatattaaactacgcttattgcgacgtgcaaacaactctggttgcatcagcagttttgcccctactgcttggaacacatatggttcttgcagggttaagaattataatacaaaggaatatactgcttttaaagattgttgaaatttatgtttgaacctgataaacatttgtcattttcatagagatttctacatttgaaacacaagaaaaaaaaagccttgtgctttcatgcttccagcacacgaagaacatcattcagattactcccttgatttcaccacttttgtaatgcttttgctatctatgcgtacatgacaaacacaaccttgcaaatcaaagcagacaaaagcaacgatcagaagctgcaaagcagctagtgatagggagctggatggctgccttttattattctctagaatcaattctattagtagtactgttcttattaaaagaaaaaagaggctccagccacacgatttttaggaccagctagctagcatcaagaattaaattacaatgatctagggatggcatcagtcagatactgatatcagtgctgaaacagctcccaagttagaaagtttcaagtaaatggattctacacaaacagcaacggcgtttcacataagctcaggaaagttcctccgttcaaaagcatcggataagcgcagtacaattctcccatcaattcagtaaaaaccgtactagttttcagtttatcagcatctcttttatcaattctgtaaccttgggagagtacgtctcctccaaaactcatctatttgcaatatctgcagttcccattactagaaggaacccaacagatcattctctttttattattttcgcgccttatttagagaggatcttctcaggcagatttaagctccatatttaggagctttccagagcttaaatgccacctcatgtagaaagcgttcagcaagcatagcaagatttccaccacgctgttgattaaatagcagaatgaaattagttatacagttatactcctccgagacaaccatattaaacgg

SEQ ID NO: 26286 - DNA, 573 bp, Oryza sativa
gctagaatgacttacattataaaacggagggagtatcatattctacaatgacttcatcagttggaaacttgaaaatatatatccaacgtcagggtgcttcactgcttatgtatcataaactgaagcagtatatcaacaaatcagtcttttagttgtggaaacagaaagtctaacacaggatgagaggaagactttcccttcaaacaaattaaataaaagaaatgaaaagataagaaattcctggaaatggagcttctactccaacatggggaagatactgggatcgtggcaattaaatgtgtttcctctgatataaatagaggcaaatcaaaataagcagggacagacaagttacacggtgttgtacctttattaaactctgaaattgcattgggcatcctggaagcaacgcaatttttccctcccggagacttgtgaactgaggtccagaatcaggaagctgggtacctcttataagttcatagatagctgccccaagagaaaagatatccaccttgtcaagatgctcatacttgtcgttcagcatctctggaggcatataacgtgaatctc

SEQ ID NO: 26287 - DNA, 8501 bp, Oryza sativa
actcagggaacgtgtgtaatctatctaaggctaagacaatccaaggataacaacgataggtaggctaggcaggctagagaggactttctatgtgttttaattatctaagctaagcaaaggtaatttcctatctgttgcttcgggcactgacccctcttggtctgcccgcgtggttccgactatagctctatgatgtatccgaacgtggaggattactgggtcgggattcagggcaggcaccacctgccgcctacctctgacaaatccgtgggatacacagcaaactaaagtaatctctaacctagacaccacgtctaagttattaattactactctaatacttgtacaggaacttccttctttatccagagtcctagtactagagcacttagtatgaatactaaacaatgaacccgcaaagatggaaatatatcttacttagactaagcaactaaataacataagaaaggaacacgaatgcttactttatagaagaagttctccgaacccggagcagagtctaccgacagcttcggtactcctcccgaattccttctacgaagctacacttgtcaaggtagaagtcggatgagcaccaaacttccgggcactcctccagagcttcccctcactcgctaccttattctaatatgcaaaagatacaatagagcctcttgtaattcagctcaaagttttgtgttgtgaatgaatgagaggagctctctttatagcctccatatgacggttacaagtatgggaaatgaccaaactaccctccaaccgtcatcaggaagtaatcagggctgtccacgtcgaatctggcgatcaacggccacgaaacgggttcggccgaactggtggttcggccaaaccagaaaaccctcctctcggccgcctcttcagccaggaggtagcttaatgggcccctaacatcatatactatgttttggcccaattctaagttgtttacattaacatatgggccctctaatccatgtaaacgcgtcctgaatgtgcggaggtgcattttatcgcatgatggatgtgttttctcctcaaattacctgcgtaaacatatttcaccaccactagtggaaatgattggtaataatccctaccactaagttggataccatgttttatttcattatatgcaggtattgatggtcagatattatgatttaaggaccgtcaacatggagccgccgctgttgctgccattgccgcctttgccgtgcttgcgacaatttttgttgttgccgctgttgccgttgttgccgccggagttgccagaggtgttgccgctgttgccgttcccgcgagcaccacaggcggccactacgacgaaggcagtggcggtgccggcggagtggccttgtcccttgttgatctcggcgagaagaagttgcgagcgtgcctccaggaacatcgggaacaggtgctgcatggggagaatagtctgcaagttgtggtacttttcattcaaacctcaaaggaagttgaggatgagggtcttgtcggttatcggttcgccgaggtccgccaaagaatccaccatggcatgaagacgatgatgaaccctgagttcctctcaacactcaaggctgttgttggcccgatcttttggtgagttgtgataactacgatttgggagaaacgttgacgatccgactacaaccgtacgagacgttgtgttgcgccttagcgatcgatacacctctccgtgggttgttgatcttgccggtgcagatcaaccctattcctgcaagcaaattgaagaaacaagcaagaacaagaataaagcaatctgatattgcaaatagtaatttaatacaaatgataagtggggttccgaagaacaagcagacggacggtctagccgacacgtgcgctgcaagcaagtagcaatggctaaactttaatctaacaaaacccaaaaaaccctgaaggggtacctaactatttatagaggtgggaggacgaccaagagggtccaagggtcgtgctccaccagattggggcgcaccccacatgggccccacatgggccagggtcccaaacaaagttacaagcccattggcccaatacaggagacgcagcaccttgcttttgtgattgaggccaaacgagatagatttccgagatgatgctggatccgttggaaggaggacttcgagagctttccatcaagtactcacgggcccaaaacgaagcacgtatgtagatttggcggccgtttgaagtcagcaatgtaacacgtggccgaatcagattgcagcacatggaggacttgatcttgatgtcttcttgttgattcatgatgtgagcaatggtcgtatccatagtagccatggtcacatcagcctgcggcccaagtctccatcttctccctctctttttccttccctctctctctcttgggctgcccctccctccttcccatcggcccagctccctcctcctccctctctcccccgggccacctctccctcctctcctcctgggccgatcgcccggcccaagccgcgccccccctacccgagccgctcccctcccgcgtacgcacgcgcgttgcacgcgcgctgaccgcgcgcccgcgtggggcacacgcggcggtcgtcgtcttcttcctccagccgcccggcctcctctctctctcccaaaaaaccctagcgccatttcccgaaaaatccaaccattctttccaaattaattggagggaattaatccccattccttcctcttcaattccccctaattttccgcttgaatggcgccgtccatcgcccggaacggccgcggactttccaacctctttccatggccaccggccgtgtttcccatcgccgttccgccctctcccatgcccggctccctccccgcgcctataaaatggagcatcctccctccgttctatcgttttagcctcctcccgcgtcttcccgtggccgcaccacccctccccgcctcctccctctctctctccgagcgccggccacctccaaccgcccctgccgcagtgtcagcacgccggtcggccgtgcagtcgccttccccggtgtagcagccgcctcctcttccccggcgtcgcctccgtttcgcagggaaaacatcggagccacctcctcgccgacgaccagtgatgtcgccaccactccaccgcctccagccggctgtgccacctcgccggtgcggcggctgtcgtcgtcgccatcctccctcgacgtcgccacatcgccctctaccccggcctgccctcgatttcgccggaacactgccgtgccgcgccggcctctccatccgcctcgccggaatttccccggtcggcccttcctccacccgtgcgccgtcggccgcgccaccaccacctccggcatcgcagcggcaaggtcgccctcggcctcgcctcccctccacccgagccttgtcggtgttcgttgtcgtcatctccgttcgtactcgtcgacgactcctctggtcggtcgttcctcctcgctggctcgtcatctcgttgtgccacctccgtcgtgtcccacgccgtcctcgtctccgtgcagctgctgccggctgccctcgtcgcctcctcgccggtcccggtcgtcgtcctcatcatcgtggtgttcgtccctccgtcaagccgttctcgtcttcgtcctcggctccgcgtcgtcaagccttgtgccggccgcgtctcgccttcgtccaaggatcgccgccgaagtcgtcccctcgccgttcgtctccgtcgttctcgtccgtctccgccgcgcccgttcgtcgttgtcgttcccacgcctcgtcgcatggtggtaaggatccctctccctcgctgccccgtcctcgtcctttcggtgtcgcccgtgcccgttgtgcggttgtcggccccggtacccgtgtaccggtgtcggtagtcgttcgtgtgtgcgtgtggtgaccgtgttagtgtgcccgctcggtagccgcgttgtttccacgtgtgcagcccgcgtggtgtctagtggagtccgtttgtcggccactcgcctcggttgacacacagcgtctgcttccgtcgacccgtagaccgtctccgtgtactcggtctaccgtggtcctttaggttgacatgtggggtccgcatgtcaacagcacagccttcctgtcttttccaggctagcgctttcacatgttttatagttgtaaaacctaattataataatccgtaaatctccatgtaacagcattaaacttcggatgatcatatcttggtcatacgaactccgaatcgacccgttcaagtctcctaatgtttgttataacctaaagaaccatgtgctttctttttatgtattgttattgcttctttataggcttgtagctttgcttgtgtgcttcgcgtagctttcgtcgttctggaggttcccgaagcgtggttcgtggtcatcgccgaaggttcggaaggccattctctttgagcaaggcaagtcacatcatccttgagcatattgaatcccagtttataaaattattttgatttaaattaatgcattatcgctttatgtaaattcccgcgttatcactgttttatttagccatgcctatttacctttcttatggccttattattattgctattgttattattaccttgttcaccctaggaaaataaaaccccaactagtgggtactctatttatggttccactagtatgaacttaggtagatgctgcgctggttaattaggcaacattaggtggttttataactttagactttgggaattctcatatcacttggacactttggaatggttggattatggtggaataggacatacacctctcttcctctttcaaaacccctaaaacctgttttccggtggggtttgggtgcatgccagttgtgggaagtagcaccccggccactataaggattaagctcgggcctctgttgcaaagcactaccgtacttccacatatctagtgggtaaggctcagtttgtggctcagtctggttataaacaaaggtacacggatggagattgacgaattcgggggtcgatggacatctctaggatagatgaaggctacacgagctgcgtcccggtagtcgagatgtcatggcacagggctggtgtcctgctgctaggggctcaatcctacctacctatcccgggggttctggccgtaggcggggttgggtcgatactcttgtttatggctaggatgggttgggaactatgtcacgtctttcgtccgtatgccgtggtggtatgtggcacgtggttacacgtgaggaagatgtgtcttgtgggtaaagatgtacacctctgatcagagtaaatctattcgaatagccgcgccctcggatatgggcaagcctagcaatgtacccaagttagtgttttaattcttaaaacctgcttaacaactaaaatgtggaatggttggcctgggttggcttgggacgagctgggacccagggtcgggttgccagttcggtctgaatcattgtaggccttgggttaaggcgggttcgtgtgggttcacggccttgtttaataaatattgtgtagctctaggatcgtgtgtacaaagtagctttgagcaactacgtgtcttttaaatgctgtttactgcaaaatttaacccctatattattaccccttgtacccccttgcattaatcatgcatctaccggtgtggcttgctgagtactgtggttgtactcattcttgctctatctttccccccccccttcagtaagagaagctttggagaagaagtcctaggtggagttctggcttataccccagttgagcgcctgtgaagatggagccgtaggcccgctagtccgctgctatttatttttatatgtcaggcctgaagtgcctttgtaataatgtaaatattatcgatataataaagatgtgccttttgtatcatgtttgtgtggtgtaccccggcttttcctgggacggggattaatacactagcgttcgggaaaaggtaattttctcagttgcgacaccttgtcccctccattgttcctaatcacaatataatcattaggtagcaatctattctcgaattcatacaaagaagaacataggaacgagctcacctctaaatttaattgtcgcacacgagcacttgttatcggtccttgaatgaccgttggaggattgatgtgtgtatccgaggtagtgatgttcgcatcatcctccccctcttgaattgaagtcatcctcgactcaagctcatcctcttctcccaagtatggcttcaaatctgaaatgttaaacgtgggactaaccccaaactcgggaggcaactcaagtttatatgcattatcattcatcttctcaacaattttaaaaggaccatcagcacgaggcatcaacttagactttctcaattccggaaatctatcctttctcaagtgcaaccaaactaaaccacccggttcaagcttaacctcttgcctacctttactatcagcaattctatacttttcagtcatcttttcaatgttgagcttggttgactcatgcattttcaaaataaattcagcgcgtgccttagcatcattatgaaccctctcactagtaggtaaaggcaaaatatcaataggagcattagggttgaaaccatacactacctgaaaaggacttaacttggtagtagaatgtgttgcccgactctatgcaagctccacatgaggcaaacattcttcccacatcatcaattttttcttcaaaatagccctcaacatggtacccaaagtgcggttgattacctccgtttgtccatctgtttgtcggtgacatgttgtagaaaacaatagctttgtacccaacttgttccatagcgtgcaccaaaaatgacttaagaattttgcatcacgatctgaaacaatagtagaaggcataccatgcaagcgaacaatctcatggaaaaacagatcagcaatatgaacatcatcatcacttttatgacatggtataaaatgtgccatcttagaaaaacgattcaccacaacaaaaatgctatccctccccctcttagttctaggcaatcccaaaataaagtccatagaaatatatgcccaaggaatagaaggtacaggaagaggcatatacaaaccatgtggattcaaacgagactgagctttctgacaagtggtgcaacgtgccacgaacctctcaacatcttttctcatccttggtcaaaagaaatgcaaggccaaaacatcttccatcttcttagctccaaaatgtcccatcaaccctcctccatgcgctttctgtatcaacaaaagacgaacggaaccaactggaatgcatagacggttagctctataaacaaatgcaccattgatcacaaatttgttccaagtacgtccctctttgcaatttaacatcacttcattaaaatcaggatgaagcgcatattgttctttaattgattcaagtccaaaaatccgacaatcaagttgggacaataaagtatagtgcctagacaaagtgatgaaccctgagttcctctcgacactcaaggctattgttggcccgatctttcggtgagttgtgataactacgatttgggagaaacgttgacgatccgactacaaccgtacgagacgttgtgttgcgccttagcgatcgatacacctctccgtgggttgctgatcttgccggtgcagatcaaccctattcctgcaagcaaatcaaagaaacaagcaagaacaagataaaagcaatctgatattgcaaataggaatttaatacaaatgataagttggggttccgaagaacaagcagacggacggtctagccgacacgcgcgctgcaagtaagtaggaatggctaaactttaatctaacaaaaacccgagaaaccctgaaggggtaactagctatatataggggtgggtgcctagggtcgtgctccaccagcttggggcgcaccccacatgggccccacctgggccggggtcccaaatgaagttacaagcccataggcccattataggtgatgcaacaccttgttcctgtgattctggccacacgagatagaattcagagaagaggctggatccgttagaaagagggctccgagagctttccatcaagtactcacgggccgaaaacggaggtcgtatgcagattcggtggccgtttgaagtcagcagtgtagtaggtggccgaatcggattccagcacttggagtacttgatctcgatatcttcttgttcatccatgatgtgagcaatggttgcatccgtggtagccatggtcagatcatcctctccttcttcacggaaaaccgtcctcggtttttccatatggtgctctttgcgtagtccatttacaacaacctgtttcttccaatcaaaacaaggcaaactcgagacaatttggttagcaataacatttttctctagcttgcatattttatccacatgtacaggaggttctaaatccgagcagatgtaaactctatgcacaaaatatattccaag

SEQ ID NO: 26288 - DNA, 1444 bp, Oryza sativa
actttcatgattttaaaatttgtatcacttatagtggtttacaagaatctaatgagaacacaatgactagatttttcagagggcttaatttcaatattcaggctgggcttgttaatgtgacatataatcatataggccaattgttcatgcttgcttgcattgttgagcgcaaaattttggagaatccaatggagcaacaagatatgcttgtgcctcctatcactgatgttttgcaggaagttcagaaaagtctccaaaatgagaagaacgatatgtttgagatgtcacttccatcactcgcgaatgaggagaaggctgatgcagctacattatctgaagaaagttcgcaaggtaaattaaatggtgctgagagaaatgaaggtgagtattctcaaggtgagctacacttgtccacttttcatgctatagtagagcaaccattagtggaatcaattactgagttgcctttgtcacaagttgatttacttgctgttccttgtgataaagaagagttgtgtgataatgtttcacttatatccatgccacaactagtgaatgaacatgttagttctactatttctttgtgtgctgattctaagcaccttgtttgttcatccacggatgacttggatagaatttggtgatgaggttggatccattggaaagaggactccgtgggctttccatcaagtactcacaggccgaaaacggagatcgtatgcagattcggtggccgtttgaagtcagttgtgtagcaagtggccgaatcggattctagcacgtggagcacttgatcttgttatcatcttattcatccatgatgtgagcaatggtcgtatctgtagtagccgtggtcacatcatcctccccttcttcacagaaaactgtcctcggtttttccatatggtgctcttcgcgtagtccatttaaaacaacctgttttttccaatcaaaacaagacaaactcgagataattttgttaggaataacatttctctctagcttgcatgttttatccacatgtataggaggttctaaatctgaacatatgtaatccctatgcaccaaatatattcctctatcatcagattcgccaaatatatgaaaaatagcagtagttggacaaggcaaatcagacttagtaaataatttcttcttcaaattatcaagctcacaaaaatcatcaaactgaacatagcccaaagtatttaaagaagatagcaattcacgttcctctacttcattagcaatgtgaacaacatgcttaaaatcagcacacaaagaaacagcttgtggttggtgcgccatggctctattcaaccccttctgggttcgactcccaccaaacacccctttttcctatatttgctcctacttctcatgcgtgcacatggtctggcagggtagcgcccacgattgagcggtccaatgccggttttctgac

SEQ ID NO: 26289 - DNA, 4229 bp, Oryza sativa
aatccaatatgtccaaaaatcatgttttggtgctttttgaactttttcattccggtcaaaaacatcgcacccgtgtgggccaatattggcattaatggacaaaagtttgctgcgcgaatcacgaagtgagtttttgccacgaacgcacccaatacactccaatatgtcgaaaaatcatttttggttctttttgaactttttcattccggtcaaaaacatcgcacccgtgcgggcattatatgccaatattggcattcgaataaccgtgtccgcggttatgggcaggtctaacaatgtctatcgtgattagtctcacacttctcaccataataaatgatgctataactggtaataatttgattagctcctggtttagaatggtacattcctagtttggagatagatctgtacagccgggtttggttgttcaggatggttgggcctgtgcagcatgggtgtgttgttcagtgttgattagtattgatgattaattactctactgttttacaattctcaaatgtttcctaaatgctgcttttgcaaatgagccctatattatgccttcctttggtatccttgtgcacttgcatatttgttgcgtggcttgcggagtattccatgtactcaccttgcaataatcaatcaaacctcagttgaagacaagtcgcaaaggagaagacttttggcttataccccagttgagctgcctgtgggagtggagccggagcttcgctagaccgtaattccgctgctgttctcttctcttttgtaagtatttaacattattattatgatgaatctgtatattaaattgtcagtttgtgtacctcggctgattactggacgacgattttatgcacaaattagttcggaaattactaatgaatttctgggcgtgacaagttggtatcagagtcatctcgactgtaggataagccaaatggccaaaccttcaggactgattttccgaaaacatgatttgtgaaaatttttcctttcttccttctctagaattctttgcgaattgttttatcgtcctttccccttcctttttcaacttgagtagttctgaaactagttgttgaaacatgaagacgccaatgtggtctacttatcaagtggatcgaggaatatgaaggtgatgatcgatctgaagtgtccaggtgtatagatggaatgaagtttggatcctaccttagaacctaaaccaccaaagtgactttgaagaatagttagtagggtagagcgtctgttgcttgcttgtgtgtaggtatggttgcatttccatcattggtgtagatcggtgatgagcgtgtaactataataggttgcttgcttaatcaacttgaacaatataatggtctacacacaccagatcagtggtaacctggttaaggtcttgtctttagtgtaacccctatccttctatcttctctaatctgcaacagatggtgaacactcgcgctagtggaagcggaaacaataacaatgaggagaatccaagtcttgcttaagttctggctcaacagactcagttaatgaatatgatgatgcagcagatgcagaaccagctcaaccaaaggaacaacaatcctccaccaccgcagaacaagctagctgattttcttcgtgtgaggccgcctaccttttctagcactaccaacctagtggaagcaggtgattggctgcacactattgagaagaagttggaattgctccagtgcacagatcaggagaaagttgttttcgcttcacatcacttgcatggatctgcttcagaatggtgggatcacttccggatgaacagagcagaaggacaaccaatcacttgggtagagtttaccgaaggattcaagaagacacacatacctgcaggagttgttgctttgaagaagcgtgagttcagggcattgaagcaaaaggatcgtactggggcagagtatcttcatgagttcaaccgtctagcacgttatgctccagaagatgtacgtactgacgaggaaaggcaggagaagttcttggatggcctgaaggatgatctcatgactacgctgattttcaggaactagttgacaaagcaattcgacttgaagacaagaagaacaggatggacaaccggaagagaagatgattgttttcccaggaggcacagggtaatagtcagaagccgcgtatcaagccagctcaagttgatggatcaagtttgacatctcaaaaaccatcgcaacagttgaacatcggtggtgagatcaattcagagattaatgcaagcaatgaagttaacatcaagcaagctactcaatcagagccagttcagcaggatcagtctcaagaaggtaatagtagtggaagggagtagcgggtatgtttcaattgttatgagccagatcacttcgcaagagagtgtccgaagccggagcgtctgcagacacaaggtcaagtcaacaacatcgttgtcacaggaagtgccagttgcgtcttcaagagttgcgtcttcaagtgttacagctcagccaccagtttcaaagcagcagtagttttctttaaagccttagaaataattatcagagttatggaataagatagactgcagtttacttatgcccttttctttctagcagttccgaatctcgggatgagattctttgtaaggggaggggtagatttgtcacagcctgattttcgtttttaggatttataaattatttaataaattatattattaatagaatttatattaaatgttcgttaatttacaagtgaagttaaatgtgggaaataaaatttcctagatataaagaatggttggatttaatttttattaaattctccatgattaattatactctctggaattttctctgatttttcagagctcaattcctaattttaataatacaaagaatatttcagtaataattcacatattaaattaatcattaaatgatctggtttcaattttgttaaatactttgagtgtccaagtatgttcaagatttttcttggaattatttgagcattggaagtatttttaacaattgaaagatcatttcagtgattaatttaattgggaaaagtaattaaaattcccttttccttttcgagccgaaacaggaaaagttgacctttactcctcggcccattcttccttctattcgtccggccttatcccttcccaaagtctagtttgcatccctccttctatcgggctgtgcaatagaagcccagacaaaagtctgtttggccacccttagacactgttcattttccagctcagacagagtccgagccagccatgcccgtgcacagttcccgctgatccccttccaaaatccggcctcctcgttgctcctttttccaaattagttgcgggaatgaaatcctctcaatctcctctataaattccccaagaaattcccaaaagtttctatggaaatcctttccagttttgcggatcaatctttcctttttccgaagaagatccttaactttcccagagtttttcccgacgatttgggcccggacccgagttcccgtgcctatataaaggacccgctagtcatcctctgcctatcccctcaagtcccgtcttccgccgtcgtcggaatcactctccccgcgagctccttctctttccacctccggccgccgctccagccgcatctcaccgtcgcctcggtcgcctccgctctgtgccgtcgctaccaccgggatcgcagcaccaagacaaagcccggccacccccccgttgtcgccgcacatcgccggaaagtcgtcgccgccgtggacagtacctcgccgcccttcgaagctcgtcgccggccatcttccgtcgctgtccgtcattgcgtaagtgttggtaaggaccgtcacctcactctctttctcccggtgttctcccttttcgccgtcgctcaatagttcaccgatgatcgtcgctcccgtgtccgccatccggtgatatcgtgtggttgtcttatctactgccacctaaccgcctatttgtctctgccgtgccatgtctatctaaaccctagatcagattcaatctaatccgttggctcttggccaactctatgtcaaaattaatctcagccgtccaaaatcaatataaatatgttctctcttttcaatggcatattagtccttattatcatatgtcaactaccaaatattatttaatcttttccggaggatgttttaatcttttatctcagttataaatcatt

SEQ ID NO: 26290 - DNA, 8836 bp, Oryza sativa
ccgtttcagttttatttccatctccgatgctgaaattaccaaatttggtcactaacacatgccccccaagtccagaatatttggtaatgtttcggatttgccatatccgttcctccaagaatatcgctcaatgccgtttttccgactgttaccgcctcgctttaaatactaaccatcgtccccgagaaatttcacaccattagctccgttttcactgcttaagccaacctcgtcttttctctctccggcgatcccctcagtgcaaaaggcgatctcaaggcgacttcccctccggctaaatcttccgcccgcagagatgtcgtcctccgctagcccgtccgtcgcaccatcggccaaatatgtggaggcaagtacgcatcggctagatcctctcctttcgcaatagattggtttttccttgcctcatcttgttttcttcttctctgttcttgtttatatctggagcacttgtccaatctggttacgatcccaagtctgtcacatgagcaccactattttcttggcccaatcggcaatctcgatcccactgaatttattatcgctaaaaccaataggatcccttttagattggccaacccgaatttaagtcactggaagaataccttcaaatcttggccttctcttgagaaaacttcccctgagaaaagttgggctgtgtggtataagcgtgtgtcggctagcaagcaagttcattgggatgaactaggaatcagccaagtacttgctcttactttagcaaattcggctaaagatgaacccctgatggcctatgctacttacttctggtccaataccctcaatgcttttctattcaatcaagggccaatgactcccaccctgctcgatatcaccatgcttactggattggatgtaacttgcatcggctaaccccatgagcttgaacatcaaaaaccagtttgattttaggaccaagagcataggtggctagtctggctatgttgccgcatacatgggcaaaggatctgtcactcccagggagcacacatcttttcttctgatgtggcttgagaaattcctcttttgcggatcaagctgtggccctaccaccaattggcaattcttagctgaagcccttgagactaagaggtagtttcccctgggcaaaatccttctcggctatctataccaaatgttgagcaatgcatcggccaagatagccacaggttcagtagtgggcgcgggtggaccgtggtggttgttgcaaacatggctcaaccttgttgttatgaaggttgtgaatcggccacctctgacagatgtagaattcccacggctggagcccactaccaatgatgatggagaagaggtcacccatcgccgatgcatgtcgtatggagaagctgcatcgacaccagccgattctggagcaaagctatcagccaaactactcaaagactggttctgcagtttctatgagggattccagagagatgctcgggtttggttcccatatgaggattcagtgaactttgacctcccagcaaacttcagatttgaggatatcgactccgagaaatttgacaaatccagagaagtcttctcggctgctattagtccttgcatccttcctgttggcatccaccaagggagaaatatacaagtgtcctatgagttctaccatccgatgagctcagctaggcaatttgaaatggggcagctaccaatcggcttgttctttgccgataagatctagtgcagaggagaaatctcatcaacattgataatggatcggttgcttaacatcccaggacctcctttgggcagtatcgagaacatagaactggcaaggttcaagagtaggaactttgacagatggtgggttgaatggaagcaacatatattccatcagtcggcttctatgtacatgacagacctatttcctgatgttgtccctcaggtacatctttagtttatcaattttgtttgaataattgttagctaacttgaatcttgactaacttctctctttaccttgtagacaacagaatcttctcctcctcgcaagagcaatagcggtagggacataatatatgctccaggccttctaccaaatggaggtggattagctcttccagtcatcggctaccatgccccaggacctcaagtctacttcaagggcagatgagagaacctgccgatgttggtaggaagagaaagaccaagtcatcggctattgatccatcggctctggttcccaaaaagaaaaccaagaagaataaacccaagccagccgatgacttgcctgccttagatccatctaccttggatgaagaggaaatcgaagaagatgtcgatcagcagcagccgaattgagtgatgaaggagataaaaccccatcggcttcacccaagcaaactcctccaactcctgctaccccgtctcacttctcaagggtaaaccactcaccatgactccttcttgtaatcattttattcatagccgatcacttataaatcttgtttttgcagaaaaagaagactactgtgaggaagaaatcggcagcaacaacacttaagctagctcgaccagtaagattttctatacaaatcctttaacacatttgaccatagctgatatttacttaacacttgtctctttgcagcctcctcctcctcctccttcacctcatgtgcagcaaatgtcaagtgaccggactccatcggctacaggaagtcaccaagttgaggaagaataacaaaccagccgctcctgccatcccagtaagtttttcactatcgtaaaattttagatcggctgaatttgtttttaattatcttcaaatttctcttttgcaggtcttaactgatctattttcttttgacatcaaggattatcttgatgaaatagaagaagacaccaccagtaaagccatagctcctctgtccgatgatgtgaaaagaacacttgaagacatctctcatcggctagaagcatcatcattagatagcttagtagtcgactgtggatcaatcaggactagacttcatgaaattcagtctttgatcccagatgacctagctaatattcttactctagcagtttatctcgaacaacatcaattcaggctggagaaagccaaacaaagattagctgaccggcgggaacgcgaggacattgaagctaccaagtcaatcggcaacttgtgcatgaagaaaaggccaagcttgatcaactctctgtcgggccgattcaatccaatatagatcggcttgaagctcgccagattgatcttatagcgcaacttgaagaatgtaatgtcgagttagacctaaaaaaacagaaattggtcaatctccctaatgctgttgaagaacaaaagtcaagattaaaatcggctattaggaatgttaccgatttgactaagtccctcaagatgatctctggaaccgacgctcaaaacgctcaaataattgctgaggtggaagagatcaggcaaaatgcaatatcggctatccagtgctatctatctgcatgattggtcttgtaataggatttagaacaattttttgtaatcggctcggaaaccttggtgttccttttgttactgaactgttgtgccgattaatataacttctcaatgtgctcgctcaaaaatttacaaatttgcaacttgtgtatatatatgcccccctaattttgcaatgacgaaggcattgataaaattataatttggactaagggcgatataacaatatcggccattgtatatcggcaaaacacaaccgattacaatatgaaaacaactaagggcgatataataatatcggccattgtatatcgacaaaacacaaccgattacaatatgaaaacaactaagggcgatataacaatatcagccatctcaaggcgatgtaaatacatcggctatcatgtatcggcaacacccatacccagccgatcatgcattaacccaaacacttggtaatattttttcaagtacttgccatttagtgctcgtccataaacttctccatcaaatccttgcaacatataagcccccttggacacaaccttgtggatttggaacggtccttcccaattcggtgaccacttgccgaatttgttatctcgagtctctatcggcaaaatcaatttccaaacaagttcaccttcagaaaaagacttgggcaccacttttttgttgtaatgtcgagcaatgcattccttatccttggtaacttttgcaagggcttgttggtatttgatacggttacagataaaatctgcaagcgcacggatataccgtgtagcacttcccctactgagtattccaagggtatcaaatccaaggaaacatgtgtgatcagatcttcctctggttcatccaaggacaccaagcaaatgataggccaggatagagaggatttaatagtgagaaacagtgtctagggaaagcttaactttaatcctaacgcaatacttcaagcactggcaacccgctgttcccagatgtcgctctactacgtacccggatagggagaacttaagtgatctcgagggctttcaccacctctacacccacctcaaacgtactgtgggatatgcatcaattactgaataacaattacctaaacaccacgtctaagcaattaatatatactttagtgtttataactcaccaaagcaatcactatattttagttgattatagtgaacaataatcccgtatgctatttaagaactaaccaagcgataattctcacaagataaatctaaattactcaagaagaatattatagtgaattcagagtaataaacagaataaaagaaataggagaagattaccgacaactctggaattcttccgacttcttctactctactttcttcctattctagtatacaatatagtacaatagagcctcttataattcagctcaagcttggaagtgtgtgtgagagtgaatgaagtgaggtccttttatagggcagttatgacggttgtgagaaggggaattgtccgaattgccccgcaaccgtcattgggagaacaactggaacgtccacgccaaaccccaggatcaacggtgatcagggggggttcggccgaaccagggggttcgaccgaacctgggccgagccctcctggcctggccttcagttggtggactccttggaccttcctctgtccatttctcggagttttgggttgattcactgatgtcttgatgaagttcacaacccatccttgtattgatacatatttctcctcactttagtctgatttacctcccaacatcggagtttatcatctgcatacaaatatataccaacacttgtggaatatgtgagattaagcacctatcactatattggttgttttattatccgagctttatacagatgttggcggtatgaaatcgacttttaacagccgccaacaaaaccccccatacttagccctttgctcgtccctaagtaaagattagtgtagaatgaatttcttcaggatataaatcaagcatataaatcattcacaaccatacctgcacctgtgaactttatgagtggctatcttaccatcttgagtaattgataaatggaaagatcttgattccagtccttcttgcttctctgtcaaactcatgggattttatgaattttcgcaaactagctcttttcctcatattgactttctctcttgtccctcaaagatgtatattttctttggatcctcaccaaggcaaaatgtaccagaacttatccctattctaaggctaatatgtggatcttggtagggataaactgtgacgtacctgcatcatatatattgcaaagccaaaaatatggactcaagaagatcatcaatcatactcctagatcaagggtctttattcatggtggaaaagtaaaatatgttgtggaatggtggaataaataaatgattctccctttttcctatactttctctccaagttggttctcttggcatgattgtggaaggggcatggctatattttctttgctcaatgttttcagagcaaactttttttcttcttctctttttttttcatagccatgcctttccctccttttctcattttctttttgccaagaacttttccaggagaagaaagcatagttcactgtaggagtttatttgaatggatatttttgtggaaagccaacatccagtgtagaagccgagcttaattttatatgtggaaatggaaagtggaaatgataatgaccccttgatcatgagagtatgaaagatatctaacacaagtcacacaaatttgacaaagctcaatataatgtcaagcagtcatatgcataacaaggtttatcaatgatatacttgcatatggccttggtaggtataaggtaaaatcaattggaggattgagcctttaaaaacaattttactttaaaaacaaatgcccaagagtcataacaagagttgcaagaatttctttcatcttaatcatctctcataaagcaatcacttggatgtataaagttccctaaacatggatgggtgttcacaagctcgagttcagctgagaataatgaatatataagatcaagggttaattagatccatgccactagaaatgtggaaaatcaaaaatatgccactactattcaagttatctgctgagtgccacagtaaatttctaaaattagaaacgtgccactctagtcactctttccgtcctcctcatcctttctccgtcctccccatccttaatcatgccacagccgcagccgcagggcggactcccgcgcgagctacctcccgacgtagaacgtgaaactggcggagctcggcaacgaggcacaggtcgcggccggtgagatgttggtgatggtctccggcacggcccggcgcatgatacggccgatgttggccatcgacaggaatcggtcctgctccttccctactcctcctccaccgccgccgctctccgtcccgtcgaacccctccgacatcgctgggccctggccgccggatttggacttgtcttgtcttgtctagtgctcaatggattcagaatggctgcagcgatgcagaaacgagagggaaaattagagttaaatcagctgctcctgtctctcagttaattttgtactaccaggaggtgagacagtgcatgcacagtaagtagtgttgattgatttatacaacggttttaaattttgtttattttcctgatttgaaattgaacaaaggtctttagaacaaacctatttgtgtgattctatcccagatcggcaaggaactccctgcatccagtggaaaaacctagcaaaagactgccaactctgcatcaagcatcatcagttgcaagcagattaacgagggcgggaggaggaccgccgcttcttgcaaccaccggctgcggcgcagggcgcggagaaggcgaccacggagtctgcacgctcgatgcggagctcggcgacgaggcgcaggtcgcggccgttcccacggtcggcgagataggcgagcacagcagtgtcggtggcttcatccgaggcggtggaggaggaggagaacggggagaggatggggatgacggacaggttgacggggaggatggaaagagtgacggcggtggcatggttccaatttgaaaaatttacaatggcatctagcagataacgtgaatagtagtggtatatttttaatttgccacatttgaaggggcatggatccaattaaccctaagatcaatcacatgaggaatttcattagttggaaattttatctgatacttatgcttgaaccaattgttttctgaattttcagctctagtactatgccatggtggagatatacagatacaagacgtgctcacctacttacctgtgaaaattgagaggtattggggccaacactggctcggccgaaccactctggtgcccaatacctctgcaactttctgcagagttcaatgcttccaggtgttcaaacatttaatcaattttccgagtatatgcatgtcaaaggctgggatatatcccccacacttattcaaaacctgaactttattaagcatgaaacaaaacaaactttggcaaacattggggttaacaccaatgagccacattattcatagcaagtgcttacatgaaaggaaagataaagaccaagcacctactactattttatttatgggaaaggaaatgatgaggacatcaacaccatcgatacatccacgtccccccatatacagcatgatggtcctattacccgcgctcgtgcacgtcaactaaattatcaggtgagttctttcttgagttcatattcctcgtctttatacctcggagacgcgtgcactcgtgttttactcaggaacgatggagaggatccaaagggaagaggattcgcgcggggtggattcggactgcagggcagcgccaacttctaacggccgccacgacttcatgcgaactccgatttgggcgtgcaagtacttcatggaaagcttatcaagtctactttcaaatggatccagccacatgtccatatctattctggagcggccgcaattgtcattttactcccaactattttttgtccatggtgctgcgtcacctcttttggcccaatgggctgtgtatacatgttgggcccattaggggcgcgtcctagggttggagcacgaccctatggtcgttcttcccctctttttatacctctagtcgccgccaagaacaggcgggttttgatgatagagatagcttcttgctaccggctcgcagcgcgcgtgttggctaaatcgcccgtctgcctgtaatcggaaccccaccatattgtgtttgatagtgaaactttcatctttatcta

SEQ ID NO: 26291 - DNA, 2074 bp, Oryza sativa
ggggttccaaagaacaagcagacggacggtctagccgacacgcgcgctgcaagcaagtacaatggctaactttaatctaacaaaaacccaagaaccctgaaggggtaactagctatatataggggtggaaggacgacctaggggtgcctagggtcgtgctccaccaacttggggcgcaccccacatgggccccacctgggccggggtcccaaatgaagttacaagcccataggcccattataggtgatgcaataccttgttcctgtgattctggccacacgagatagaattcagagaagaggctggatccattagaaagagggctccgagagctttccatcaagtactcacgggccgaaaacggaggtcgtatgcagattcggtggccgtttgaagtcagcagtgtagtaggtggccgaatcggattccagcacttggagtacttgatctcgatatcttcttgttcatccatgatgtgagcaatggttgcatccgtggtagccatggtcacatcacaaagcatctgcaatcacattatcttaccctttctcttgtttgataacataaggaaaagattcaataaattcaacccatttagcatgtctacgattcaaattattttgagaacgaagatatttaagcgattcatgatcggagtgaataacaaattctttaggccacaaataatgacgccacgtctctaaagaacgtacaagagcatacaattccttatcgtacgtggaataattcaaaacaggaccatgcaacttctcgctaaaatatgcaacaggcttaccattttgcatcaacacacctccaatgccaactccagtagcatcacattctaactcaaaagtcttaccaaagtttggaagttgtagcaatggtgcgtgtgtaagcttgtccttcaaagtgtcaaacgacttctcctgtgtctttccccaatggaagaccacccctttcttcgtcaactcattcaatggtgcagcaaaggtactgaaatctgtgacgaaacggcgatagaatcctgcaagaccaagaaaactcctgacctgtgtgatagtttggggaaccggccaactctttacggcttcaattttcatctcatccacctcaattccctatggagtaacaacatatccaagaaatgaaactcgttccatgcaaaagatgcacttttcaaggttagcaaacaaacgtgcatcacgtagagcattaaaaacagcacgtaaatgatccatgtgttcatccaaagacttgctgtaaatcaatatgtcatcaaagtaaactaccacaaatcgtccaatgaaaggcatctatgaagaaggggaggatgatgtgaccatggctactatggatacgatcattgctcacatcatgaatcaacaagaagacatcaagatcaagtcctccatgtgctgcaatctgattcggccacgtgttacattgctgacttcaaatggccgccaaatctacatacgtgctccgttttgggcccgtgagtacttgatggaaagctctcgaagtcctccttccaacggatccagcctcatctcggaaatctatctcgtttggccgcaatcacaaaagcaaggtgctgcgtctcctgtattgggccaatggacttgtaactttgtttgggaccctggcccatgtggggcccatgtggggtgcgccccaatctggtggagcacgacccttggaccctcttggtcgtcctcccacctttataaatagttaggtaccccttcagggtttcttgggttttgttagattaaagtttagccattgctacttgcttgcagcgcgcgtgtcggctagaccgtccgtctggttgttcttcggaccccacttatcatttgattaaattcctatttgcaatatcagaatgctttattcttggtcttgcttgttcttcgaattgctggcaggaataggggtgatctgcaccggcaagataaccaccccacggagaggtgtatcgatcgctaagcgcaacataacgtctcgtacggttgtagtcggatcgtcaacgttcttccaaatatagtgatcacaactcaccgaaagatcg

SEQ ID NO: 26292 - DNA, 26063 bp, Oryza sativa
cacgttttgtaccacagtcgtcgctgccacgtgtctctgtggtgtcggaacctacgaaacggaatcggctcgctgccacggttctatttttgtagtttccgaaagtttctgtcggtaagtttggaagttcttgagttgcatctagagtttgcggatccttgtgtgtgtttgttttggccgtgcctgtgtcgtgcacgagaggaggaaggtgaattaccatatctgattttgaaagtagtcaagtttgttttggaaagatatagtagattggattggttaaaaatcagtttcctttttatcccatacaccaaattcggttgccatccactccacctcctggccgagtcccactcgcccctttggccgagtccgactccctccctctcttccaccgttccgagttgtgtcaaacaccttggcgaatttttgtttggtgtcggtttcgagatctgtttggaaaaacggaaccggcataaattcagcattccattttttgtataattttaattttgggtttagacttttacatttgagtccctataaattttatatttatgtttgagtccctgtaatcttacattaaggtccttgagtcagtttttgttaaaaaaataagaaaaaaagtgagaaaaaaaaaggcagaaaggtgcaaaaaaaaaaagaaaaaaaaagccgcaccaaaaaaaatcagaaaagaaaaggaaaaaaaagaaaagaagaaagaagaaagaaagaaaagagaaaatattgttttgtttgagctgaacttcatacatcagagtgtgcttgagttgtttctggtgctattttgtggtaccgtttgtgtctaggctcgcgtctctagtacgttctagcctaggaccagcacggtacttgactttgaacaattattcaattttgcgttctctgatttgagcatttgctattcctttgctacatatttaagcctacccagagctccacagatttgattgcagccgtacagcaagtgtttgccgaggcatcgatatatccaacctctattggggtgcttggttgagtcggtgtacatcaccattccacttgcattggtaagatcttgtaagagcttggttaaaagcttgagtgtgtgtgagatttgagctgccagtacctagtagttgataggagcgtgtatattcttgtgtatgtttcttgtttgctgctaaccatggcaggattgcgcaaggggaaacaagatggtcatgctcaacgtcaacatctacaccttcgacgagatatgacgacttcttcacgtgatgcatatgaggtacatgactataattttgcacaagttgcatgtaagttaccagtctatgatggaaagtatgattccgctgcatacattaattgggagctagcagtagaaaaacaatttgatgagtatgatttttctaatgctcaaatgattaaggctgctagtaataagtgtgccggttctgcatctttttggtggcatactgtggggaataagcttgaaacttgggatgaatgcaaaatactgatgagaaaaagatttatgttttcatactatagacgtgctctccttgagaaatgggaacatctaaaacaatgtgacaaaactgttagggagtactttcatgattttaaaatttgtatcacttatagtggtttacaagaatcaaatgagaacacaatgactagatttttcagagggcttaatttcaatattcaggctgggcttgttaatgtgacatataatcatataggccaattgttcatgcttgcttgcattgttgagcgcaaaattttggagaatccaatggagcaacaagatatgcttgtgcctcctatcactgatgttttgcaggaagttcagaaaagtctccaaaatgagaagaacgatatgtttgagatgtcacttccatcactcgcgaatgaggagaaggctgatgcagctacattatctgaagaaagttcgcaaggtaaattaaatggtgctgagagaaatgaaggtgagtattctcaaggtgagctacacttgtccacttttcatgctatagtagagcaaccattagtggaatcaattactgagttgcctttgtcacaagttgatttacttgctgttccttgtgataaagaagagttgtgtgataatgtttcacttatatccatgccacaactagtgaatgaacatgttagttctactatttctttgtgtgctgattctaagcatgttgttcacattgctaatgaagtagaggaacgcgaattgctatcttctttaaatactttgggctatgttcagtttgatgatttttgtgagcttgataatttgaaggagaaattatttgctaaatctgatatgccatgtccaactaatgctatttttcatatctttggcgaatataatgatagaggaatatttttggtgcatagagtttacatttgttcagatttagaacatcttgtagttccggataaaatatgcaagctagagagacatgttactgctaatcatattgtctcgagtttgtcttgttttgattgcaagaaataggttgttttcagtggactgcgcgaagagcaccatatggaaaaaccgaggacggttttctgtgaagaaggggaggatgatgtgaccatggctactatggatacgaccattactcacatcatgaatcaacaagaagacatcaagatcaagtcctccatgtgctgcaatctgattcagccacgtgttacattgctgacttcaaacggccgccaaatctacatacgtgctccgttttgggcccgtgagtacttgacggaaagttctcgaagtcctccttccaacggatccagcctcatctcggaaatctatctcgtttggccgcaatcacaaaagcaaggtgctgcgtctcctgtattgggccaatgggcttgtaactttgtttgggaccctggcccatgtggggcccatgtggggtgcgccccaatctggtggagcacgacccttggaccctcttggtcgtcctcccacctctataaatagttaggtaccccttcagggttttttgggttttgttagattaaagtttagccattgctacttgcttgcagcacgcgtgtcggctagaccgtccgtctgcttgttcttcagaaccccacttatcatttgtattaaattcctatttgcaatattagattgcttttatcttgttcttgcttgtttcttcgatttgcttgcaggaatagggttgatctgcactggcaagatcagcaacccacggagaggtgtatcgatcgctaaggcgcaacacaacgtctcgtacggttgtagtcggatcgtcaacgtttctcccaaatcgtagttatcacaactcaccgaaagatcgggccaacaacagccttgagtgtcgagaggaactcagggttcattacaggccgagggagagagagggaggactttgggctgggctcggcccaaaggaggaaggagggtttatttttagtttttctttttagtaaactttgataattgttattgttgcttaataaatattttcggtgctctgaaaattcaagtaaaatttgagggctctttttagaccaagaagaatttgacaaaatttctccgggccacattcgaatttttcttgtacatattttagtgtttgccaatttcatttcgaattttaattaattctattattccttttagagaatgatttttaattcgggatgaatttatcaggacgtgacacaaggagacacttggagaaggacttagagccatggaggatcatcgaggacgtccaagtcaaggtagtggcccaaaccaattcgacctcgggtgcaattcggataccaggaccagtctgcactaaaacgggagcctaggtcgcatacgtgctcggattggggcattctttatatggatggaaagctaagaagataacctttccaatggttttggtcccacatccaaattatttccgagtcaatgggaatcgaccaaacaagttgacattcagaatttgttccggtgctgcgtcaccgtatttgggcctttgggccgtgtatcgtgctggaacccagtagggttgcgtcgagagtgggttgcacgaccctaaactctatatatcagtaccaccaccatctttaggtttttggggtttgcttagattaatctgtcgaggacagtttcatcgctagatcggtttgtaagaccccaactcgtgagcttaatcattcatctgcaattttggttgttttctatttctctcttgtttttgttcttcgattggcaaactgccgggtcccaaaactaatgatttggtaaccgacatgttaaaactgtatcaagccctggatcagtagattgatacaagttcaatattttggatcgtctttgcttacgtttagacatagctttgaaggagatattattacataaagtaatagggtatttacaagattgtggttaactattacagcagaagctttagaatggcctaactctgttgttttgctatagacttaaaccatctatctaatctagacttgagaattaggttgaaatgaaactaacttatatgattgaactcccagcttcggcacaaactccaaatgaactctgaaaaagggggttgaagcaagggtgagtacaacgtactcagcaagctattatatttaatcaacaatgaatgtatgaaataataatatctgtgtaaagctaggtttacttgcaaaaagcagagaatgtagaagtagaaaacctgtaatgttttaaatgcagcagtatttaataaaatttcaaattaggtttctatccaagatgccatagtgagtcccaatgctcgataaccgcgagcacggctatttgaatagttttgaggatattcatactacagtagatgtacgctttacccgcaatccatgacgtgccaaacacattagccttgtcatggcaaagcttttcagttactaacatcagtggtacctgttccatgaactctagtccccatgcactctgaacgtaacgttatcagcagcgagaggagttctggcgttcccgagggctttagagagaactgattgtatgacaccatgtcatcgcaatcagggttcacaaacaatttgtgcacaattcatttcatatatttacctgcgcctcggtaaatatcacaattgcccttcgcggcataaatttgcctcctgcacgaggacttaagaagaaccactatacagaggtaccacttttgctagataacttaatcagctaggtctatgcccatacgagaattgcggtcgtactcatatgttcttcacatgtacttggcagtcttatatcggttggaacagtactagccacccggaaatcaaccatttctaccgtactgtcccaatctaagttcattatattttatgcattctaactaggcagggctaagcaaaagctagcatatatctggtttgctatatattcaggttatgcattcaaaatcatgtatggccaatgcacaagatactggagatatagaatataggattattatgctcaaatgggaggaataataacttgccttgctccaacgcaaacaaatctgagataggcaacctgattatccgatcctcgaaacaccacaggttgccatccaaaagataatagactctactaagaaagacgaagaaccaaattcaataaaaatcatgaaatagcaagaaagtgataaacagcaagaagggctaggcttggggtataaatatctctgttaaaggcgtataggattctaaagggttggaggctaaggtggagaggggatccggcaactaaggttgcttatattttatgtgaatgcttggttgttgaaagcataggatgtatattggataattgaactggttcagttgatgtatggctagtattggctggtggtaggttcaggtagtataatacctagggtttgattatatttaagccgactgcggagtagagaagcatatcagctaggctctgtatagattctaggagagtaggtggctgagtatagtggataggcaatattggtaggtgggatatttggatgacggttgggttctaactagcaaggtgttagctagggtttggttgcgtgctagtcgatgctagagcataatgactaggtttggtattttctctagccggtatcgacagatagcatatcggcaagagggattggaggtttatacaggtttagtggggcggaagtgttactccgacaaccgtgagtggcgacggagcgactagaatcgcacagagcttgagagcgaactgtgtagcgtgctgtggaggtcgagggaatagtgaagctccgaccgttgtacgcagcgaggcgtacggtgccaggagcagcacttcgaccttgggtttggtttatgccgagctttacaaccaacggttcgacgttggggtccatagaccgtgcgaacgtccccatggaaggcgtaaagttccaactgatggctttttagtggctaaagggtattttgaaataaaaggagatatttgaaaagcaaatgacatttaaataacttaaggaaatccaaataaaatattaaaatagcaaatttggtatcaaaatgtagattttgaatttagatgaatttaagtccaaatttgactgtaatcggatctacggtttaggagatatgggcttctaaataataggttttgaattaaatagagaaaataagaagagacactatgcaggggacccacctgtcagtcttttctttttctttttctttctcttcttcttcttcccgcttcttccttcttcttctcttcagtcgaacagagaggaggaggagaggggcgtcgaggctccggtagtggagaggcagcgacgccggcggccagtggtgttcccgggtacagaacacctagggaaggaagtggtcggcaaagggggttaagggaatggctggaacggcgagcacaagaccgtgaaccgacaggagagagagagcttcggtggggcttgatatgggacgaaagagaaggggaaaagtggaaaaatgggtttgccggagtaaggcaaggttggtggtgagaggatttggttagtggtgctccggtgagagagatcggctgacggtggcggcagccggtcttgaggaagagagagagaaagacagagctcgaagagctcggatggtgtggaggggaaaaggggcgacctcatcatctatttataggccgcggaggtcggttgccgaaggcggttgtagaggcggtcgtcgactcggccacggcgacgctgtcgtgaaggaagaaaagacagtgccagcttccttctctgattggatggcgacggcggcgcgtgcacgtggtggctgccgtatggctgggcggcggcattagagaggcacggcacagcgacgccttggcgtggtcggcaagttgactgcggcggcggcgtggagagaacggcgggcggccggtttcttagcggcgaaggaaggcgttggcggcgtcgtgcgcgtgtgcaacaggcgcacctggaggcggctcggctatgggccgatttgggccggcttgggctgatgggagatgaaaaaggatttcggcccaaagtgaatagaaactgtttctgaattttgaagggggtttgggtaatggaattgaataggatttatatttgaaaagaatttgaataggaaagtttggaaggaaattatatatggatataatttccaaaagagatattttctaatttgagtgcaatatttttggaagtggaatatagtggaatttatatagatgcactcaaatgggggagagagatatatatttgagaatgtgggaggaaaatggagggaatggaataaataaaattttagcccaaaatatgtggtaggaaatctagaattaattatgggctaaaagaggttttggatttgggatggaaggatgaaatatatcttcttagcacaagagcaatatttgcaatatttgtaataatattattcttgtgccgaggaggaaatcaagccacgggaattaaattggcggctagattgaaaggaggaatttggatacttgagatttgtaaagggaactaaggataggtttggaatcaaaggatgggtcgacaattaattccaattaaaattggaatttcaaagagttggtttggagggttttcttggaccataattcatacaaatgaaaagggttttcaactaaatttgaataagaggaattttgtcgaaagaaggttttaatttaaaaccaaatcaagaaacaccttaatttaaccaaatatatctttaaatgaaaaacacaaaagaagttaaataccagagagggattttatgcaaattagttttaggaggtcctactaattatattttcctaggtttaggaagttattaaaaacataagaagcggcatgatgcataattagaaaatagctaattttcagtatgttacacaaacagggattagccttctcagcgaggtcacccacgtttcgacacgggtgataaccagaggagacgtggtgctgcgattgcggggctcaagtgtgtgcgcattcaagaagccggatcgatttgtgtcgcggctccgcccaaatcgttgtttatcagaacctttcggaagatcgggaaccctagtgcacatcactgtcattggctatcgtggccctaggacttcaactcttcttcaagggctcagcagagaaccagccgataccggtaaaaagagaaaaaccaggtcatcggctgcagatccatcggctcaagctccaaagatgaaagtcaagtcaaagaaaacgaagccaactgatgatctgcctgccctagatccatccattgaacaagctctggatgaagaagaaatcggcgaggatgttgaccaagccgcagatgaagtaagcgatactgaaagaactccatcggcttcacctaagtaaactcctcgaactccttctgccctagcccatttttcaagggtaagcaacttcccttgattccttttgtaatcacttcattttatggccgattactcacagattttatagttgcagaagaagaaaactgttgtgaagaagaaatcggcaatagcaattctcaaatcagctccaccagtaagatattcttaactcttccactagttgatctcagcctgattttatctaacacttgtctctttcgtagcctcctcctcctccttctcctgtacaacaatcatagagtgatcaaactccatcggctgtagaaagccaccatattgaagaagaagaacaaccagctgttcctgctatcccagtaagtcttgtctataaaaatcttgaatcggccaaatagctcatgttgatactcaactgttttcaaattccttcttgcaggccttagccgatctgttctctttcgatattaaagactatcttgatgaagaaacagaagaagacaccaccagcaagtctttagttcccttgtccgatgatgtgaagaaaacccttgaagacatctctcatcggctagaggcatcatcactagacaacttggtggtaaactgtgggccgattaggactcggttacacaagatccaacctctaatcccagatgagctagccgatgtcttcacttcagctgtctatcttgagcagcatcaattcaagctggaaaaagccaaattaagactagccgaacgtcgggagcgcaaggacattcaagtcaatcggctgcttgtgcacgaagagaagtccaagcttgatcagctatctgagggcccgatcaagtccaatattgatcggctcgaagcccgtaagattgagctcttggcacaacttgaagaatgcaacgccgagctggatatggaacataaaaagctagccgatctcccaaaatctatcgaagaacagaaggcaagactaaaattggccatcaagaatgttgctgatctcaccaagtctttaaaagtcatccctggaactgacactcaagatgcccaagtaattgaagaagtagaacaaatcaggcaaagggctatttcggctatccagcaatatttgtctcaatgatatcttgtgtaataggtcttagaaatttttgtaatcggctaagaaactttggctctttatcgaacttatcctcataattttatgccgattcaatagaactccatattttgctcaaaaatttgcaattttcatatatgtgcccccctaattttacaatctcaaaagcattgataaaattataacttgaactaagggcgatatgaaaaaatcggccattgtcccatcggcaaaccacaaccggttacgataagaaaaaacaactaagggcgatataacaatatcggccattgtacatcggcaaaccacaaccgagtacaatatgaaaaacaactaagggcgatataacaatatcggtcatctgaaggcgatgtaaacacatcggctatcatgtatcggcaacattagccgatcatgcgttaacccaaacacttgggtaatatttcttcaagtacttgccatttagtgctcgtccataaacttctccatcgagtccttgcaacatgtaagctcccttagacataactctatagatttggaacggtccttcccaattcggtgaccacttgccgaatttgctatcccgactcccaatcggcaaaatcaacttccatacaagttcaccttccgaaatagttccttatccttggtaacctttgcaagggcccttaatctagactgaaccaagtcttccctttcattggccatgaggttataatactcatcggctgttaaatcattttgcaactccgttctccttgagccaattctaacttcccatggcaaaatagcctcatgtccataaacaagcttataaggagggacttggatcgatccatgacaagccatccgataagaccacaatgcttcggctaatcgagtatgccatagccaaggataatcagaaatctttctcttaatcaatttgatcaaactcttattagatgcctcggcttgcccattagcttgtgtataatatggtgaagaattcaacaatttgatacccatgctataggcaaactgaacaaactcatcggacacgaaaattgaaccttgaccggttgtaatggtttgatgtggggacacccgataaagtcatggtgcacccacgaatacgtaaccgcccaggatgttcagttacgcatgaaatgatataaaagcataaagttcgattatacaatacttaagtcacttagttcacaacacaacataaatacaaatcattacatatatggcctataaagccttatttctataaacagataaactactagactccatcacaggaactgcctgagcgtaggatgacgtagaaaccatagttgtcccactctaatagattgttgtcgaaacgacaactgcatacgtcgaaagacgtggttactcaacagtggttggaaaaatgaagtgtactaaattttgaattttacatgggatccccccattacatggccctaggggactatttatagccccattacaggtccttactaccagggtttaggttgtacaggggaatttacatgattacccttaaagaaggggcatttacaggggtacataatgttataggggctcatgggcccctgatgggccgtttggcgatcgccggcctgatgggccggaaaggcttcctcggccctcgcgggggcgaacttgtcaaggcgaagtcatcctccttcggcagacagtcttcgccttgcacccttcgtctgagacgcctctggcctagcgctactcttcgccttgcgctgctctcgctccatagccttcgccatgggtttcggcaggtttcgtcgaagggcctgatgccatccgccaacaagcccctcacgggcaagggtgagactggagcttcggccaagaccgtgcaaaccatgtggtatggtatgcggcgccccctttcgaccgatgctcctaccgaaaccaacattatacctgcgaatgaagattattatttgtgcggctggtattattttgccgcgcttcgcctcgtgcgattgatggttatatatattcttttttcctgggccgaacgaaacagtattgggccttcctttcttgggctttttactgtgctgctcggtcgacaggaatttaccgtttcgcctacccttgcgacacgtggcgctttattactggtgggtaggcgaacggtcgcttgagcgggctatatattcctgttgctctatccttttcaccgccacacttgccattttaccgtgcgcgctctctttctccatctcttcctttcacagcgtctttcgacccctcaggcgtttcgccgaatctcttttttcgccaccgcaaacgcaccgttcgccatggctccacgtaagccaaaccctacttcggtgaaagggccggatcccggccgagtcgatgacgacagcaccgcctttctgggggtctctcttgtggacgacgtcgagctagcgaagctggtcagctccggagggttggttgaggggcaggctttcgccctagggaaaaccgtggtgccgaaacctgtcgacaaccggacggtggtgttcgccgtattttttgaggcagggctacggtttccctgcaacgtgttgttgccggagatccttcgcctctttgaggtggaacttccacagctgagcccgttagcgcttgttcagatcgctatcttcgactgggcgtgccggacttccgagtttgagcccaacgccgagctctttggcgccatatttttcgccaccgtgaactcgaagaaggtaatcaccctggctggaacgaaaaaaaccgtgttcgggagcgtgaacttcaacgttcgccccgagcggtccgatctctggccggtgaacgctgctatgtcgaagtgggaccgccattggatggcgaggtggttctaccacaccatccctttcgaggctggttctgaatcagcgaaagccctccggtgccggcgtagggtgattgcgccgaaccggagacccaagatcgctgtggacggcgccatggaggcgcggttcgttctactgcggaaggtttgctcccgccttagctgccgtgacttggtggaggaattttgtatgcttcgcatttttcccctctcccagtcatggcaagtcgcggttgaacaaggcgaagaagtcaacggtttgccgaacctgatactccctgaggggcgaacagtaagactgttctattgctatatactgctgtgctttgttatttcgccttatttgacttttgacgtagcttcacgctctacttttacagtgttgaccctcgaccaggccgaagtcgaagcccgcaggatgatcggcgatgtttcggtcatcgagtatagtcagctgttaacgcgtcaagcggctgggcgggcgaaccgggtttacaatggcgaactgcctccccgggcgaatccccaaaaggccgacgacgaggcagggccttcgtgaaagcggatgcgtggacaagtgaagcttgcccccaagaagcgaagggttcctgcttcgtctgactccgacaccgacaacgaggatgatgccgaagaacgtgacggcgaggaggaaggagaggaagaggaggaggtggaggctgtggctgataaggccgcgggtgaggcggtcgaagaccgcgccgacacccccgggtacactcctaccccaagtcctagtcacaacgaaaccggggtggagtcgaacagctccccccttcgtcagaaggatttggaaggggcgaaggccctagttgcgttctcttcgggcgcgtcggcgaagggaggtcctgtcaagaaggtggctaaaaagaaagggctcgtcaatgtcgctcgcgtttttagcaacgacgagtcctccgacgggactccgacttcacccgctggtcgcagcctggatctttcggccgcccccattcctccacttggcgccgctagagtggacggtagtaccgccgctggggcttcggcttctgcggaaaggattgtgatggccgcggcgaaagtattcggcagtcctccgcatcagccggttgcctcgccgctgatggaggcgaagggaaagagagcggttgctgagatgtccgcttcggaatattcgctctcggtaccccgcttcgcccctggcgacttcgagacgcgagcggacctccttccttttgtggaaggggtaagcaatcttgtactgcctgccagcgccccgagcttgttcaccgaactgaatgagttcgacgaggggtgctctgctataaaaagcctggctgttcgggtacgtttcccccccccctttttatctttactcttcctctatcttgtttttacaattgacacttgttctcttcgccgctcgtattctgcgcccagatcctcgcggctcagtgctcaacagagcgaaccgtgcgagctcgacttgatgggttcaaaagccgtcttcgggccaaggacgacgaactaggccgcaaaaatttggacatggaggcccttggcaacacccttagggaggcgaaggccgaaagcaagcggcttcaatcggaactagagaaagggaaggaagctagggccgaagtcgatcgcttaaaggccgaactggagaaagagaaggcccacaccgccatgctcatagattattataacctcaccgagccgaagatggaggctctttggcaggaggttcggaaggccgaagcaagcgccgcagaggagtcgcggcggttttcgcgggagatggtgaaaaccaccgagtccgcgcggacagcgtgccaaacgcttcgccttgcccttactgatatgggcgcgaaggtgcgggatgtcccctccgaagatgccttagcctttgacttctccgaatggacccaacaggctggtggttcggtttcggactgcgccaccgcatacggcgattgctgtgcacgcgtgtcagcggcctttaccatgggcctcctgcagcagttcttagattttcatagggggtggaggcgatgcccaggatcacccagaggtgtgaggccctccgcccttctcttagattttcatagttttcttttggtgttcgctagatgtggcgaaccattgtatattcggcaaactgccgctaaaccttaaaaaaaaaaaagcttttttgcatacttggactgtatgataattttaaccactttttaacgattaaagtctttggcatattattatttcactcattttgcattatgccataccttccccttctttcgcctattcttaccatgcaagatgtgttttgccttttctgcactgtctaccagggggtctgccgaaaatcatgcattcgggccccttctgggagctggcgaattcaaaacgagaaatttgtggcattgaagggtttgccgaaggtgcgatgtccatttcgacctgtttatcgcgaaatggaaataaacggtcgtagctataaagttttcaaggttgccaactggctgcgggcgcaccccgggcgaaccttagaagattacgatcttgttcattcaagacgtttggaggatatggctcgcttttggcgaaaccatcagaagactaaacgccaggaatcgatctttcagcgtcgttacagtttagtctgtgtttcgcccccttctcctcttaaggttgtgtatgacattagtagtgatgacgaacctagttcatccgaccattccttagggagggataatgattactggggcgaaaatgtaatttacttgtaaaatgaattgtatcgggttgtaaaccttgtactcttcgattatttttttgaagctaataaagagcgtgctttatttccttttcgctatttttcgcatcgtcacactttgtgcttttgttaggtcggaacatgctggcccctttgcatatagtagcgaaataggtgtagtgacttttcagcttttcgttgttcgtttttgatctgtagcgttctgtgtcgagagaaacgcttttgcttttatgctgatcggtcgtaacgtcgtttggctatttattttccaagacaagctgttgcggtttcaacgttcggcgagcaatgcttcggcagattcgtttcgcccccctggcctttttcgctgatcaggcgtttgccttggggtttttcaacaaattatcaatcacacgaaaagaaataaaaagaaggcggaggagacagagattttatactggttcgggcctccatggtggataatagccctacatccagttttttttctcttttttccttttttttcttgccgaaaggcttacatagtgccaaaaggcttacatgataatatgtacatttttacaagttggcgatttgggtgccacccattctagacatagaagcgcttgagggaggcggcgttccaggaatggtcgaactcctcgcctttgagtgtcgctaggcgaaaagatcccgtcctggacttgtgtttgatgatgtatggtccttcccactttggttcaagcttgccaaccgctactgggttcgcctttttccttaagacgagatgaccaggcatcagctccgtgggtcggacttttttgttgtaagttgccgaagtgcttgtggcttacttctgcatgtgctcgagcgcttcgacccttacaccttccaagagttcgagcgatacctcgcgcccctcttcgcccccggagaacataacccttggtgagttagcccctagctccgctggggtcattgcctcatcgccataaagaagcataaatgggctaaacttggttggtcttgtgggggtcgtccgaagggcccaaagaaccgaaacaattcttctggccatttgcctttcgccgctccctcaagtcttttctttagtgcttctaggatcttgccatttgtatgttcggccgccccatttgactgtgggtgcgcgaccgacgcgaacctgatttctaggttaagcccttcgcacatttctctgaacttatcagagtcaaactgcttgccgttctcagtaatgaactctttcggcaccccgaaatggcaaacaatgtttttccatacaaacttctgtactgctgccgaagtgattaacccaaggggttcggcttcgatctatcgagagaaatattccatagctacaattgcaaatttatacccgtttcgcgccaccgggaatggcccaataatgtccagtccccatctggcgaagggccatattggtgcaatgggctgcagatcatactggggcacggcttggctttggccatgacgctggcaacttttgcacttcttgatttgctcaacacagactttcaacacagtgggccaataaactccttgtctaaacactttggaggccactgttcttgcagcctggtgcgcgccacatagcccctggtgtatttcctttgccatttcttcgccttcgacaaaagagatgaaacgatgtaagggttgaagtaccccggagcggtaaagctgacccgagaccatcttatacttcgtggctctgagttgcaaacacttcacttctgcttcgtctaccggaagccagccagtttcaaggtgtttcacaaatggggttcgccagtcatatgggtcttcgcccagtttctcttggtcgattgtcatgacttccgagctgtccatgggcacacttggagcatgtaggacttcgaaaaagatgccaggcgaatgcgggccaccacaagcagcggatttcgccaaggcgtctgcttcctcattttggtctctaggcaagtgttcgaccgttatgccggtgaagcattttttatggaccgaacagcctccagatacctcttcattccctcttcttttgcctcgaaggatttgtcaacatggcctgctaccaacttggagtcagttcgaattagtaggcgccggactcccagtgctttcgcctttcttaggccaaggagaacggcttcgtattccgctgcattgttggttgtgtcgaactgcaatctcgctgcgtaccgaatcggcacaccattcggcgaaaagaggactgccgcaacgcctgcccccttgtgcgaccacgaactgtcagagcacatcacccagaactggtcgtcgggctcggggtcgggggcaagtaccggtgtccattcagctacaaagtcagctagcacttgagacttgatagcagagcgtgcaacaaaatgcatgtcgaacgggcatagctctgccgcccacttgctgagccggccagtgacttccttgcatcggagtatttcgcccaaggggtactgtgatgggactatgactttgtgggcctggaagtagttcttgagcttgcgcgaagccattactagagcgtaagcaagcttttccatttcaatgtaccttgtcttcgctccttgcagtgcttcggagacgaagtagaccggtttctgtccagactctgtttcttggacgagtgcagcactgactgccactggcgaagctgccaagtataatagcagttcgcttcctaggggtgggcttttcagagctggtgggctttgcaagtattgctttagctcctgcaagcttttgtacttcatgtacgcttgacggaggcttcattttgacgaaggcttcaaaatgtgccgaatagagtgatgaaggacattttggggatgtcgagcgagttcatgtggatctggtggtaaccggaatatgcatccaggaaactcatgagctcacatccagctgttgaatccacgagctggtcgattcgcggcaaggggaaatcgtctttcggacacgccttgttcagatctgtgaaatcgacacacatgcgccatttgccgtttgacttccgcaccagcactggattcgccaaccactccggatcatcaatctcttggataacccccgcccggagtaatttttgtacttcggccttcaccgcttcttggcgatcggcagacatcttgcgcaacttttattttcttggcttaatatccggcttgactgctaggtgatgcatgatgagatccgccgggacgccccccacctcgtcagggctccaggcgaagatatcgatgttctttttgagcacctctagtatgctctcaacttcttcttcgcccatgtcgccccccagtgatacgagttttgtggggtcggcatcatcaatctgcactttcgttaccttgccgtgaggggtgggcttcggcgtgtgcttcggccgctcatgcggttcggtctcaacattgtgcactgctctgttgattatggctagattgagttttgaagcggccgaatgctgaagccccttgactactatcaccccttttgggccaggcatcttgagcttgagataattgtggtgggaaatggcttcgaacttgttcagggttgcacggccgaagatggcattgtagttgtatgggatgttgacgacgtcgaacagtatttgctcttcgcgcctgttttctcccgagccgaaagctatcagcaaaagtgcttggccaagaacttgcactgcctctccgctgaacccccggagcgacgtttgtgccggtgtaagagcttgggttggcaagcccatcttagcatatgcttcggggaagatcacgtcgaccgaactccctccatcgaccaggattcatcgaacttcaaaaccggctatctcagctgagatcaccagtggatcttgatgcgggaacaggactccttcggcgtcttctggcccgaaagagatcagctggttcacgtactgtggcgccccctcacccgccgaagtgatgctgtggaccatgcggatctgcatctttctctaccatttcgacaactggcttggcgggtcggctcttttaatcacttggattacccttcgttgtgtatcttggcgttgttcggctgggggtgtttgctcctggactgcttcacggggtgcttcgacagttgctccctgctgcggccttgggtcttacgcgttgccatgttgcctaatgtttcggcattgctctgtggtgtgcgaagagcgtccgtgaaaggcgcagtagaggtcttttcggaccttcttgcgggctagctgctgatggttgcttgtttgctgggcgtcgaactccttgcggagggcttgcacttcttcgacagccatcacagccttgcccgctcgatctgttctgaactttctccaagtcatgggggcttggccttgccttggtggctgtccctggatcgccggctgagactggcgaacagagaggggaggtggttcggcaatttgaacttgcgcttgagcttgagcagcggcgacggagcctttatcatactcagcttgtatagcttgtcgtcgcctagaatcctcctcaccccttgcgaacccgtcaataatgcgaagtaggtgttcgagcgtctgcggctccttgttggcgatttttctcgttagttcgccctcaagcagaccagccgatgcggcgtttatgaccgacgcctcggttatgtcttgaacttggcaccgggcttgcgagaagcgactcatgtactcccttatcgacttccccggcctttggcgaatgccgagtaggtgttgttgcgccttcggctcctcgtaggtgcctcgaaagttaaggacaaaaacatcgcgcaattgctcccatgagtaaatgctattggctggtaaattgaaataccaagaacgggcgatgccgtctagagcgagatgtattaccttcgccttggtattttcgtcaccatgagccgcttcgatcgctgactcgtagatggagaggaactccttcgggtcagtttcgcctgaatagcgcgggacgggtgggaacttgaactggggtgggattggatgagtcttgattcccccactcagcggtagccccttttcgcctcccgccctgtttaccgcaccttgctgcgggtacggtctggtgaagggcgaaatcgcagcttgtgcgtgaggttgggccatggcgttcggctgcccggctccaactggaggcacttgctgagccgccatggatgggtcaaaaattggctgcgaccacgtcatagcagcttggattggtgcttggtttgttccgaagcctggggtcggagcttgctgccgaacggttggcgcctgagcaacgttggcgcagtcgaactacagtccctgattccacggcgaagctcccgagcctgactgaatcgatggcaaccaagtaggcgcaccttgacttgtattccccaccgggtgaaccgatggggttgtacttgaaatgtagtggggttggttgagttgctgaaggaaagcttggagttgcgcctgcagagccgaagtcccttccgccactgtttgtggcacttggccagttggttgatgctgcccggcgaactacaccggcgcctgtgcggcttgtggcggaaagggctgggtcgtcacttgcggatggacttgatgtgggacatagcctgccgaatactgaaggattggagccgacgtggccttgacccgccttgccgcctcgtatgcttgttgttgttcttgcatttggcgaagcatgtcttggagccgtgtcatgttctgccgcatggcttccatgtcggcttcggcttgtgcttcggggtcaaggctggtttgggactgtacaacggtgagcgcggttgtggtagctgccggctgtgatggagctgcctggggcaccaccggttggcttgtcgaaaggatctccgccctggtctggagtgcccttgccgccgcagccgcctttgccacgtcggcctcgttcggcacgtgcaccgaggttgcaggggccgaaggcggttgtgatggcgcttgtgctcctccagcttcggccacgggcgccgaaggctctgctccttcctcggcggccatgtctggtccggcgtcgctctccttccgcctggcaaccttctccttcacgaccctcttcggtggcattcgctctcagtggtttcgctcggagtccccacggtcggcgccagctgttgtcgaaacgaaaactgcatacgtcgaaagacgtggttactcaacagtggttggaaaaatgaagtgtactaaattttgaattttacttgggatccccccattacatggccctaggagactatttatagccccattacaggtccttactaccagggtttaggttgtacaggggaatttacatgattacccttacagaaggggcatttacaggggtacataatgttataggggctcatgggcccctgatgggccgtctggcgatcgccggcctgatgggccggaaaggtttcctcggccctcgcgggggcgaacttgtcaaggcgaagtcatcctccttcggcagacagtcttcgccttgcacccttcgcctgagacgcctctggcctggcgctactcttcgccttgcgccgctctcgctccatagccttcgccatgggtttcggcaggtttggtcgcagggcctcatgccatccgccaacacagatcaacaggttctccacatgcatcttcctcttcatgatctgaacccatttatgagtacaaatggtactcagcaagacatgcttatgataaacatgcagtattgagagctggaaggtttaaaccctaaccttaacagttatttcttagaggctaacttaataaacatttaatataaacaacactattgaacatttaatttaaacaataataacgagcataaaaaaaatacaaatcttacttatagataacttaaatagaacatcaaataataaataagttaaccatattaattagtagccatttagtttaacttgtgcccataatctggaatcacccatagacacatctccattaaccgagagcacggcgtatacgaatactcaacgactctgcagcgtctgcctagctttacccacacgatacccacagctggccgggctgaaaagtaacaaggtgtaatattgctccatatatctctcccttctgcctagtaagttaaaggatgctcgggatgttgctcggagtgatccggtccgaggtgtgtgccaacctacctccgcatccacttaccattgtttgttactcgatgggcagcccagaacttcatggacccatagggtagttctgaattctcggggcccatcaagcccacatatataaatcatataaacatgaaccatgtcactttgcttcatacacttgaaagctaatggccagtacaccgaaaggcctacagaagttcaatcaattggagcaatatacggccaggttcgacaaatcgatcgtgtggccaactatgtcattcttattgacacaaggtggttgattattatatcaattttaaataagaaataaccataaatatatacatatatccatcacgaccataaacaggtccataaaaccaaacacatgaactctatcatgtgtaccacctgctcacatgcggtgtcaacagctcttagcatatagccataaatagttccataagtatgttttcatatgcaataataatatccatattaaatcaatagcatgttaaataattaaccatttgtttaagtgtttatcaaaatttatcctaagtttgttagactctaaggctcattaaggtatttataaaaacaacagaaaaatataatgcaataattgcaatataattaatttaaaagaattcgtgcagtctatcgtactccaaaggacaagtacgctaccaaaataactctctaactactgggattaaattgttcaaaggagggtgcatgtctttcaaccttcgggctcgatgtagtcgtacaaaccgtctcctcctaccgtggagatttcactcgcttcgactaccggaccaacgtcagcgttttctattgacgcaacaatcatcaccacaataaataacagaaaaaaaagataaacaaaagaaaatagtatcacaaagtgcaacaatgggtgaaaaggatttaaagaaataattttagggatttttttggaatttcggtgaacggcgaaccctatggctaaaattagggtcgcgacaacgggtgctcggattacaacgaaactgacacggatggattcggaataattctaggagtttggaataggtgtcggatttcgatttcgaggacaaacggatggtcaacttgatagaataagaaaaaggatttttctgatttatttttcaataggaaaatcggatttttcttcttcttctcgttctgcacaggaacggccgaccactccatggcgtcagtggtggagatggccggttttgggcaaaggggcgccagttttgcgatctacagggtgcagcgactccgttcccatggttggtggcggcgcaggcagcggcggcgaggctggcgacggcggccaggagctggaggcggcggcggccatggtggcggtggttccggcgaactccggtgagggcaacgggcctggtaagcatcagggaaggaaggggagcgcggtggtggcggcaactcggcctggggcggtcgggagcggcggcgcgccgtacggctggcggcggccgaacagagggcgacgccgggaggcggcaccggtggcattccggcgacggattggatggggaaagagaggggaaagggagtactcggcatggagaatccgtttttaccttcaatttcagaggatttgcaatgtatgtgacgaatttgggagctctatcaatggtgcaaatttagggtttcggggatttttcctccggtgatgacgatttgattcagcggaagtaggggcggacttgatgaggtgaaagaggttgaaaatgcgcttcttttgcctccagtcttgagccttctagttgagagacgaaggagttacagaagcgggaagatggaggtgtcgcggcggcattcattcgtcgttcgtcctcgtgcgagcgtgtgcgggcgtgtggcgcgcgcggggcggcatgagctcagcgcgagcgcggcgcgaggcggcacagggttggcgtgaggcagctcgagcgcggcttgcatcgggctggcttcgcctggctcggcctagccgagtagaggaagaagaaagaaaagaaaaacaaagaaagggaaggagagggaacaaaaatagaaaaaggaaaaaaaatatggaaaaataaaattaaggtggaaatagagaaaaggaaaatttggggaagattaaaatagataggatttgaattggtgtggaatttagatggtccgatattcgggatagaattaaatcagatcaaaggaattatttgagggatgatatgcactttgcgacaaaatcaaatgagaaaagaaacgtcgaatacaaacatggaaaataatattttaaatgaactactaactcgacggttattttttttagaagattaaagcaaactaaatcggttttaaaaagttgtcaaattttagggctgttacgtttgaggaataccaaatcgatagattatatgttcttaaacaaattgtatagcatccccagaatcaacctttcttcaaaggaatcgcctccacccacttggtaaaataatcggttgccaccaatataaacttatgtcctttactcgatggtggattaatcatgccgatcatatcaattccccaacctctaaatggccatggcttaatgataggattcatagctgacgccggtgccctctgaattgctccaaatttctgacaatcttgacaccctttgtaatatttgaaacaatcctctagcattgttggccaaaaataccctgcacgtcgaagcaaccacttcatcttatgagccgattgatgagtgccgcaaatcccttcatgaacttcgccgattgcaaccttagcctgatcggcactcaaacacttaagcaacaccccatcaatcgtccgataatagagttcgtcaaccaaaaaagtatactttaacgccttatatctcaatttccgagaagccgactgagatcgattctgtaaatattgatgcacatcatatctccaatcataggctgttattacagcaactacaaccttaacatctttgatcatcggcttataccctgatgccccttgggccaaatcattagcttcaatattttgctctcgagagatatatgcctcaaagtaaccagccgaaattccctcattagttcttggcacttctcattataaaccattaatgtatcattcttgcattcatatt

SEQ ID NO: 26293 - DNA, 36791 bp, Oryza sativa
gtgcattcgttggacaatagataatcccttaaccttgtacatgaaaaatataagcacaagcacaacttctccacaggagaatatctagtctctgcatccaagagccgatgactcaagtagaatacactctttctttcccttcgagctcatgaatccagaccgagccgattgacttctcaccggccgacagatataacctaaaaggtgtccccttctgtggaggaatcaaaaatggaggagagctaagatatttcttaatattatccaaagctttctattgctctgccctccaagtaaacttttgatcggctttcaatattaataatggtgtaaaaggctctaaccgtccagataaattagaaataaacctcctaacaaaatttatcttgccgatcatctcctgtaactctgtcttgttctccggaggctgaatcttcttgattgcattaacactcctttgagttacctcgatccccctctcatgaacaagaaacctcaagaactggccagctgatacgccaaaagcacattttgtcgggttcatcttcaggccatatttcctggttctctcaaaaaccttcctcaaatcagctatgtggtcttctatctctttagatttaacaaccacatcatcaatgtagacctcgaccaaccagccgatcagatcatgatatatataattcatggctctttgatatgtagccccccagcacttgtcaagccaaaactcattacaacccactcaaacaagccgattgcactaggacacctaaaaactgtcttatggatatcttcttcggccataaagatttgattgtatcctatattaccatcgataaaacttaaaatcttgtgtcctgaggcagcatcaaccagctgatcagctactggcattggatactcgtcctttggggtagctttatgtaaatctctgaagtcaatgcacaccctcaccttgctgttcttcttgataacaggaactatactagaaacccactaggcatatcggcaaggacgaataaaaccagcatcatataaccgtttaatctcagccttgacaggttcaagcatatcggctttgcatcttctaggaggttgttggtgtggcctaacccctggtttgataggttgtcacgaccggaattaacccaacgggcattccatacgtgcgtgtattgttccttgtcccaggaggcaaggtacatcaaaagttgatacaattcagagtttaacaagcggaagcataaatagttaatttattacatgggcgatgaaggcccagcacacacgaagataaacggaaaacagcggaagactagggtgacgaccataggcacttgacgacaggcacgagctagacaccaaagccttcatcctccaggaactcctcttctgggttggggaaaaattgagcaagattgagtacaaccatcgtactcaacaagacacacccacgaatgcagaataaatgcaaaggagtacaagggagttataataaaggggttagggtttgcagtaaacagcatttaaaagtcacttagatgcccgaagctattttgtaaagacgattctagagctacacaatgttattaatcaaggccgtgaacccgcacgaacctgccttaacccaaggcctacgatgattcagaccgaactggcaaccagacccaggtcccagctcgtcccaagccaacccaggccaaccattcaacattttagttgttaagcaggttttaagaattaaaacactaacttgggtacattgctaggcttgcccataaccgagggcgcggctattcgaatagattatactctgatcagaggtgtatatctttacccacaagacacatcttcctcacgtgtaaccatgtgccacataccaccacggcatacggacgcaagacgtgacatagttcccaacccatcctagccataaacaagagtaccgacccaaccctggctacggccgggattcccgagaaaggtaaccaaggttgagcccctagcagcaggacaccggccctgtggcatgacatctcgactaccgagccgcagctcgtgtagccctcatttgccctagagatgtccatctctatccgtgtacttttgcccatgaccagacagagccacaaactaagccttacccactagacatgtggaagtacggtagtgctttgtaacagaggcccgaagactggtccttgtagtggccgaggtgctactatcaaaaccatgcacctcgagcccaggctaaacccaggtgtgtgtgtctatttccaataatccaaccattccataatgtccaaatgatatgagcattcccaaagactaaggttataaaaccacctaatgttgcctaattaatcagcgaagcagctagctaaattcatactagtggaaccatgaatagggtacccactagttagggttttgtttatcctagggtgaacaaggtaataataacaatagcaataataataaggtcataacaaaggtaaataggcatggctaaataaaacagtgataacgcgggaatttaaataaagcgataatgcagtaatttaaaccaaactaattttataacctgggattcaatatgttcaaggatgatgtgacttgccttgctcgctttcccaaacatcagcttcaagctccacgtagagcggatcttccgaagctgcagcgtctacatgaccaatggaaagaaaaaggcttttactctaataaaatccatataacaagcagaaacaaagcacaaaaataggttcctgacttcttaaggaaaagttagagacttgaacgttccaattccgagttcaaacggcaaagatatggccatttgaagtttatatgctcttaatgtgaatatttgcgaatttcttcatttaaattttaattaaaaatagggtttattgcgtcaaccgaggggagggggtgcgtgcaccgggtccacgggagtggtgggtcccacgcagcagctcctcggtccacggtggaccgggtgcactcgctgctcaccagccggcgccgtgggccccacgcgtcagccgtacccgagggcacgggcggcagacggctgggccccacgcggcggccacacggcgcgcccggaggcggccacgtcagcgcggccggcgggaggcggcgcctgcgcccctatggtcgccggcggtggccataggcgcggcccagcggcggccgagagagagtaagggaagggggaaagaggcggcggtccacggggcgacgacggcgacggaggaggcgaccggagtggagggaggcggtggtgcggctcgggtcgacggggacggcagcgtttcggcggtcggcgagctcggcgaggcggtggatggggtcggcggtggtgcggcgaagccggaggagacgacgccgaggcgggggatggtcctggcgagcggctgggcccagccggaggtcgacggcaatggcagagagagaggacgatggcgcgggcgcgaatccaatggggaggaggggcggcaaacggcggaaactgacaaggaaggtgcggggagggtttatataggtttgggagtgaaagagggtggacggcggggaaggaaaccggcgcgggggtcccggtcggcatcaatggcgccggcgagatttgcgggagagaggggggaaaatggggggaaagggagagggaatcacggggaatatttccccccacttaatggcacgcgggaacggtcgggggcggcgggatttgcagcggcggcggcgctaggcgcggccagagggagtgacggagcggcggcaggagggggatgacgggtgggccccttcccgtcagcgagggtggcgggcgggcccgcccgtcagcggcgcgcacgcgggaagggaggggaagccgagtgggctgcggcgagaggagagagaaggggatggagttgggctgaattcggcccaagagagaggggagagggttttagggtttttcttttcataaagccttttcaactttgtttatttcttgataattgttatttgcgctcggaaaattccactgaaatttatttacacattttaggcttttaggaaatatacaaaaatcctccaagccttatttgacttttaactttgcacattttaatttttggaggcttccacaaggattttaattattctaggcataatttaaaggatatattttagagtcgttttgggacgtgacataagtagccgatgttcaacaatcgatcggctgagtccgggcatctcataatactcccaagataagcaatctctgaattccttcaacagctctatcaacttggttctgaattgtcactccctgaagttcttttcccaagcctaaattgaatttataaatggtctcaagaaaatatcggtgtaaaagcaagagagaaaccctaaaggaattaatgcaaataataatcggaactggcatgtgggatttttcttcagttctacatgtcgaaatacgttaagaagatttttagtggaattttcagagctctagaaataattttaaccaattaaaaatgagcacaagcaatatttaattccctggaaattcatttccttccttttctttctttttccctctttttctttccttttcgaatgggccgccggcccattctcttcctctccccctccccactaggccggccaaaggccgaggctcagctcagccggtcgcctccctccccctttgggtcgccgacaggtggggcccacctgtcgggcccgtctcccacctccagctggcgccgccgcatcccgcaaccgccgccccgctcgctcctgcatctcccgggccacatcgcccacgtcgccgcccgcgcccgccttccccgcgcccactccctctctctcctgcctgctctcgtgctcgagacggccgagattcaatttttgaatcccgcctctctctcctccccacctctccccactacgctggcgaaatcgcggtctccccggccacgatcaaccctcgtgagtctatataaagcacccccgttccctcctctctctttttcgttttgcaatcgcccgctcccgtgcactccaccaccctagcgccgtcgccctcctccccgccgccgctgccgccgctgctccggtcgccgctagccgctatgccgagtcgcgccgtcgacgccgtcgcgttcgccgtcgtgtggatcatcccgtccacccctcctccgtcggaatccaccgccggaacccactccgcaccgtgcgccggtgagcaccaccatggccgccgccttcggccggcgttctcgctctcttccatcttcctctctctctctaacccctttcatcgggttcgctaggtggttccggagctcgtcccgctgtcgtcatcgtcctccgtcgctcgccgtcgtcaatcgccgtcggtgaggcacctcctcccctttctccctctctcccgcgccggttagccgccgcgccgccgcctagcggcttaggccgcgctatcaccatccgcgtagccgagacgccgccgccctccgccgccagccggtcgccgctttgcaccgccgctatgtcgagtcgagccgccgtgcgccatggccaccaagccggcatgagccgcccgtgcgcgccggccacgcgctcccgtcgcgagggtagatcggggccatccaatcccgccgcccgcgtggctgccatgtggccgccacgtgtgcgccgcgtcggcgccacgtgtgcaccacatggtgcgccgtcccttacccggtccgtggacccagtccaccgcggaccgccccccgagtcactgccatgtggggcccgcatgtcggcgccgcgtctctctccccgggaatctgctaaaattcatagaaaattcatccgagctctgtttaagcccattcaagtctcagtaaatcaagaaaaatgcatagaatccagtaaaaatggttttgttctctgtttcagtagtcttatagtctgtttgtattgtttgctttgtatgacgcttagattccggctctcccgacgctccggtgtactttgaattagtcgccgaggttcctccagcagcagagcaaggcaagtcatgcttgtcacttgaacatgttgatcctatattgtaaatgttctattgttttccttcaaatattgcattgttttacaatgataccatgggatgtttaccttctcttatagccatgctatttttgtaccatgctcctttgttagcttgggatataacatgactagatattgaactagggattgcttagccatgcttagttcaactagcacacaatgggggggaatcacattaatgtatagacttcaggttctagtgttgatgttggattagagccaccgtcctggtgttggttaattaaaatatatcatatggtgggctgcgggtgcatggttttgctagtcgcacccatggcaattaaggaccggttcgcgggaaaccctggaagaatccctcatacttaccacaagccagcgtgggcaacggctaggcttgtagtgtagctttcctctagctgatgcatccaggcaagggtgggcgtgatggagtttggatgggccctgcgacggcctatgcggcttttggattcacctaggcacgagaggggactgcccactgccttgcgaggagtgggggtgaaacctgaggtgtggtgtgcttggttagagggggttatgcgaagggtactgtcacggcctctatctagtatgtcgtggtggcatgtcggcgcacggaaacgtgtcgtggggctgtgtcttgtgggtacagttgtacacctctgatcagagtaaaactattcgaatagccatgcccgcgattatgggctgtgatgaggacatcaacaccatcgatacatccacgtccccccatgtacaacatgatggtcctattacccgcgctcgtgcacgtcaactaaattatcaggtgagttctttcttgagttcatattcctcgtctttataccccggagacgcgtgcactcgtgttttactcaggaacgatggagaggacccaaagggaagaggattcgcgcggggtggattcggactgtagggcagcgccaacttctgatggccgccacgacttcatgcgaactccgatttgggtgtgcaagtacttcatggaaagcttatcaagtctactttcaaatggatccagccacatgtccatatctgttctggagcggccgcaattgtcattttactcccgactattttctgtccatggtgctgcgtcacctcttttggcccaatgggctgtgtatccaagttgggcccattaggggcgcgtcctagggtaggagcacgaccctatggtcgttcttcccctcttcttatacctctagtcgccacaaagaacaggcgggttttgatgatagagatagcttcttgctaccggctcgcagcgcgcgtgttggctaaatcgcccgtctgcctgtaatcggaaccccaccatattgtgtttgatagtgaaactttcatctttatctagcaatttcagtgcttgtcctacttgttcttgcttgttcttcgattgcttgcaggacgagtgccctcgtggccgggttgacgcgcacgacaagttcgcggcgaccattggagacggtgtatcggttgctaaggcccagcgtctttggacagttatagtcgggtcgtgaacgtcgacttcatctaattgagttatcccttacctctcatcgaaagatcgggccacaaaccctagcgggttcgcatcaggtggtatcagagcgtggttcatcggtgagagaatttacccttcccttcgtcattaatttttttttcctatagtccagaaaagaccacaaaaaaaaatagtagattagtttttccatgatcctatagaccattgtgccttttcactagtactgcttagctaaggcttgttgagttttcgattgcatcggttgtgttaatttgctggtcttagtgttaggcgattagagtttcgagttcttgccaccaccgcacatcgccaccttcatcaattttgccgtcatcaccaccgtcaccaccgtcgcagtcacccaccaaatcactttctatttgtgtttgatctgttgccgatagcttttgttagttgccttgtatcctgccaccactagaaaggaaatagaaccctgattcgagtgaccttccttaaaacagtcatatctttttcatacggactcgaaattaggcttataatatatccacggacatttacaaaaaaagttacatccgattctccccgctttgtcgggttcggcaaatttaaaatcgccaaattcctcttgcaaaattctgtttttgtggcgagaagcttcgggacctattcgcatagaactttaaaaaaattctacaagcttcatactttgtccgtttgagataagattttctgtggttggttctagtgtgctcctggttgtgaaaaaaatatcaaaaaaaaagttgtgcctctctcctcagcactagagagagcaagcaaagaaaaaaaagaggatccagcgagcacaccacatgtacaggaggttctaaatccgagcagatgtaaactctatgcacaaaatatattccaagatcattatattcaccaaagatgtgaaatataacattggttggatatggcaaatcagacttagcaaataatttctccttgaaattatcgagctcacaaaaatcatcaaactgaacatagcccaaagtatttaaagaagatctcaattcacgctcctctacttcattagcaatgtgaacaacatgcttaaaatcagtgcagtatgaattaacagtaggaatagcatgttcattcacaagttgtggcatggatataagtgaagcattatcgcataactcttctttatcacaaggaacagcaaacaaatcaatttgtgacaaaggaatctcagcagttggttccactaatggttgctctgctatagcatgaaaagtggacaaattcaattcattaacaacacactcacctttattaatttcagcaccattaagtttacctttgatgccctctttagataatggaggtgcctcgactttgagtgtgatcaatgggactggcggctctttcatgtctctctcctccttttcatgattatgcacttcctgcaaatggttagtaatagaagacaaaaacatagcatgttgcttcttcatgtcctcctctattttactttcagcattgcaagcaagttgtaacaaatgagaaagagatgtatatctttgacaatcaagcatgtcctgaatttctttgttaagcccacataaaaacctcaattctttagcttcttcgcattcatctaaaccacaacgtaataaacaagcttgcatatcatgatagtatgaagtaacagttctggtatcttgttttaaacattgcagtttgttgaacaaaatgtcagcataatacatgggaacataaacatctctgaaatatcgtttcaggtctttccaagattgtggtattttgttatgcctacaaagatgtttccaatcattagaagcatgtttaattaaaacactagaggcacacataaccttttgtttctccgacaagacatgcttttgaaattcactatcaaccgctagctcccaattaatgtaagcacgaggatcatagtctccctcgaaataaggcagtgcagatttgatcttacctagaacatcatcacttacctcataatggtcatgttgatccctcctcatgtctcgacgaagatgtcgatgttgagcgcagctatccccaattatcttgcgtatccctgccattgttagtagaaaacaagaaacatacacaaaaatatgcgcgttcctattaactactaggtagtggcagctcaaaaatcacagacactcaagcttttaaccaagctcttacaagatcttaccaatgcaagtggaatggtgacatacaccgactcaaccaagcaccccaatgaaggttggatgtatcgatgccttggcaaacacttgcggtacagctgtaatcaaatatgtggagctctgggtaggcttaaatatgtagcaaaggaatagcaaatgctcaaatcagataatgcaaagttgaataattgttcaaagtcaagtaccgtgctggtcctaggctagaacgtactagagacgcgagcctagacacaaacgatatcacaagatagcactaggaacaactcatgcacaactctgatatatgaagttcagctcaaacataacagtattttctcttttctttctttcttctttcttcttttcttttttttttctttccttttcttttctgtttttttttggtgcggctttttttttcttttttttgcacctttctgcctttttttcacttttttcttgattttttttaacaaaaactgactcaaggaccttaatgtaagattacagggactcaaacataaatataaaatttacagggactcaaatgtaaaagtctaaacccaaaattaaaattatacaaaaaatggaatgctgaatttatgccggttccgtttttccaaacagatctcgaaaccgacaccaaacaaaaattcgccaaggtgtttgacacaactcggaaccgtggaagagagggagggagtcggactcggccaaaggggcgagtgggactcggccaggaggtggagtggatggcagccgaatttggtgtatgggataaaaaggaaactgatttttaaccaatccaatctactatatctttccaaaacaatcttgactacttccaaaatcagatatggtaattcaccttcctcctctcgtgcacgacacaggcacggccaaaacaaacacacacaaggatcggcaaactctagatgcaactcaagaactccaaaactaaccgacagaaacttctgaaaactacaaaaatagaaccgtggcagcgagccgattccgttttcgtaggtcccgacaacaacagagacacggtggcagcgacgactgtggtacaaaacgtgaccagaactcgaaactctaaacgaactagacgctaagaccagcaacacgacgtgacgatgcaacacaaaattcaacaaagcaaaaactgaaaagaacaatgcaatggcacaatatggctaggtaaatgatacgaatttttttgtatggctattttctggttataggaagataaaaactcaccgagcaacgaaagctctgataccacctgatgaaccctgagttcctctcgacactcaaggctgttgttggcccgatctttcggtgagttgtgataactacgatttgggagaaacgttgacgatccgactacaaccgtacgagacgttgtgttgcgccttagcgatcgatacacctctccgtgggttgctgatcttgccggtgcagatcaaccctattcctgcaagcaaatcgaagaaacaagcaagaacaagataaaagcaatctgatattgcaaataggaatttaatacaaatgataagttggggttccgaagaacaagcagacggacggtctagccgacacgcgcgctgcaagcaagtagcaatggctaaactttaatctaacaaaacccgagaaaccctgaaggggtaactagctatatataggggtgggaggacgacctaggggtgcctagggtcgtgctccaccagcttggggcgcaccccacatgggccccacctgggccggggtcccaaatgaagttacaagcccataggcccattataggtgatgcaacaccttgttcctgtgattctggccacacgagatagaattcagagaagaggctggatctgttagaaagagggctccgagagctttccatcaagtattcacgggccgaaaacggaggtcgtatgcagattcggtggccgtttgaagtcagcagtgtagtaggtggccgaatcggattccagcacttggagtacttgatctcgatatcttcttgttcatccataatgtgagcaatggttgcatccgtggtagccatggtcacatcaacaaacttgggatgctttgaaacgggtcatgcgggctagatttgttccttcttactatgcacgtgacttgctgaatagattgcaacaattgagacagggtgcgaaaagtgtagaggaatattatcaggagttacaaatgggcttgcttcgttgtaatttagaggaaactgaggacgctgccatggctagatttttgggtgggttaaaccgcgagatttatgacatcgtagactataaagattacactaatatgacccgattgtttcatcttgcttgtaaggctgaaagggaagtgcaaggacgacgtgctagtgccaaggctaatttttctgcaggtaaaacttcatcatggcagacacgcaccactcctccggccggccgtactgcttctccatcttccacacccacaaccagtcgagcagcacctcctccatctagtgacaagtcagcggcaaaggccgctcagccagcaccgagtgcttcttcaatggcatccacaggccgaatgagagatgttcagtgccaccgttgcaagggctttgggcatgtgcagcgtgactgccctagcaagcgagttttggtagtcaaaaacgatggtgagtactcctctgctagtgatttcgatgatgatacacttgctttgcttgcggctgaccatgcagataatgagccaccggaagagcacattggggctgctgcatttgcagatcactatgagagcctcattgtgcagcgtgtccttagcgcacaaatggagaaggcggagcaaaatcagcgacacacgttgttccaaacaaagtgtgtcgtcaaagagcgttgttgccgcatgatcattgatggaggtagctgcaacaacttggctagcagcgagatggtggagaagcttgcacttagcaccaaaccgcacccacatccatactacatccaatggctgaacaacagtggtaaggcgaaggtaacaaaactggtgcacattaattttgcaattggaaattaccatgatgttgttgaatgtgatgttgtgcccatgcaagcatgtaatattctgctaggtagaccatggcaatttgatagggattctatgcatcatggtaggtccaaccagtactcttttctgtaccatgataagaaaattgtgttgcatcccatgtctcctgaagatattttgcgtgatgatgttgctaaggctgccaaatccaaatgtgagagtgataaaaaagagcaatctgatggcaagaaacctgagacaatcaatttgaaacccaaatgcttacttgctactaaatctgatattactgagttgattgcatcaccttcagttgcctatgctttggtatgcaaagatgctttgatttcacttcacgatatgcagcattctttgccccctgctgttgctaacattttgcaggagtactctgatgtgtttcccaaggaagtgccaccggggctgccaccggtgcgcggcattgagcatcaaatcgacttgatcccaggtgcttccctaccgaaccgtgcgccataccgaaccaaccctgaggaaaccaaggagattcagcgtcaagttcatgagttgcttgataaagggtatgtacgcgagtctcttagtccatgtgcggttacggtaattttggtaccaaagaaagatggttcatggcgtatgtgtgttgattgtagagctattaataacattaccattcgatatcgtcatcctattcctaggttagatgatatgcttgatgaattgagtggctctattgtgttctccaaagttgatttgcgtagtggttaccaccagattcgtatgaagttgggtgatgaatggaaaacagcatttaaaacgaagtttgggttgtatgagtggttagtgatgccttttggtttaactaatgcacccagcactttcatgaggttgatgaatgaggttttgcgtcctttcattggaaaatttgtggtggtctactttgatgatatcttgatttacagcaagtctatgggtgaacattttaatcatttacgtgctgtttttaatgctcttcgtgatgcacgtttatttggtaaccttgagaagtgcaccttttgcacagatcgagtttcttttcttggctatgttgtaactccgcatgggattgaggttgatcaagccaaggttgaggcaattcagagttggccgactcctaaaacggtctcacaagtgcggagctttctaggactcgcggggttctatcgccgctttgtgcaggatttcagcaccattgctgcaccattgaatgcgcttacaaagaagggagtgcctttcacttggggcacatcacaagagaacgccttccacatgttgaaagataagttgacccatgcacctctcctccaacttcccgattttaataagacttttgaacttgaatgtgatgctagtgggattggattgggtggtgttttgctacaagaaggaaatcctgttgcatattttagtgaaaagttgagtgggcctgttctgaattattctacttatgataaggaattgtatgctcttgtgcgaactttagaaacatggcagcattatttgtggcccaaggaatttgtcatacattctgatcatgagtctttgaagcatattcgtagtcaagggaagctgaaccgtagacatgctaaatgggttgaatttattgaatcttttccttatgttatcaaacacaagaaagggaaggagaacatcattgctgatgctttgtctaggagatacactttgttgacacaacttgactacaagatttttggcctggaaacaatcaaagaccaatatgcgcatgatgctgattttaatgatgtgttgctgcattgtaaggatggaagaacatgaaacaaattcgtcatcaatgatgggtttgttttcagagctaacaagctatgcattccagctagctccgttcgcttgttgttgttccaggaagcgcatggaggcggtttgatgggacattttggtgccaagaagacacatgacatccttgctagtcatttattttggccacagatgcgaagagatgttggcaggttcgttgctcgctgcgctacatgtcaaaaggctaagtcacgcttacatccacatggtttgtatatgcctcttcctgttcctactgttccttgggaagatatttcaatggattttgtgttaggattgcctatgaccaagagggggcgtgatagcatttttgtggttgtggatcgattttctaaaatggcacatttcataccatgtcataaaactgatgatgcttctcatattgctgatttgttctttcgagaaattgttcgcttgcatggtgtgccaaacacaattgtttctgatcgtgacacaaaatttcttagccatttttggagaactttgtgggctaaattgggtactaaacttttgttttctactacttgtcatccccaaactgatggacaaactgaagtggtgaatagaaccttgtctactatgcttagggctgttttgaagaaaaatatcaagatgtgggaagaatgcttgcctcatattgaatttgcttataatcgttccttgcattctactacaaaaatgtgcccatttcagattgtgtatggtttgttgcctcgtgctccaattgatttgatgcctttaccatcttctgaaaaactgaattttgatgctaagcaacgtgctgagttgatgttaaaactgcatgagacaactaaagaaaacatagagcgcatgaatgctaagtataagtttgctggtgacaaaggtagaagggaattgaattttgaacctggagatttggtttggttgcatttgcgaaaagaacgatttcctgatttgagaaagtctaaattgatgcctagagctgatggaccatttaaagtgttagcaaagattaatgagaatgcatataagattgatttgcctgcagacttcggggttagtcccacatttaacgttgcagatttgaagccgtatttgggagaagaagatgagcttgagtcgaggactactctaatgcaagaaggggacgatgatgaggacatcaacaccatcgatacatccacgtccccccatatacagcatgatggtcctattacccgcgctcgtgcacgtcaactaaattatcaggtgagttctttcttgagttcatattcctcgtctttatacctcggagacgcgtgcactcgtgttttactcaggaacgatggagaggatccaaagggaagaggattcgcgcggggtggattcggactgcagggcagcgccaacttctaacggccgccacgacttcatgcgaactccgatttgggcgtgcaagtacttcatggaaagcttatcaagtctactttcaaatggatccagccacatgtccatatctattctggagcggccgcaattgtcattttactcccgactattttttgtccatggtgctgcgtcacctcttttggcccaatgggctgtgtatacatgttgggcccattaggggcgcgtcctagggttggagcacgaccctatggtcgttcttcccctctttttatacctctagtcgccgccaagaacaggcgggttttgatgatagagatagcttcttgctaccggctcgcagcgcgcgtgttggctaaaccgcccgtctgcctgtaatcggaaccccaccatattgtgtttgatagtgaaactttcatctttatctagcaatctcagtgcttgtcctacttgttcttgcttgttctttgattgcttgcaggacgagtgccctcgtggccgggttgatgcgcaccacaagttcgcggcgaccattggagacggtgtatcggttgctaaggcgcagcgtctttggacagttgtagtcgggccgtgaacgtcgacttcatctaatcgagttatcccttacctctcatcgaaagatcgggccacaaaccctagcgggttcgcatcaggaaacatctaattagcataatacttattttccttccctatttctatgaatgcacgcttgattttagcgcacaaaccgcgactaagggtatcgaaattattcctaatttcagcaagctctacccctagctccgcattgcgatccctaagctctatgttctccttgcagagtttcttcacttgtgcagcgagcttatggatcgagggctccggtgatttcacctcgtcttcttggaattggctgggagccctcacaattggagggggcgtcacgtgacgcttcaccttcataggtggagggcttcgggattccgctgccccctccttctccgatgccgtcaaaggccggagtcgacccttaccatacccaccgccgggagttcgcactccctgaatgcggaattgctcctccttcggagtggatggagtagcggtgggtgtggtgtacatctggagcacctcatcccctgtcttagtgaacagggtgcccacatagcgctcggtgggaggcggcgcggccttcccgtcatcttggaaaaggcgacgtgccttcaaaagactgagctctcctgtagtcggccgtcgtgcaggcgaatcccctcgaatttttgtcgttgtgacatagcgagggtagagggatcgcgctgccgaacgggggggccgaacggggccgacaggggttcagccgaactagggagctcgccgacgggctccagattcgcaggggagcgcggcactattgcgaggagctacgccgacagtgcgttcaccccttccatcgtgtattctttgaccggaatgatgaaccctgagttcctctcaacactcaaggctgttgttggcccgatctttcggtgagttgtgataactacgatttaggagaaacgttgacgatccgactacaaccgtacgagacgttgtgttgcgccttagcgatcgatacacctctccgtgggttgttgatcttgccggtgcagatcaaccctattcctgcaagcaaatcgaagaaacaagcaagaacaagaataaagcaatctgatattgcaaataggaatttaatacaaatgataagtggggttccaaagaacaagcagacggacggtctagccgacacgtgcgctgcaagcaagtagcaatggctaaactttaatctaacaaaacccaagaaaccctgaaggggtacctaactatttatagaggtgggaggacgaccaagagggtccaagggtcgtgctccaccagattggggcgcaccccacatgggccccacatgggccagggtcccaaacaaagttacaagcccattggcccaatacaggagacgcagcacctttctttttatgattgcggccaaacgagatagatttccgagatgaggctggatccgttggaaggaggacttcgagagctttccgtcaagtactcacgggcccaaaacggagcacgtatgtagatttggcggccgtttgaattgctctatagtagagcaatatatttggtgcatagagttttcatttgtttggatttagagaaacatgttattgctaatcacactatttcgagtttctctagttttgattggatgaaacaggttattttgaatggactatatgaagaacaccatatggaaaaaccgaggacggttttccgtgaagaaggggaggatgatgtgaccatggctactacggatacatccgttgctcacatcatggatgaacaacaagatatcaagttcgagtcctccaagtgccaaaatccaattcggccacctgctacactgctgacttcaaacggccgccgaagctccatacgacctccgttttcagcccgtgagtacttgatggaaagctctcggagtcctctttccaatgcatcaagcctcattgccaaattccatctcagtcggcagcaactgaagaaacaaggtgctgtgacacctgtaatgggcctatgggcttgtaacctcatttgggaccccggcccaggtggggcccatgtggggtgcgccccaagctggtggagcacgaccctaggcacccctaggtcgtcctcccacccctatatatagctagctaccccttcagggtttcttgggttttgttagattaaagtttagccattgctacttgcttgcagcgcgcgtgtcggctagaccgtccgtctacttgttcttaggaaccccaacttatcatttgtattaaattcctatttgcaatatcagattgcttttatcttgttcttgcttgtttcttcgatttgcttgcaggaatagggttgatctgcaccggcaagatcagcaacccacggagaggtgtatcgatcgctaaggcgcaacacaacgtctcgtacggttgtagtcggatcgtcaacgtttctcccaaatcgtagttatcacaactcaccgaaagatcgggccaacaacagccttgagtgtcgagaggaactcagggttcatcaggtttgccggtgttggctctccggtgagattttatgtggaattggatgaagagccgatgaatggaatcaaggatttgccagccattggtgagttagagatgatggagcaagggaattgggttgagatagtgagaagggttgcaaaatgttggagagaggagaaagaataggggctctagttctggtacgactgatctacctccgaactcgcatctaaaacagattcaggacaagcaggggagactaccgttcaaaaatggggctgaacgggcgccgccctggttcggccgaaccctagtgggtccggtaggccaacaaaattttcctgggcccactaaaacctattctaagtacaaaaacgacaactatacagggttttaagcatgcattagatgagatcaccatggttcataatcgattaattcaatgacatccacttcttcatctagaatttcatttggctcaaggaaaatctttaggcgttgatcgtttaccttaaatatgttacctgattcgtcgctgagtgtgattgccccgtgcgaagaggtgtcgatgacgtcaaacggtccttcccatttgctgcgcagttttccgtggccgaaaacttaaccctagagttgaacatcagtactttgtctcttggcttgcatttcttgatttttatccttttgtcatgccaacgcttcatcctttctttatatgagtatgctctatgctcaagttctacgggtagtcgacatgacttctcgtagactatctgatatggggacattccaatgggtgtcttgtatgctgtccggtatgcccacagtgcgtccggcaatctatccttccatcctgttcccattttgttgaccatcttttgcagaatattcttgatttgtttgttcgatgtttctgcttgaccactggtctatggatggtaaggagtggccacattgtgtttggctcccatctcttgtaggaggtctcagaaggttttgtcaatgaagtgagagcctccgtcacttacgaccatcctgggggtaccaaatcttgggaagatgatttatgtgaacatcttcttagcatgcctcgcatctgcggcgctgcacggcatagcctcaacccacttggagacatagtcgactgccaccagaatgtactcgcagttgcgagacttagggaaaggtcccatgaagtctataccccaaacatcgattatctcgacttgcaaattgtatgtaaggggcattgcatcgtgagcagtgattcctccttccctctggcagcttgtgcatcttctgacgaattcttttcaatcttcgtacattgttggcaagaagaaaccactttgccaaatcttggcctgggtgcggaatgcaccgtaatggccaccatagggtgaggcatggcatcgttctatgatcttaagtccttcttcagttggcacacatcttcgtagtaagccatcggagtagacccgatataggtatggctcatcccatatatgatggtgactttcatacttcagttttcgttgattttcccctagtggtatgtacttggataccatgtagtttactatgttagcataccacgggttggagtcgcgaaccgtcatcagcatgtcgtctctcaagaaatcatttatcggctgttagtgcatgttagtgatctgcagtctggacaaatgatctgctatggaattttctactccctttttatctttaatttctaagtcaaattcttggagcagcaaaatccatcttaagagacgtggtttagcatctttcttagtgagcaggtatttcaaagcagcatgatcagtataaattatcaccttggctcctactaagtaagatctaaacttatagatagcaaaaacaaccgtgagcggctctttttcagtagttgtataattcaactgagctcccgttagagttttgctagcataacagattgcatgatgattattatccttggtttggcccaagaccgcaccaacagcaaagtcacttgcatcacacatgatctcgaagggcagagtccaatcaggaggttggatgattggagcagagacgagtgcctttttgagaatttcaaaagattttaggcatgcgtcatcgaactcaatgggcgcatccttggctagcaaattggtcagaggcctggctattgtagaaaagtccttgatgaaccttctataaaagccagcatgtcccaagaaactgcggattcctttgatgttcacaggaggaggaagctgatctataacatcaattttagcacgatcaacttcaattccttgctcggacactcgatgcccaagaactatcccttcacggaccatgaaatggcacttttcccaattaagcaccaggtccttttcttggcatcgttgtaagactttgtctagattctgcagacaatggccaaaagtctttccataaactgagaagtcatccatgaagacttccatgatgtcttcgatcatgtctgagaaaacagacatcatacatctttggaaagatgcaggagcgttgcacagtctgaaggacatcctacggtatgcataggtgctgtagggacatgtgaacgtagtcttactctggtcctccggatggataggaatatgatgatatccggaatacccatcaaggaaatagaaaaaggaatgatttgtcagccgttccaacatttcatcaatgaagggaagcgggtaatgatccttttttgtagccttgttaagtttcttgtagtcgatgcacatcctccatccggttacggttcgttgcggaattagttcattttgagcatttgcaacgaccgtcattcctcccttgttcagcacaacctggactgggctaacccactcactgtatggtacgggataaataatcctggcatgcaggagtttcaagacctctttctttacaacctctcgcattgcattattgagccattgttgaggttccctggagggagtactctcggggggtcaataggaatacgatgggtgcaaagcacaggattaatccccctaaggtcttggagcgagtagccaagaacagaacgatgcttctctaatacggtgagcagacgttgagtctcgtcttcggagagtttatcactgaatataacaaggggcctctctgtcattgtgtaacaagtcgaaaatcttatcagccttggtgatatcaaagtcaaatctttcctctttcccaaaactcctcacccatgggcatagcacaacctttttgcttctaacccactcggctgctgctacttcagtattatcctcttcatccgaaccatacatgtaaggatacacatgattaattttcttgaaattcttcttggcctctgcaaacctatgctcgtgcagagttaccttctgtgcaaggtgagatatgctttcaaactcctggaatgaaaatttctctttaatcggagctatcaaaccctgaaaagccaaatcggctagctgagaatctgttagcagattgatgttttgtccaccatgctgtggttgttctcttgtcaacaaccgaggattggtcatttgcctatgtgccgatgatggtgcagcttgtgcagccggagcagaagttgtaaccggtgccatcggttgagttgatggtgtgttagaagaaccctgttgattgcctgtaatcaaaggcctataatttggaaaagcaccacctggcaaatacactggtcctgtaacttgatgctcagctattgtgccatcaaccactattttcaccatgttgaaagtattgactaagactcctgactgattgatcaaagcatgttgcacagcgtagtcaatccaatcttggaagttgttaaactgtggttgtaatccactaacatttggaccaagatcttcaaccatgccctcctgaaaaccaccacctttgtcgcctggttcaccagcagtacctttatagccttgagatgagcttgaaccaacttcatcggcagcaaccactttcagcttgtatttttggacaattgtcccttggcgggtttctttgaatgaattaatgaacttgtccttcacgctgctcatcatctgttcaagctccttcctgtgttcagccgacaatttgtctagtgtgactggaataatatttctttcatgaacttcagacccgactggatttggaggcttgttttgaggatctgttgacttcgtagcttgcttgtcccctgacatgtttatcgggtcccactgggcatgccaaaagcgtgttgatgtaaaaaacacgaggcctggaagatctgcttaacttcagtgcaggtccaaaaatcttgcttttatgttcgtgagcgtaccagctgatttgatcctggaatcaacaagagataaagacaaagaaaccgtggttaaatccataaatgatagccaatcggctagttgccgatgacatatcatttatctctgagccgatgtcatatttgaatcgatcgacagatataaacaagcaagaaagaactaaatctactcaatcggctgtagatattaacaatatataatccttatgtcgatatatacttaaatgaagtgattgggatagatcgatcgccatgccgagacagtataaaccacttagattgaaatatatattaacaatattatatatgttcatagcatagccgatcagatagatctagcatgtatcggctaatactccgataccacttgatactaagatattaaagcaagtaaaatatatcaaacagaagtgtaatatacctagatgcaacaagatcttaacataaagggcaaatctagcatgtcgattaagcacatgaaatataaggctaaattaggtaagatcggctgaaaccccgataatactctaatcagcaaccaagaagcaggctagagactgagattctaatcacgacttataaggtcaaactcaattgatgcagctataagtatgaaaagaagaacaatatctagacaatcaagccgttggatgtttcatagagtggtggatgtcctgtacaatctaagtcaacatagatatttgacttaatcggctgccttcaataatagacatttagccgattgaaggttagataacgatattgtcgaagattatacagaatatatgacaactcgatgaattacataaacaagattagagtatcataaagatggaagcactaatcccgagaacgcaagccactataataagttttacctcttgttgaagatagaaaccgatgtagctcaacccgaaagtaagaactcgtcgaaacaaaacgaaagtaaagggtggcgatgcgccgagattatattgaacgtgtattagattcattacatggggctcggggtctatttatacccgagattacaaaatatatccatgtcggacacgactcttacctctaacaaactctaagataccataagtctttgcggcagacttttgcccaaacatatctctaaggaaattacatgaaatatcctaattaatagatacaattgccttctcaagactcaatccgtgcatggcaatcctcatgaagcacattaactcaacccgacaacgtgtactgcgtcacattgtcggactcggctcaatcggctaaccttgtccaactcggactctgccgatcccagttgcagccgattcggactttagccgtgccttttcttatcctaccatctaataaggcttatgtggagctcagggtatggaaaagagtagagcattacttgcttcacatatattgcgaagtcaaataatgcatccacggaaatacaagacatactttctagtcaagaatgtgcatgtgtatgtgtatggtgaatttgtgggtggaaaatggaaaataaaaataacttcttttgtatacctcctccatttattctcttttgaattttgggagagtgcatggctatctccttattttcttttcctctttttttttctcatcatcatgctccatacttgtatgagcaccttttttttctttctttttcatagccatgcttctctctcttttttcttttttttgaaagaacattggaggaagaggcataaatgacatggagtatttatttttgtggaagatggacaaaatgaatgacaaatgaggaatgctaacttccggtgtagaagttaagcattggtgggtgtatgtggagtgtatgtgatattgaccatgaaagtatgaaaagcatttcactagggtcacaaaacttgacaacgctcaatataatgacaggcagcgtatgtagcaagctaatcatgaatgatcaacctatggctctagtgggaataaaaatattaatgaggagtttagcatcgttatatatttttttcttttttataaaattcccaagtgcacaacatgaagagcaggatttccatcatcagactatatctcattcatcaattacctagatagcatggggtccctattggataagtcaccacaagcaacaagtaatgagcaaagaataataggcatgcatgctattttcagggaaccaagaactctaattgtaccatccatagcttgggttcaattatcttagatattttagaattgatgatcaaattgaactcaagatagaatggatgtccaaaggaaaaattgtgcaaacctgcgctctgtataaaacagaggacgattcatggtagaggtggttcagccgaactggagatttggctgacccctcattggttctgatcgcaacaatttcccttgtgtggttcgtcatgactcatcactcctggggtgatcttgctttggttacggtgttgatgtgcaagataaccccacacttgtctttttacctgggactctttattgaacacaaaaagaaaaacaaagacacgagtgaagcaaaaatgactcacttggttcgaagaccaaggagccaactttattttattttattatcatttttttatttttttattttatggcaacaatggatatggtgggtatcttggcaggatggagacatgagatgaggatgcacatggtgtatgagattcctaccagataggtcttaccatgatttgaaccgaatgcaagaatgcaacaagttttgcatttgttctacttggctccctgtgcatatcttttctcatggacaaggagtgtgatataagtgtttgaagtttttgtacattgctctttgattgcctttttatttcctgcaaaaggttagtggacaacaaatactagagggactacaaagatttgaaaatattttatcatagcctcaagattaattgttcacatccacgctaaaatgaaattggattcaaaacttaagaagcgtggatccgacaagtttgccaacattttattttatttttcgagagacagtccttttttttatcctaaaaacatttttttccaatttttactattcaccaaattttcgtttaagcacaactcatacaaggctttagttaaaattgcacgaacataacaaaggaacattcaacagtatacttaccgtgcactttgaatggtgatgtgttcatcctttgcatgtctgcaatttactgatttgtttctcgagccctgacttacctccagtgtgaattgaacttgaggactcacccgtcagtttgaaaactttcctgcaggggttatgatgagcacccggcaacgagcgccccgatttcccctctctttcacggtacaaattagctgttgtaaataaataaccaatatagccttgctcagataaaacgatgcagcaatccaatcacgtgaaactctaccaaaatcaacaggtaagctcctcgacccgtgcaacaacaatacaggaacagagagaagatggaactcacaggaaccgaaggaactcagccagaaaaacagatctctagccatgttcttccttctagatccaccagcggcggcaaagaaaatcaatagcagggagatgatgtgagcgccatcaccacagtacgatagggaaaaacaaaccctgaacgactcaaccaaaataaaatcctcccctgttacagggcagatcagcccttaataaaaggagcacgcaggcccagatgaagtctgttcggactcaatatcgcgaccgagaaaatttgcattttcccgaacgctagtgtattaatccccgtcccaggaaaagccggggtacaccatacaaacatgataaaaaaggcacgtctttattatattgataatatttacattattacaaaggcacttcaggcctgacaatcgaaaataaacagcagcggactagcgggcctacggctccatcttcacgggcgctcaactaggatataagcgaggactccacctaggacttcttctccaaagcttctcttactgaaggggggagagatagagcaagaatgagtacaaccacagtactcagcaagtcaatccgggagatgcatgataatgcaagggggtacaaggagtaataataatagggttgggttttgcagtaaagagcatttaaaagacacttagttgctcaaagctattttgtaaagacgatcctagagctacacagtattattaatcaaggccgtggacccacacgaacctgccttaacccaaggcctatgatgattcagaccgaactggcaacccgacctgggtcccagctcgtcccaagccaacccaggccaaccattccatattttagttttgaagaaaattttaagaattaaaccactaacttgggtacattgctaggcttgcccatatccgagggcacggctattcgaatagatttactctgatcagaggtgtacatctttacccacaagacacatctttactccgcattccatggccttggaacccgtcgtaaacatgtgacataacccttcacccatcctagccgtgaacaaaagtaccgacccaaccctgcctacggccagtatcccgggacaggcaggccaggattgagcccctagcaacaggatctagaccgggtgcgccacacgcataggggtgagaccacccgtgtactagtccagtgccatggcatctcgactaacgggcaccgacccgtgtagtcttcatttgcctagacatctcgattaccgagccgcagctcgtgtagccttcatttgcctcagagatatccatcgttgcaatgacttcatccatctctatccatgtccttttgttcaggactagactgagcaccgagttaagccttacccattagacatgtggttagtacggtagtgctttgcaacagaggcccgaagaccggtccttatagtggccgaggtgctactagcaaaaccctgcacctcgagcccagcctaaaaccattttgggagttttgaatagaggggggaggggtgtgttcaattccatcacaagccaaccattccacagtgtccaaatgatatgagaattcccaaagtctaaagttataaaaccacctattgttgcctaattaatcagcgaagcatctacctaaattcatactagtggaaccataaatagagtacccactagttggggttttgtttatcctagggtgaacaaggtaataataacaatagcaataataataaggtcataacaaaggtaaataggcatggctaagtaaaacagtgataacgcgggaatttaagtaaagcggtaatgcaataatttaaatcaaaataattttataaactgggattcaatgtgctcaagggtgatgcgacttgccttgctcagagagaacggccttccgaaccttcggcgacgaccgcgaaccacgcttcgagaaccttcggaacaacagaagctacgtgaagcacacaagcaaagctacaagcctataaagaagcaataacaatacataaaaagaaagcacacagttctttaggttataacaaacattaggagacttgaacgggtcgattcagggttcgtatgaccaagatatgatcatccgaagtttaatgctgttacatggagatttacggattaatatgattaggtttgcaattataaaacatgtgtaagcgctagcctggaaaagataggaaggctgcgccgttgacatgcggaccccacatgtcaacctaaaggaccgcggtagaccgagtacacagagacggtccacgggtcgacggaagcgaaccccgtgtatcaaccgaggcgagtggccgacaaacggactccactagacaccacgcgggctgcacacgtggaaacaacgcggctatcgagcgggcacactaacacggtcaccacacgcacacacgaacgactaccgacaccggtacaagggtaccggggtcgacacccgcacaacgggcacggggcgacaccgaaaggacgaggacggggcagcgagaggaggcacccttaccaccacgcgacgaggcgtgggaacgacaacgacgaacgggcgcggcggagacagctcggggacgacggaggcgaacggcgagggaacgacttcggcggctatccttggacgaaggcgagacacggccggcacgaggtttgacgacgcggagccgaggatgaagacgacgacggggctgcagtggctcactggacggacgcggacgacggacgagaacggcttgacggagggacgaacgccacgacgatcgggaacgacaagaggacgacgacaaagacgaccgaggtcggcgaggaggcgacaagggcagccagcagcactgcacggatgtgaggacggcgcggaacatgccgttgcgaatccgacgacggaggcggcgcagcgagacaacgagccggcgaggaggaacgatgacgatgacgacgaacaccggcggggttcagccgaaggggaggcgatgccaaggacgacgtcgtggctgcgatgccgaaggtggtggaggtgccgccgatcggtgcacgggcgaggagggacgggcggccgaacaactccggcgaggtggatggagaggttcgcgccgatgtgcggcagcttccgggcgaaaccaaggggtggacgaggtggagggctacgtcaccgtgccaagggaggggacggcagcgccggctgacgcatgggcacggcgtaaggggctgccggaggagacgtcgacgaggaggaaggagaggccggcgcgggcgacggcgtttcggcgaaattcgggcgacgccgtggcctggccgggaaagaggacggtgctctggtgccgggagaggtggtggcgacgtcagccggcgcacagggggcgtggcagaggcggccggaggcggaacagtggcggcaacaccactgttgccggcggggatgcacttccggaggtctccgcgggaaacagagggcaggccggcgaagaggaggcggctgcgatgctggaggaggcgatggcacggccggccggcgtgctgacgcggcggcaggggcggctgaagatggccggcggcacgggagagagaggaggacggcggagaggggtggtgaggccacgggagaacgcgggagggggctaaaactggagaacgaatcaagggggtttcattttataggggaggagaggagccggccacgggagaggcggggaacggcggctgaattcgtggccggcggccatggaaggtggccggggttggtgcgggcgttcccgacgattgggggcacgaatcaagggggaaattggggggaattgaagaggaaggaaaggggattaattccccctaatcaattttggaattcccggtttgaatcgcgtggattttggggaggaatggcgctaggtttccgggagacagagagaggaggccgggcgggaggaggaagacgaccagcgcgtgggccccacgcgggcgcgcggtcagcgcgcgtgcggcgcgcgtcgggggggggcggctcaggaggctgggtcggctgggtggggcggggagggaaaagggagctaggccgagggggaaggggaggcccaagagaaggagggagagaaggagagggagagaaagagaggactttggccgcgggccgagagagagagagagagaggactttgggccagacttagcccaaaggaggaaggaggattatttttaggtttttctttttaataaactttggtaattgttgttgttgcttaataaataattccgttgctctgaaaattcaagttaaatttgagggctcattttagaccaaggagaatttaacaaaaattctccgggccacattcgaatttttcttgtacgtattttagtgttaaccaatttcttttcgaattttaattaattctattattccttttagagaatgatttttatttcgggatgaatttatcaggacgtgacactcaactaataaaaatagtaaaatgtactaattactttggtaatccagccgctaatgaccatattaatgatagttggttaattagcctatcggtacaggaaccgaacctatatatatatatattctttgaattgctactgcacggccacttgtatttctccaaccaaaaatgcccgggtcgtggacacatcatcctttccctcttgaaacaaagccatccatggctttggattaattggagacaattctttctttttctttacaaccggaaataccactgacttgatagcactatcttgtattggtttcagcacatgtttacaccaagatgcataaaagaatagtgattactccggccctcatgcgttgcattaagatcaaactaccacggtcttcccaaaagcaagttacaagtattcatcggcactacatcacaatctactttatcaacatagtttccaatagaaaatgcaaccctcaccttgtgagtaattttcagtgtacctgcttgattcatccactgaatataacatggtgcacgaagccttcatgtagataaagataaagcatgcaccaaatctgaactgatagcattagtgaaactaccaccatcaattattaatttgcataccttttcttgtattttgcactctgactgaaaaatattataacgctgcccctttacatcaacactagagccatctcgttgtactgcacgtgcaagcatagataaaccattcttcttttcagcaccatcatccatagatgaatcatcaatatctcgatagcctgcagtaagagtatgatcaagttgtacaccttctgaattttctgataaactctcagaaacatagccttctttagtcatcaacaccttcttctgattaggacaatctctcatataatgtcctctccctccacaagtataacactctacactgcgtgatttataaccagatgcaggagtagattcaactttagattgggatttactcaccgaactagcagcaggtttagactctagaaggagtagtcggcttgaaagacaccgatttactagcggcacttccatcaccatctcgctgaaagaacgtgaacggctagtgtggcgacttgttagttgctgttccaccctttgagcaatgtgcaccatactttgtatatcataataatatgatatctcaacacgttctttcacatcatcattgagaccattaagaaatctaaccatagtagcttcatcattctctgatacccctatacggctcattaacaattccatctccttatagtaagcatccacactaagatcaccttgtttgagttgctgcaagcgtgtatacaaagatctattataatgttcaagaacaaaacggcgagccataacctctttcatatattgccaagtatgtggacgaccaaaacgtaccaattgattccaccaagataaagcataacaggtgaattcaatagatgcaagacgtaccttcttatcctatgaatagttgtgactattaaagatctgatcacaacgcatctcccacgccagataatcctccgaatctccagaacccgaaaaagcaggcatggaagtttttatcttgccaagcccttcatccaacggaacacgagcagatcgacgattccgattgtcacggtgaatatcatcaacaaccctatccataaaagcaggacctcggcagtgaggttgtcgaggacggcgatgatgatcacctccatcagaacgcaagcctagactctcatcccccgcatcatactcatgatgttcaggtggtggacatcgaccctgtctagcatgttcctaacgtggcggtggcaaacgatcgactaacatagcaatactcctctcaagcttcgtgaatttctgatttatacatttatcaaaataatcacaagcactttccaatccatccttaactccggcaggcaagttagcatcaaaaacaggcatagtaacctcttcctcatcagaaccatggtgagaaccaccactacttttagaacctccaaatttaaccatgatgcaaaatctgaaatttagcaaaataactcaattgtaccgtgatgaaccatgctctgataccacttgatgagcacccggcagcgagcgccctgatttcccctctcttttacggtacaaattagctggtgtaaatatataaccaatatagccttgctcagataaaacgatgcagcaatccaatcacgtgaaactctaccaaaatcaacaggtaagctcctccacccgtgcaacaacaatacacgaacagagagaagttggaactcacaagaaccgaaggaactcagccaaaaaaacagatctccagccacgttcttccttctagatccaccagcggtggcaaagaaaatcaatagtagggagatgaagggagcgccatcaccacagtacgatagggaaaaacaaaccctaaacgactcaaccaaaataaaatcctcccctgttacagggcagatcagcccttaataaaaggagcacgcaggcccacatgaagtctgttcggactcaactaataaaaatagtaaaatgtactaattactttggtaatccagccgctaatgaccatattaatgatagttggttaattagcctatcggtacaggaactgaacctatatttatatattctttgaattgctcctgcacggccacttgtatttctccaaccaaaaatgcccgggtcttggacacatcaggttagtccacagcaaatatatgtccaatgtccatgaacatatttactctgagagttcattaatcaaactcgactccatgtctaatttgattaaagtagtctagtttaacctaagcaccatgcttaatttaaaaagcctatggatgtctcgcgaaaacacccaagccagagcatatgcaaatagacataagaaacaaaaccatgtatactcaagtctcattcaaatagagataagtatgagtaaaagatgcggtgaatctttttctgcctttcgtatacctgagtgtacttaccgccagcatgatgtgtatgttgaaacctctggagcggtggtatggtcacatatgattgtcgatttctcctccatcgcaatgtagattgtagcggaggaaggcacttttaccatactaaggcgagctgtttggttatgcacacatctcaggtgcaatatccttgtgccttgaaggcgtgatccgttggcacaatgctgtagagacgtaggatacctctctttttggcaaaatgtgcaactgccaactggagtagagcagcaaacgcctagaaaagaagagggcaactcctcttgcttgtatgcgcgtaggtgctgcgggagcgagaagttgtgcatagctaggagcagacgaaggctgagccaaggcggcacatgagctcgagagagggactagttgtagccaggtagcatgattcctactagcgaggtgtatagttacatttcaaagacacgcacgtaatgcgccttttgatccaaatgtagctcttcagctctcttgctcttttcttcttctcctatttttttcttttcttttatctctcttttctcctcttttttttatcttctttttttttctttttttagcaagctaggactaacaccaacttcaaaccaagatggccttggttgatggaactcatcatgaaaagctcgtcgaccttcccccccacacttggtcttttgtgttgcaagacatcaaaaaccaagtgtgtgatgtcggattctcctatggagcgtgttccaatacctaggatcaccaaagtatacagttgatgtagctaccgagttcttaggcatcgcatgaccctcgttcttaatctcaacctgaaatggttagcgaccaagaatacctgaagctgcatataatcctagaaactggttcttgcttttattagaaagaaagcttaccatgataatccggggtatctcccggcagtgctttgtttatggtcacaagctcgacctttgggacattgctctgcaggattagtgccacaaacaaatacgagatttgcagtatttatgataaacataagcatccacaaccacacttctaaacatgttagaaatgaggaccgagaggtggttgtggtcctcacacaggaaagtggtaataatcgaacaggactctggggattccttctgtgagcatgaatcctacgggattttgaaagagaaactttcaagctcatatgtggaatgttttctctcgtcctccagagtcgatgtcgtaagcttgtccgtggcctgaaggttctccttctcaagagatgcatcgtgcaagaactgggttgtttcttgatgataaataagaacaacgttctgaaggccagagggacaaggcataggtttcatcgagggtgatgaggatcgttcagtttcatgaagatgggcaataggttctgaagaaacgaacgaagataaaaacatcacctcctcgaacggctcatgcttgggatgagccttgattttgctggaataattcagggtgttctcacaatcttcataaagatcatcgctgaattggaatggaatttccggaggatgaattttttcttcttccggctccagcaactggaatgaggattcggcagttgagtcgggttccgactccacgtgaagaggatcctcataggtaatctcgacctccgggatggcttcgctttggctgaaagaatcgttctctaagatcaaatctaagagttatcttccttcggcggttgtcttgtgtgcgaacaatcctccagcggaaatatcgagatttgcggcagactccttgtctaacccatatcgaaaatgttgaaacaacacatggtcgggtaaggacaagtctgggccagattgagttaacagtgagaacctggcccaagctgcaccgagagattccttctcattctgtcggaaagagaggatgtctaatcaaaaattaattagacgggttaatggaaggaaagcaaggcagaatttgtagttaagctccccccattcaccgtggaatttcttgacagacagagtgtaccattgcttcgcttcatctctaagagaaaaaggaaacaatttccactttagagtttcatgtgtcatgcctacgatggataaacatgaacacactagctcaaagtcccgaagatggaggtatg

SEQ ID NO: 26294 - DNA, 1019 bp, Oryza sativa
attccggtgcatactacctactcagggaagaggttagcagaactttatctgacaagaatcatgtgtttacatggggtacctaagaagatagtgtctgatcgagggagccaattcacttcaaagttctagcagaaattacaagaggaattgggaacccttctgaacttcagcactgcttaccatccacaaacagatggctagaccgagcgagtcaatcaatgtcacgcccggaatttctatccaaaattccaaacgcttacatgtgtgtaaaccctcgtccaggaatcagccgaggcacacaataacaaattgataatagagtaccattattactctaattaataagcgaataaaatgtcattacagaggtagatagttcctctcaatcaataaagatctaagcagcggaaaataagataaacggcgcagacgactccactccacaggcagcttgactagggctacacctaatcctccacaccatcagcatcattgtagaactcttcctctgatgaatgattgcaaggtgagtatacgacatatgaatttttgaagatttaatcggattaaaacacttatatagattttaattgaattatgacgcaataatgaattatttttgaaaaggaaaaagggaattattgcgtcagcggctagggtttgcggtggaccgggcgcacggcagcggttcacgggaacggacggccgagattgatccatccaaaacggacggccgagatcgagcggatctacggcggctcacggcagacggccacgatgacgtcggcgatgacgtcatcaccggcggcgactcgggcggctcgggcgcgcatgctcgccggcgaacgacggcacgacgacgcgaacggagggcaccaggacgatgcgggcatcgcggcgaactcaccggtgaccaaagcaacggcggaggatgaacggacggcggcggcgttgaagaaaaaggcgggggagttcttcggtttgacgacgacagcgatgctccggcggtctaccgcgac

SEQ ID NO: 26295 - DNA, 5515 bp, Oryza sativa
aagataccaatgcgagttcatactcctggaggtggcatgaccacaactcactactgcccatcaatgacagttgaaattcaagggttgatttttccagccaacctcattcttcttgagtccaaggaccttgatgtcattcttggaatggattggttgacacggtacagaggagtgattgattgtgctagccgcaccatcaagttaaccaatgcgaaaggagaagtggtaaccttccagtctccagtgccgcagaagccagggatcagtttaaaccaggctgctggtgaagaacaagaggtagcagtggagaaaaccactaagaagttggaggatattcctatagtcagagagtatccagaggtttttccggatgatctgacaacaatgccaccaaaaagggatatcgagttccggattgacttggtacctagaactgcaccgatccacaagaggccttacagaatgagagccaacgagttggcggaagtcaagaaccaagttgatgaacagttacagaagggatacattcgcccgagcacgtcgccttggggtgctctagttatctttgtggaaaagaaagataaaaccaaaaggatgtgcgtcgactaccgcgcactcaatgaggtcactattaagaacaagtatccgttgccaagaattgatgatctgtttgatcagttgaaaggagctactgtgttctctaagatagacctacgatcaggctatcaccagttgaggatccgcgaagaggatattccaaagacagcattcatcgctcggtaagggttgttcgaatgcacagttatgtctttcggactcactaatgcacctgctttcttcatgaatttgatgaacaaggtgtttatggaatttctagacaagtttgtcgtggttttcatcgatgacatacttatctactccaagtccgaggaagagcatgagcagcatctccgactagtacttgaaaagttaaaagagcaccagctatatgccaagttcagcaagtgtgacttttggcttaaggaagttcagtttctcggtcacatcgtgaatgctcaaggagtagctgtggatccagcaaatgtggagtcagttaccaaatggaccccaccaaggacagtcactcaggttcagagtttcttatgacttgcgggctattaccgccgtttcattgagaacttctctaaaattgctaagccaatgacacagctattgaagaaggaagaaaaatttatctggtctgctgaatgcaataggagttttgaagaactcaaacgacggttggtgtctgcaccagtcttaatcctgcctgatcagacgaaagttttacaggtctattgtgatgcatctcgtcaggggctaggatgtgtgttgatgcaggatggcaaagtggtttcttatgcttcatggcagttgcgtcctcatgaaggcaactacccgacgcatgatctggaattggccgcagttgttcatgctttaaagatttggtggcactatctcatcggtaaccgttgtgaggtatatacagatcacaaaagtctaaagtacatcttcactcaacctgatttgaatctcagacagcgaagatggttagagctaatcaacgattatgatatgggaatacattatcatcccggcaaggctaatgtggttgcagatgccttgagcaggaagagctactgcaatgttgcatgggtagagcaactatgttgtgaggttcaatgtgatttggaacatctgaaccttggtatagttgagcacggattcgtggctgccctagaggcacaacccacactggtggagcaggttcgcatagctcaagcaagtgaccctaaaatagcagagctcaaaaagaacatgagagttggaaaagcccgaggttttgttgaggatgaacaaggaacaatctggatgggggaaagattgtgtgtacctgaaaacaaggagttaaaggacttgataatgacagaagctcatcaaactcagtattccattcatcctggcagtaccaagatgtaccaagacctcaaagaaaaattctggtgggtcaacatgagaagggaaatagctgaattcgtcgcactctgtgacgtttgccagcgagtaaaggcagaacaccaaaggccagcaggtttgctacagccacttcagattccagaatggaagtgggaagaaatcggaatggatttcattacgggtttgcccaggacgtcatcggggcatgattctatttgggtagttgttgatcgactcactaaagtggctcactgcattccggtgcatactacctactcagggaagaggttagcagaactttatctgacaagaatcatgtgtttacatggggtacctaagaagatagtgtctgatcgagggagccaattcacttcaaagttctagcagaaattacaagaggaattgggaacccttctgaacttcagcactgcttaccatccacaaacagatggctagaccgagcgagtcaatcaatgtcacgcccggaatttctatccaaaattccaaacgcttacatgtgtgtaaaccctcgtccaggaatcagccgaggcacacaataacaaattgataatagagtaccattattactctaattaataagcgaataaaatgtcattacagaggtagatagttcctctcaatcaataaagatctaagcagcggaaaataagataaacggcgcagacgactccactccacaggcagcttgactagggctacacctaatcctccacaccatcagcatcattgtagaactcttcctctgatgaatgattgcaaggtgagtatacgacatatgaatttttgaagatttaatcggattaaaacacttatatagatttaaattgaattatgacgcaataatgaattatttttgaaaaggaaaaagggaattattgcgtcagcgggctagggtttggtggaccgggcgcacgggcgacggttcacgcgaacggacggccgagatcgatccaatccaaaacggacggccgagatcgatcggtccacgaccggctcacggcggacgaccccgatgacgtcagcggtgacgtcaccgacagcggcagcggctcggcggagcggacggctcgggcggcgcacactcaccggcaaacggcggcgctaggacgcaaacggagggcaccaagatgtagaggacaacacggcgaactcaccggtgacctaaacggcggcggaagaccaacggacggcgacggcgacaaggaggaagcggcgggaaccttcgggtcgacgacggcgaagctgctccggtgatctccggcgacggcgaaggggcgaacgaggacggcgacgacttggcgagcacgacggtggtcttcccgagcgacggcgacggctgaaacgacggcggcgcacggctggagcggcggcggcgacggcgaagctagggcacacggcgctagagctcttccgacgacgagaggcgaaagcgaaggtggcgacgggtagaggagacaccggggatccttttaaaggggctcggagagcggcggcgaaggcccacggctgccggcgaagagaaggaaaggtcggggttcggaggaaagagaccgatccgattcgacctcgaatccacgaatttccaaagcgatttagaggatgattccaaaagagaaaaggtagaggagatcccgaagatcatttcccttctatcgatttcaccggatcgggaaagacgcgaccgaatttggaaggagacgacggcggcgcggcgctagggtttcgggcggcggccgacgcgaggaagacgacgactccgacaggcgggccccacctgtcagcggcagcgaactcgcgcgggcggctgcggctgcgaactgggccgacttgggccggggagagagagagagggtttttgggctgactttcggcccaaagacaaaagagacttttaaaaacctttttcaatttaaattattcatgaaatacaattccatttattaaaaatacttccttagctcaaataaatcccagaaaaatctaggaattatagaattaagcaaagtatttaatgaaattttatctggccccattttatattggaatttattaattaaaattagatcttctcttctaggctttttttaaaatcatttctaaaaattctaattaaacaacaatttatatattttgaatttttagggtgtgacaatcaaatactagaggatatgttgagagcctgtacgcttgactttggtggagcatgggacaaaagcttgccgtatgctgaattctcttacaataacagttaccaagctagtctgcagatggcaccgtttgaagcactgtatggatggaggtgtcgtactctgctcttctgggatcagacaggggaacgccagttgtttggtacataagttttaaatgaggcagaagagaaagtcagagctgtcagggaaagattgagaatcgcacaatgtcgacaaaaaagctatgtagacaaccgccgaagagagctcattttcgaaacagaggattatgtgtatctccgtgtcactccgctcaggggagtacatcacttccaaaccaaaggaaagttggcaccacgctttgtgggaccatacaggatcttggaacgtagaggtgaagttgcttaccagcttgagcttccctccaacatgcttggcatccacaatgtgttccacgtctctcagttgaagaaatgtttgagagttcctgaggaacaggcaagtccggatcaaatcgaaatccaaaaagacttgacgtatgtggagaagccgactcgtatcctcgaaactagcgagagaaggaccagaaacaaagtaatcagattctgcaaggttcagtggagtcatcactcagaagaagaggccacctaggaaagagaaaatgagttaaagaccgcccatccgcacctcttcaccaattcttccgaatctcggggtcgagattccgtttaagggggggtaggtttgtcacaccctgaagtttcccccccttttcttgctttaaaaaaattggttaaataaattgcccgaagaaattatcttaattaacctagagctaaatccctaattaataaatgcatttaataatcgaattcggcgtggtggaatttttcttgagttccccatgctccaatacattaacatgatttttagtggaaattttcagagccttggaaataattttaaccaattaaaattgagcaagtgcaatatttttagtcccaggaaaatcctttttctcttttttcttttcttttccctcctttttctttattgggccgtcggcctatccctctcccgcagccccttctccttgtgggccggcccaagccgcccctccctcctctctcgggacgccgacaggtgggccccacctatcggtcgtctcctacctccggccgttggagccggagctccaaccgccgctgccgccgaaaccgccacgccgccgccgtttcccgccttctccgctccacgtcgcgcctccactccgcgcccacacctcgcgc

SEQ ID NO: 26296 - DNA, 6844 bp, Oryza sativa
tagccgctgccgctgcctatctccggccgcgcgccgctgttgctagagccgccgccgcgccgtgcagtcgccgccgtcgcgctcacggagcccacccgcacctctgccgccgcttggttgccgcgaatcaccgccggagctccgattccttcgcgccgccggtgagctcgccattgtttccatctccggccatttcttctcgccgtgccgcggctcttctcttctccctcaccccttcaccgccttttcccaggtcgcgctgctcccgtccgctgttttccgaagcgctgccgccgctcatcccctcccactccggtcgccgcccctccggtgacgactccctccccctcccttttctccccttcccgcgtgcgccgccgcctttggctgtgccgccgcctttggccgtgtcgccgctccagccgtccgccgccgcctttcgcgtcgtccgccgccgcctcccttcgccggtcgtcgccgtcggcagccgcgcacgccgccgccgctcgccatggccggtcggtcggctttgtgccgagccgagccgtgcctagccgccgcccgcgccgtccgatcggtctcgggccgatccggtgtcagtcccgtggaccggcggtggaccacctgcgtggtcccggtccacggtagaccggccaccttgtgccgctgccagtggagcccacttgcccgagccccctctccctgcccttgtgcgctgacaagcggagccctcctgtcggcgcagccgcccctccccccttggatgacgtcagccctgggatttacagcgcaataaattgattaaggactttttctttattagtaaaaacacagtttatcttctaaaattcatatgtaattcatccgagcttcgtttaagtccattcaagtctcagtaaattcataaaaatgcaaagaatccattaaaatgattttgtttcctgtttcagtagtcttatagcatgttttgcttgtgtgctttgtttgtcgcgtagatttcggccgtttcgtcgatccgcggtttctcgaagacgttgctgaggtctcatcagtgcgagagacaggcaagtcatgctttacatttgatcatattgtacccaatttacaaataccttgcatttctattaattgttgcactcttttacaatgtcatgtgggatgggtcctattactcagccatatatcgtttaccatatgccattgataactggggtatcaaaatgattagatgttggtttaggaaatgcttagccatgcttagttcaactagtacacaaaaggggatcacattattacatgagcatagttcaattttgactatgagcatagttctggttggtgccaccgcaatggtgttagttatttaaaatacactgaatggtgggttgtgcgtgcatggttttgctggtcgcacccatggcaattaaggaccggttcacgggaaacactgggagacttaccgtgcttaccacaagcgggagtgggtaactgcttgatctgaggtatagctcaaccctttcctaggcaccggtggcgagggtgggcgtgatggagttgggtcggccggggtgtccggttgtctagctgccggattcaccgcggcacaagaggggaccgcccactaccttttgaggggtgggggtgaaaccttagcatggtgtggatggttagggaagggttatgaggagggtcttgtcacgatttccccctttgcagtgtcatggtgatacttcggggcatggcgacatgtgtggaatcgtgtcttgtgggtacagttgtacacctctgccagagtaaaactattcgaatagccgtgcccgcggttatgggcgatcaaccagatttaccgtgattagtctcacccctagtttagcttaatgaactggtgtagttcaggtggttggttgggcctattgcaatgtggtgtagcgttggacaatgtttggttaatattgattaattactacaactgttttactgctttcaactactgtttttaaatgcctgctttgtgcaaagagcctttagcctccttcggttatatcctgcatcatacctcctcttccggtatgacttgctgaatacagttggtagtactcagtcttgctctcttttcccccacaccagagctgaagatcttcctagtgggaagtgtcttaccgaagttgatttcgtcgctgtcgtcaaggattacctgtggagtggagtcaccccgctgcagaagtcaagtttccaagtctagctcgtttttcttttctgctgcatttgtaatcatctccatttttgtaagacgtggatctgtatgtcaaaaattgtcgtttgtgtaccctggctggtcctagacagggatttaatgcacattcagcttcgaaattctggttcgtgaatttctgggcatgacacatgtcttcttggcactcagtccactcagtgacgaagtcggctaaagcttgggacttgatcgaagttcgcggcatgaaggatatatccagggacatcaattctaaggcccactttgctatccgcccatttgcttcacgattatgaagtatatccccgagtggaaacgatgtgaccaccgtgaccgagtgaccttggaagtagtgaggtaatttgctgacggtcattaaaacaccatataacagcttttgaacctgaggatatcttgtcttggagtcagccaaaaccttgctaacgaagtagattggtcgttggactttttgaacatggccttcttcttcacgctcaacaactaggactgtgcttacaacctgggaagttgccgacacgtataacaacagcggctcttgcggatgtggtgaagctaagactggtggagtagtgagaagttttttgaagtcttcaaaggctttttgtgcttcgggtccccactagaaattgtctgttttcttcaacagcttgaaaaagggcatccccggctcgccgagtcgtgaaacaaaccggttgagcgccgccatgcaaccggtcagcttttgaacatctttctaggagctcggcggtttcatgttgaggatggcattgattttctccgggttggcttgtatgcctctacgggacaccataaatccaagcagcttccctgacggtactccgaagatgcacttttgagggtttagtttcatcctgaaagcgcggatgcttgcaaaggtctcttctagatccgtaatcaaatcatccttctgcttggtcttgacgactagatcatccacataagcttcaacgttgcggtcgatttgagttgaaaaacatctttggatcatgcgttgataagttgctcctgcgttctttaatccaaacggcatggtgatgtagtagtaggccccgaagggcgtgatgaacgaagtctttaagcagtcggatctgatgatatcctgagtaccaatccactgagtagctcgcagccggccgttgagtcaactacctggtcaatgcgaggtaacgcaaagggatctttggggcaagacttgttgaggtcggtgtaatcaacacacatgcgccattgtcccgtcttcttccgaactaggactgggttggccagccagtcgggatgaaggacttccttgatgaagcctgctgctaacagcttggtcaattcctccttgatcgcatccttcctatcctgtgcaaaacggcggagtcgttgcttgattggtttagcgtcttccttaacaagtaaagagtgctcaatcaccactctaggaataccaggcatatcagatagtttccacgcaaataaatctttattattttgaagaaagatgatgagcgcgctttcctatttacaatctaactcagcgcctattacagcagtcttagtaggatcagaggaatctaggggaatcttcttggtcttggcgtcgccttctccgctctttggcatcttggttgcgggcacttctccttcgcttgctgtggacgtagccagtcggatttcttctcgggcgagcgtgatctcgcgggtctgggccatctcacagctttccttgtcgcatgtgacggcttgcttgatgtcactccgcagggatatgtctcctcgaggaccaggcatcttcatcatcatgtaggtatagtgcgggacagccatgaacttggctaacgccgggcgtccgagtatgacatgatgttctctgtacggaaattctcccgagtgctgaaagtaataggaagagtgtggccgagtggtgtaacaaatagccccgggatgactctgtgaaagggcgcattactcggctttaattccgtgcgagggatctgcatgtcgtccagggtcttggcgaaaaggaggttgagtgcactgccaccattgatgagggatctgcgaagcttgacgttgtgaaccaccgggtctagtaccagggggtaccgtcccgggtggaccactcggtctggatgatccgagcggtcaaacttaatcgttgtctctgaccaccgaagatattggggcgtgtcaggttgagcagcgttgatctccgttcggtcagcttttgctttctcttggattcataagccaggggtcaaccaaagatgtggttgagctccttgcgatggtcttggaaaccagtcagtgcatcatcttcaccatccttcttctttgacgtgctttgatctccgtcggaggctttatgtgcgttcttggcgtattgttctgcaaactgtttgtagacgaagcaatctttggccgcgtgattggaattgggatgatgcggacattgggagttcataatcttgtcaaaggtgttgacgtgcgaacgttgtcgggaggatggtgtagtagttgccacaagttcctcgggcttacgcttgcgatccttgtgattggtacttccactcccccctgtagtcggtgtatctttcttcggcttccaagtggtgcccgactgcttggacgtggtaatggcatcttcggctttggcatactcattggctttttcgaacatctgcttgaccgtcctgggaggcttgcgcccgaacttgccgactaggtctgtgtggcgaacgcccttggtgaaggcggcgatgatgacgtcgtcggtgatgtcggagatcttgttgcgttgctcggaaaagcgtcggatgtaatctcgaagggattctctagacttctgaatgacgttgtagagatcaaactgtgtaccagggcgttcaaaggtaccctggaagttggcgatgaagtggtcgcgaagttccgcccatgatccaattgtgccacagggtaacccgtgaagccaggaccgggcagaatccgctagggccacaggcaaataattcgccaattgcgagaccgtagacggtgagccaagactccgggttagtggtgccgtcatacttctcgattccaatcggcttgaagccggctggccaatccactcgacgcaggtcgcttgtgaaggcagcaactccatccacgtcgtcgtcgtagcgatctggagaatggtggggagcgtagcctcttgccgcgcggcgctggttgatagtatcgcgaagatcgacggggcgcctgcgatgtggggagtgtggtcattcaactcgatgctccctgtgtcgtttgggtggcgagtggatagatcgctcgtcgtgacccctactcctgcgagtagatcccgcgccgacgacgctgaggcttggttggtgatagtcttgagatcgaagatggggaactcggctgccagtcggcgtgtggacgcttgcggagttaatcgggaccaaggcggcgatcatggtcttggtctggttcaagatgttgacgacgtgattggcttgattgagcgcgtcttccttgaggaggatgtcgaggagggtgatcgctgcaaccgcgttctgttgggggggcggaaaaccgctgtcccctcgacgtcttgttgcccaataagttcctatgcttgtcgcccggcatccagggcacgttgtcgccagtcctcagcctcttttgcagcccgttcgcgttcctgtggctcacattgtagccgttctcgctcttatgcttggcgctcctcttccagtcggcgtcgttcggcttcctgttgtacacgtagttcttctgcttctcgggctttacgctcttcttccgtctcattgtcagccatgaagatgccgaagtagaggggtgtgtagttgtcttcaaagccttcgtcgaagtcgtcgaggttgcgtagtcgtagcggtagccgaagtcgtcgtactccacgatctccgatggtcgcgagtcgatgccgggggagctgaggtagccatccagttgttcgtcgaaaccgtgccgagaggctggagtatgacaccgacttccctggagctaggccgggccggggctaaagccggatcccacctaggcctacggggagaagacgcccttgtggtgaatacagcagccaaatcatcgggagtttcatcaggattggcggataggccccatcgtcttgatcgggtcgtgttgaagtagattggatcccgtccgagtggtttgaagccaactcggtggagatgatcttggggtagacctcggccgagttcgggataccgaactaggtggagatctggcctcttcccgactggtttgaatccgagtcgaggagagaaatcttgccgaagtcgttggtgatgaagtcgaggctgccgaattggaacgcctgcccgggagggaagacaaagtcgtcgatgccggaaacgaaacccatcgcactagtcggcgaagaacttgacgcttcccatacctggcgtgccaactgttgaaacaagatttcgacaatactaaaagggggtggctatcaggctggaaaagtggatgggtttaaagacaaggaattttatacaggttcaggccttctta

SEQ ID NO: 26297 - DNA, 4903 bp, Oryza sativa
gaacgcctgccgggagggaagacaaagtcgtcgatgccggaaacgaaacccatcgccctagtcggcgaagaacttgacgcttcccatacctggcgtgccaactgttgaaacaagatttcgacaatactaaaagggggtggctatcaggctggaaaagtggatgggtttaaaggcaaggaattttatacaggttcaggctttcttaatcaagaagtaataccctactcctgtccggggattgatccaccaagtatattattgatcatatgatctgggaaaaaatcgtgcccctagaggcacccgtacctctccttatataggggaaggggtccgtattacaaaatacagtccatatccctaacggaatatgtagttacagataaaatacaatcgtaaccgactaggaactcggatgtatccttgacatacaagtttagaatttaacccgagtccttctaaagatattctatctagacatggcaccccatatccagtcggactataaatgccttgtaggcatggggtatccataatctccacacagctataggttgggcatgttttatatggtgtaggattacattatagggtatatactgtttgccacaagcgttttgactttgttctgatcgaaatgaaaagattgacctgctgaacacactccgttcacgtcgagtagccatagtagcttagaaccgaatgtaggcacacatcgtaaagttgtaaatgcaaccatagtagacggtgacgataattaatttcaacaatgtactaggatttatccttacagaggcattatgtttaaacttgcatgacatttttattcagatttgtatcaccccgatgtttcaacttgtcacacacgatgatgcatgactttatttttctctcctgtactactatactggtacaattcaataccagataccaccgacggtgggaatgctacagggagcagtgttgtagcttgggtagataccgcatattgacggcatgtttagggccaacatagcttgggcttgagcttgactctgatcgaagtagacgctagcaaactgttgtagccgtagctgctgcacaatagcctgaacactgctaatggcctggcagtgagactgttgcgcgatcatcctgagctgttggcagcactgctgctgcatgacttggcagtttctcagttgaaacacgggtgattggaagaaggggatttccactgtgctgcactgctgccttacgaactcaccgcatgggctaagcatctgttgctgcagcatgagatgcggctgcagctgatattgcctgtaaacatgagtaacagcatcaaactgcgtagaggcgctgcatgcagcaatagcaaggagagcaaagaagaaaatgatcttcattgtggtgggtttctagttcttatgcttttgctgtaatgtttgagttgtgagaatgatgaagtgggtttacattgtgcttgtctatttatagatgcgatggatgggttttctttgaattccttatcggttgctctagagtgtttgtttttgttggatattctattgggatcagagtgagtcatgtcatttggaagttacatgatgtgcctccacagatgtccttgtataccatcgtcaaagtaactttattgcccatcacagatacttgatggttggcaagatagataatgttatgactcctcactcactttatatctcagtgtgacatggtgtcacacccagaaattctcgaacccgaatttctaagctgaatgtgcattaaatccctgtccaggaccagccagggtacacaaacaacaattgttgacatacagacccacgccttacaaaaatataaaagattacaaatacagcgggaaagataaaagcgagctaaaccgggaagcttgacttcagcagcgggcgactccactccacaggcaaaccttgacggcagcgacgaaaccaacctctctgagacggctccaactgagaagaacttcaactctggtgcgagggaaaagagagcaagactgagtactactgtcacgcccgaaaattcactagtaatttccgaacttatttgtgcataaaatcctcgtccaggaatcagccgaggtacacaaactgacaatttaatatacaaattcatcaaattaactaaaacgataaatacttacttaagatgcacttagtcctcaccatgaagaaaactgcagcggaaaataaaatctagcgaagctccggctccactcccacaggcagctcaactggggtataagccaaacgtcttctcctcctagatcttttttcttcaactgaggttgattgattattgcaagaatgagcatatgacatactcaacaagccacacagcaaatatgcaagtgcacaaggataccaaaggatggcataatataggctcatttgcaaaagcagcatttagcaaaacatttaagagaaataaaacagtggagtaattaatcagaaattttaatcaacactgaacaacacacccatgctgcacaggcccaaccatcctgaacaaccatacccggctgtacagatctaactccaaaccaggagctaagcaaattattaccaggtataacatctataattattgtgagaggtgtgagactaatcacgaaaaacattgctcaacccgcccataaccgcgggcacggctattcgaatagttttactctgatcagaggtgtaccactgtacccacaagacacagccccacatcatatcaccatgtccctcaataccaccacggtacctcgaaaaggagctgtgacaataccccttgcacaacacaatccaccatagcgcacctttcctggatcataatcacccccttataaaacaaggcatggactccccagcgacccccgtgggcttatctccgccacttctcagtctagtgctccgcaatgaaccatgttatacaaaaggtaaagccgttgcccacgctggcttgtggttggcatggttaatgtttcacaacagtagctcgcgaaccggtccttaattgtcatgagcacgactctcaaaaccatgtgctcacaacccaccattatcaagttttagttggcaagtaattaattaaccaatcacgattgaccatcgtgaactatcattaagccatcattaaataataatgagtcataagtaatcccaatagtgtgctaatgtttctaagcatggctaagcaatcatatctaatatctagctgaaccaatatatatagctcaactagtcaagttataataacccaaggtatcaaggaataaagtaatcaatgcaaacaggccataacaaaggaatagattcacaccacccagtgacattcgaaaataaatgcacagttgaaataaatagaaaatttaaatataggatcaacatgctcaaaggattgtgtttaggatctgtgtgacttgccttgcaataatcggtcttcaattaatcttcttgaatacttccggcgcactcacgaaccttcgcaacgacggaaacgacaagctaacacgcaaaatgaagaaaaagactaataaaaaccaaataaacaatacataaaaagtaaacaaacatgtagatcataattttagatgaattatgagacttgaacggcctcattgtgacttcatatgaatttattatgaattttacaagattaaatcggattaaaacacttatatggattttaattgaattatgacgcaataatgaattatttttgaaaaggaaaagggaattattgcgtcatcaaaggcggtccgggagcacgggacggtctaaggaaacgaacggccgagatcgattctatccaaaacgggcggccgagatcaacttgatctaccgcggttcacgggacaaggcgacgatgacgtcagcggtgacgtcatcaccggcgacggctcggcctcgcgcgctcgccggcgaatgacggcgcaacgacgcaaacagaggacaccaacgggtagaggacaacacagcgaactcaccggtgaccaaaaccacggcggaagagcaacggacggcgccggtgacgaggaagaagaggcgacggtcttcgggtcgacggtgacggcggtgctccggcggtcttctgcggcggcgaagaggtggacggggacggcgacgacctcgcgatcccgatggtggcgacggcgaccgacgacggtggctgcaacggcggcgcggcgcggctgaaccgacggcaacgacagcgacggctagggctacgcggaggcggcgctagacgggacggcgggctaaggcaaaggtggcggcggatagaggagagctcgggggtgcttataaaggggctagcgagcggcgacggaggcccacagcgaccggcggcgagaaggaaagctagggttggagggagaaaagtcgatccgaatcgagctcaaatccgtcgatttccaaacgaaattgaccgaagtttctataagagaaaaggaagaggagatcgaggagattatttcccctcaaacgatttcaccggaaacagaaaggatcgaccggattggaaagcggcggcggctagggtttcggccggcagcggcgcgaggaggaagacgggcccgacaggtggggcccacctgtcagcgggagagagagaggagagcggcggctcggttgcggactgggccgacttgggccggggagagagagagaaagagagaggttttgggccggctttcggcccaaagccaaaaggaggatttaaaaacattttctatttaaattattcatgaaatgatattccattgattaaaaatacttccttggctcaaataaatcccagaaaaatctaggaactatagaatcaagtaaagtatttaataaaattttatctaacccaattttatattgagatttattaattaaaataagatcttctc

SEQ ID NO: 26298 - DNA, 3799 bp, Oryza sativa
aagtcataccggaagaggaggtatgatgcaggatataaccaaaggaagctaggggttcttttgcataaagcagtcatttcaaagcagtagttgaaagcagtaaaacagctgtagtaattaatcaatattaaccaatcactgtccaacgctacaccacgttgcaacaggcccaaccaaccacctgaactacaccagttcattaagctaaactaggggtgagactaatcacagtgaatctggttgatcgcccataaccgcgggcacggctattcgaatagttttactctggccagaggtgtacaactgtacccacaagacacgattccacacatgtcgccatgccccaaagtatcaccatgatactgcaaagggggaaatcgtgacaagaccctccacataaccctcccctaaccatccacaccacgctaaggtttcacccccacccctcaaaaggcagtgggcggtcccctcttgcgccgcggtgaatccggcagctggacaactgaacacctcggccgacccaactccatcacgcccaccctcgccaccggtgcctaggaaagggtcgagctatacttcagatcaagcagttacccactcccgcttgtggtaagcacggtaagtctcccagggtttcccgtgaaccggtccttaactgctatgggtgcgaccagcaaaaccatgcactcacagcccgccattcagaatattttaattaactgacacccttgcggtggcaccaatctaaagctatgccagtagtcagagtctatgaaataatgtgatcccccatttgtgtactagttgaactaagcagggctaagcatttcctaagccaacatctagtcattttgatacccaagttatcaatggcataaggtaaccagtatgtggctgaggaatgggacccatcccacattacattgtaaaagaatgcaacatttaatagaaatgcgggatattggtaaattgggtacaatatgatcaaacgtattgcatgacttgccttgctctcgaactaatgagaccacagcaacgtctttgagaaaccgcggatcgacgaaacggccgaaatctacgtgacaaacaaagcacacaagcaaaacatgctataagactactgaaacaggaaacaaaaccatttttaatggattctttgcatttttatgaatttactgagacttgaatggacttaaacagagctcggatgaattacttatgaattttagaagataaactgtgtttttactaataaagaaaagtccttaatcaatttattgcgcaataatacccagggctgacgtcatcaaaggagggggcggcgccggcaagcggggcccgcatgtcagcggctcaaggcggccggtccacgggaccaagggtccggatcggcccaagccgatcggacgatgcagggagcagccaccgggctcggcctcggcttcaagtcggccggcaagcatggcgaacggcggcggcatgcggtcgctggcgacggcaaccggcggcgtgggaggcggcggcgggcggcgcgaaaagcggcagcagcggccgaaggcgacggcgcacgcgcgaaggatggcggcgcacacgggagagagggaaaaaggggagcagaggggagcctcaccggcgagcacggcgaccagagcggaggatgaaaggcggcggtgacccggcgacgaggaggggtggacgggcggaggcgacacctataggaaaggaggagagggattaggggtggagaggacgaccgcaacgaccaatgtggccggccggagatggatgaaaaaggagagctcaccggcgagcgagggaaacggggcttcgggggtgattggcggcaaccaagcggcggccgaggagcggacggcacccgcgagcgcgacgacagcggcttcatggcgcggcagcggctctagcggcggtggcgcgcggccggagacggcggtaggcggcggcgcaaggggcgagcggcgcggcgacgataggaagcacgggagggcgcggcgagtgcgaaaaacgagagagggggacgtggggagtgatttataggtgcgggagggggcggacgtggccggggaggtggccgatttggctggcgacgtgggggtggagagagagagaatgggggggattcaaattcgaatcccgccccttgcgagcgcgcgcaagggtcgggagatgcgggggagagggtggcgacgtggggaggacgcgggagcggcgcggcgtgggcgcgggaggagcgaataaggcggcggcgcggacggtttcggcggcggttgccgtcgtggggcgggcggctggaggaaggggacgacctgataggtgggccccacctgtcagcgtcccggagagaggggagggagggaggacttcggggaggggaaaggggaatgggccggcccaaaggaaggaggccgagcgcgggagggagtgggccgatggcccaaaagaggaaaaagaaggaaaagaaaaaagaaaaagaagaaaggatttttcctgggattttaaaaatattgcgcttgctcatttttaattggttaaaattatttccaaggctctgaaaattccactaaaaatcttgttaatgcattgtagcatggggaactcaagaaaaattccaccacgctatttccgattattaattgcatttattaactagggatttagctctaggttaattaagataatttcttcgggcaatttatttaaccaatttttaaagcaagaaaaaggggggaaacttcagggtgtgacacatggattgctgtcattttcaaactaagtttgttatgtattgtaagctattgttttacaaatgcactttacatgtcaagggcgcgtggaactttcatgatatatccagacagatatttgtatgtgtaaagtgagttatgaaaaatatattagttatcaataactgcttacgttcaaatgagatatgtagtaaagtgcccttacgacgacatgtctaatactacaacggtttagacattccgtgttaaaaatcttatcatagcctttaagaacgtcatcgattttatgaccactttggaaaaaaatctgaaagattagcttgcgtttattttgccaaggagttaaaaaacacgttagagagaaaaaatcacgaaaggaaacgaaatcgtgacagaggagacattatttctcataacagctcagctaacacgtattgacaacgatttgcctataaaactagctagatttttctcacggtcctagatggaagaacgaaaggacatttaggaggcagaacataaatgaaaatagccccttgctagcatcaaaccatggatcgattgtatcacggcggtcatcaacgataccagcaaagaacgaaatgcctacctattcactctcaggatagagcagcggctatattttgtgactttaggtgaaaacagatgaaaccgatatgcatgggcattaatgtggactattaagcatatatgaattttatttaggcagcaatgcttaatgtttttaacttataaattgatatttccgcgaccaggccttcaaatatgaaaatttaacttcatgttacgcggagcgtcttgtttcggtgacaaggtaagattgaattaacaatgatatggcaaatggtcccatcgatacttacattttgaatagtggatttataaccgctataggttgggcatgttttatatggtgtaggattacgttatagggtatatactatttgccaaatgcgttttgactctgttctgatcgaaatgaaaagattgacctgcttaacacactccgttcacgt

SEQ ID NO: 26299 - DNA, 6459 bp, Oryza sativa
gcctttacgacgacatgtctaatactacaatagtttagactttctgggacaaaaatcttattatagcctttaagaacgtcatcgattttatgaccactttggagaaaaatctgaaagattagcttgcgtttattttgccgaggagttaaaaaacacgttagaaaataaaatcacaaaagaaaacgaaatcgtgactgagaagacattgtttctcataacagttcagctaacacgtattgacaacaatttgcctatagaactagctagatttttctcactgtcctagatgtaagaacgaaatgtcattaggaggaagaacataaatgaaaatagccccttgctagcatcaaaccatggaccgattgtatcacggcggtcatcaacgataccagtaaaaaacgaaatgcctacctattcactctcaaggcagagcagcagctatattttgtgactttaggtgaaaacaaatgaaatcaatatgtatcgacagtgtgatggccatcaaatgaaactaataagcattgctgaattttattaaggcaataattcttaatattttaaaactataagttgatatttccacgaccatgtgacatcccggcctagagcttaataggattactagaatactcatatcaacaagttgcaacttcttttcctaaagccgatctcaaaagaactccgaggttaagcatgcttggcctggagcaatttcatgcttaacctggagcaatttcgggataggtgacccaccgggaaattctttacgggtgcgtacgagtgaggacaaagtgtgcagaaaagggttgtgttggtctgtgagagcagtctatgacctatgaaagctgtcagatgtaagcggggagaggcgggacgttacaaagtggtaccagagccgactctcgtggtttcacgggcgcgtgtgtcgcagttacgcgggcccagcctgggagaggtgggacgttacaaagtggtatcagagccgactcttgcggtttcacgggcgcgtgtgtcgtagttacgcaggcatggtgcgcatggctggtgtggaccaggatggtcacacagcatggcacatgagctggcactggacacacggacgtggccaaaaggggacgttcctggcccggggtgaccgacgaggtcgtcgatgtcttaagggggtgaggatgtgacttcccggcggtgtcttaagggggtgaggatgtgacttctcggcctagggcttaatagaattactagaatactcatatcaaagccgatctcgaaagaactctgaggttaagcgtgcttagcctgaagcaatttcgggatgggtgaccgaaaggcttgtgttggtttgtgagggcaatctatgacctatgaaagctgccagatgtaaccgggctcagcctgggagaagcgggacgttacagaccatgcctttaaatttgaaaattatcaaacatcacaatggcgtttctctcccttctatatttgggcaccgtccccgagtataggaatcctggaccttctcaatttctattgacgagatgatccaggtcaataaacttttctctatgatggttgatctgaaaagaatggtctaacatgtgttcatatcgcctgcatcatcgtcctccgtgtcacgcctagaaattcactagtaatttacgaacttatttgtgcataaaatcctcgtccaggaatcagccgaggattttatatacaaatccattataataacatcgttacatacttacaaaagaatagaaaaacagcagcggaattaacggtctaacgatggcttaagctccactcccacaggcagctcaactggggtataagccaaacgtcttctccttctggatcattttcttcaactgaggttgattgattatttcaaagtgagcatatgacatactcaacaagccacacagctaatatgtaagtgtacaaggataccaaaggatggaataatataggctcatttgcaaaagtagcatttagcaaacatttaagagtagtaaaacagtagagttattaattatcaattttaatcaacactgcacaggcccaaccatcctgtacaaccatacccggttgtacagatctaactccaaaccaggagctaaacaaattattactagttatagcatcaataattattgtgataggtgtgagactaatcacgaaaaacattgctcaacccgctcatgaccgcgggcacggctattcgaatagttttactctggctagaggtgtaccactgtacccacaagacacagcaccacaacatgttaccatgcacctcaataccaccatgatacctcggaaaggaactgtggcaatacccctcgcacaacacaactcaccacagtgcatcatacctggattataatcaccgaggcatggactccccagcgacccccacggatttctcgccacttctcagtctggcaccccataatgaactatgctatacaaaaggtaaagtcgttgcccacgctggcttgtggttggcacggttaatgtctcataacagtagctcgcgaactggtccttaattgtcatgagcacgaccttcaaaaccatgtgctcacaacccaccattgtcaagttttaattatcaattaattatcataacacgattaaccatcgtgagctaccattaaatataaccataaataataatgtagtatgatccattccattaatgagctaatgtttctaagcatggctaagcaattacatatatatagcttttagctgaaccaaaccaatatataaggttcaagctaatcaatttgttacccaaggaatcaaggaatatggtattcaatgcaaattggccataacaaatgaataggttcacaccacccggtgacattcgaaaataaatgcacagttgaaataaatagagaatttaaatataggatcaacatgctcaaaggattgtgtttgggatctgtgtgacttgccttgcaacaatcggtcttcaaatagtcttctaaaccacttctgacgcactcacggaccttcgcaacgacagaaacgacaagctaacacgcaaaacgaataaaaaggactaataaaaaccaaatgaacaatacataaaaagtaaaaaaaaaacatgtagatcatgattttagatgaatttagagacttgaacggcctcattccgagttcatatgaattagttacgaattttacaagattaaactgattttagccttataaaaaaaggattaatgatttattttagaaaagaaaagggctttatgacatcattgatgacgtcatcgccggaacaaggcacgggaccacactgtcgccggcgctagaggactcggccggaccaaccgagggcatctacgcgaagaggacgacgagacgaactcaccaaggggcggcacgacgacgaaggacgacctacgacgagctccgaacggcggcgaagtcgggacgacgaggacggcggctttccggcgacgagcagcggcaacgaaggggtggacgggcttctcctcggtgctgcgatgccgagggaggtggcggcacaggtcggggacgaccgaggcgacggcacggcgcggatggaggcgaagcagatcggcttgacggcgtcggcagcgctccggcgggcttcggcttcggccaagtggtggacggtgtgcagctccttctcgcgaacccgatggtggcgacggcgaccggagaaggcggctgcaaaggcggcgcggcttgaaactcggcggctacgacggcgctaggacagacgcggctagggcgctacggccgacggcgagctcgggcgagggtggcaaacaaaagaggagagggaggggactctatttatagccacgggagagagatcgggcgtggaacgcagggaatcgcgccgggaaaacctagggtttggtggagagataaactcaaaaacgaatccaaattcgcgccgaattcaaagggataaaataggatttttgggggaagagttagaggaggataagggaaacaaatcccctcaactaattttagaaacagtcgagagaattgagcgaatcgggcggaggaaacggcagcgtcacacacggctcggcggctgcacgggctctgtccaagcttgaagaccacactgtagcaggtaggcgaattagactttgactggggttctttttctccagcccgattgaaggagggacaggaaatggacttcagaggaggaataaagccagctgaaaggaagggagaatgggccgaggactaaaggtgaacttttcgagtttcagcccgaaaaggaaaaggggattttaattacttttccaaataaattaaacactgaaatgatgtttgaattgttaaaaatactttcaatgctcagataatttcaacaaaaatcctgaaaatacttggacaaccaaagtacttaacaagattatagtcagaccatttaatgattaatttaatatgtgaataattactgaaatgttctttgtatgattaaaattaagaattgagcttcaaaaaatcaaagaaaattccacatagtataattaaccatggagaatttaataaaaattaaatccatccatgctttatatttagaaattttgatttcccacatcactagtaaattaatgaacatttaatataaattctaataataatttattatataatttataaatcctgaaacgaaaaccaggatgtgacactccgtcagacccagggtttgaaagatcgtgtccacctagcatgtgaacacaagggagaacctaatcccacttgggagacacccaacaaaaatgagaaaggggctccttatagacggatgaaaaaattattccgccacaaggttatcatcagtgcccaattacatctaattgttgaatagtcccacattggttgtggaagtgcaaatgacctaagatataagtgggggagcccctcacctcaatggctagcttttgaagtgtgaaagcccctttacgatactacaattggtatcagagtctgactaggttaacatctctgacccgatgaacacagtgtgtgaagatctgatggaccgtgggtgcctgcggggctcgtatacttgatggaccgtggacctgttctgtggggtctatacacggtgaaggggcggtgaagggctgagggacaccaatgtgtgaagggggagattgttgaatagtcccacattggttgtggaagggcaaaggacctaagatataagtgtggggtctatacacggtgaaggggcggtgaagggctaagggacaccaatgtgtgaagggggagattgttgaatagtctcacattagttgtggaagggcaaaggacctaagatataagtgggggagagcccctcacctcaatggctagcttttgcggtgcgaaaggccctttacaatctacatgtgatgtgtcatacactccaatgctaagtaatcttacttcaaaccttttatttatttgttaagtcatgatagcttaaatgtcttcttgatgttttctgaaggaattcgcagtcctcatttccaacactcctctaccatcagcatagggaaaagaaatctcacaaatggtcagccatcccctctaccgattaaccaagctcaaagaggccaatggctgagaaagaatctcaaaagtgagcgctaactgccggtggtccaaagatcgataagtggataaacccatcaagccaaagaacgcagtcaagaacaccaccaacaaaactatccgagcagccgctgcccacacagtcaaagccatctatgccaccgtctcccaggcggcgcggcggctgctggcggacgcacggcggcggctccgcgagcgaacgacaacgacgaggtgcgacgccgacgacgaggcgcggcggcgggcgcgacgacgacgacgacgtactacgaggcggcaccgccccggatccaggagcggcgagcctgggcgggcggcggcaggcgcgacaacgaccgtgcggtgccagcgaggatccggccggagcggcgagctcgggcagcggcggcgtggttctcgcggcatcgggcgcgacgacgacgaagaggcggcgccggcccggatccaggagcggcgagcccgggcgggtggcaccggcgcggatccggccggagcggcgagctcgggcggcggcggcgtggttctcggggtgtcgggcgtgacgacgacgacgacgaggcgcggcggcgggcgcaacaacgatgacgaggtggcgccgccctggatccagcagcggtgagcccgggcgggcggcggcggccgtgacgaggaccgggtggtgccggcacggatccggccagagtggcgagctcgggcggcggcagcgtgtttctcgcggcgtcgggcgcgacgacgacgacgacgagcggtgccgacacgggataatccggctagggttaggtttttttttttcaattttttttgttccttttttttcccgtgcggctagta

SEQ ID NO: 26300 - DNA, 22122 bp, Oryza sativa
ggtttgtaacccccctttagtcattgtttcctagccgggagtatcaatccgggactaaagatcgctatctttagtcccgggtgaaataactgggactaaagatagatctgaccttttttttttttttgcatggccctgttgctgcatggtttatatatatatatatatatatatatatatatatatatatatatgtttcaatacatatatatgcatacatatatatatgtatatatatatatattatattatattatatgtatatacatgcataatatatatgtatttatacatatatatgttatgcaaatgcatatgtatatagatatatatatgaccaaaatatatttacattatagaaaatgtgtacacatgcatatagaaacatatgtagtcatgtattaattacaatccattatatgtcctagctagctacgatttcgacgtagtagtactcgctgctagctcagaagctaaggaccggtgaattgtgtttccgtcgtagtagaattcaccttgggatcaaggatttcttcgttgatgaatcccatgagttgttcttgaaccgccgcgataaattccttgtgtgtggtcaggttatccctcatgcgaataaactatatgaatgtatgaaattgattagtaattaaacaagaaatcgctacgtaatgaaattttgaatttatttgtacgtacatcgagctctcttgtggtgatgatttggtctgcaaggcagtggcaatactcgcacacgtaatagccgcacaagttagttccctgcttttgctttgcgcactacaaataaatgacaaacaacgagagatctaattaatatacacttgtatgtatttgaatcggagaaatataaatgtagagcatgtgtactcacaggaaatttgaacttccgcctaagtctttctctccatttgccgcggaccaaatgacggaaccgataccaagccctacatggagtttaaagctatgattcgtagtagcaattaacataacaagattttcttaattaacaaaggaacttatgacggtacctgtctataagttcgaaaaccttgtcaaacgtagactcttttttatccattgagtcatatacgttgacggtgcaggcctccaggtcgaagagtaaaagcacccagtggaatctgcaatgtgcgtgggatgcattacatatgaaacacttagcaagttcgtacgggaatgaaatttggtatgtaggaagacagtaaaattaaactaactctgtgttgtatggcaacagtatgaacgtcttgtaatgctgcgccttcaggagatggacgagattgtcctctgttttttgtggatattggtcgagcattgcgatgtttactttccgagggtcgatgaatccagtatcgaaaaccctccgccgtcgggccctttgaatctccattctacaacgataaaagggagtatattattttctatagtctacttatatacaaggacctaattaattaaaggagacgtatagtaagaaatctaactgaacgatatacttacaaaatccagcaactcataatagagacgtcgagggcgtccagctggtatagttcgtagattcccctgaaattgatccagagaatgtcatctccttgcaagaagtccgtgtccctgatcctcgctccgatcatctctctaccggtggcgttcatctccatgtacagctgatggaacttgtacatttgtgtgggtagggactgcagcagctcaggcttgacaagcggtttaccgagttcgtacttgtatttcacttccgccttttcgattggtgcgactcctagcaattgatccgtagttagaccggtgtcagtaataaattgttctatcatcatttctttaccggtcaccaacggctcgatctcctggtttggttgctctccaagctgagggactgatttggactttccagaagatgctttcttcagcgttcgctcatagtccgatagcttgatggcctccttgacagatgcagacatacccctgaagaagttcctgacactggggtctataggaatcttcttttctggacttcgaggcttgaattgtctcttgacttctgatgcaacgtaagcgtcaagctcctcttgcgtgcaatcgtaccccgggtccttgttcttggcggcgtcaactttcaccttcttcgttgcccttgtgtgggcaggcggtggagctggggggccccttgactttgaaggtgccggaagaggagcttgcgggggagtaggtgtaggagcacgaggaggagtcggtgcaggatcctgaggaggagtcgatgctggagccggaggtggagacggtgctggcggagcatgaggaggagacggtgcaggatcctgaggaggagatggcggagccggaggagatggtgcaaaagacgccgcttgtcgcccagggaggatgatgtaccgcctgcgccatagaataatggcatggcatgtgtctcgtagatgcgtctcaccgtctcctccagggtaatccaactcgaggtcctcgtacgcgccttcgaccaactcaacttctaccttcgagtatcctgctggaatcggcctgcagtggtaagtacctgaagggtccgttgggatggccatgcccgacgccaccttcatgttgtgagagattatttattagtaatcaatatatataagcagcaactagcggaatggctaaatcttacctttattgataagttcttgaaaggaatatgcagctcacatggtgtccgctgagtgatgtcatcaacgggacaggtcgattcgtcctgtgtttgcatggcgtccatgctctgtgatcctacctgccccgttgaggcgcagctgctacggtttcctgacgggctcaccattgcaggaggaatggtcggctggggatcatgggaccgatgtgcggccatgcgttcatcaaccatccttgccacctcctcttgcatgttgagttcgtagctcgatacccggaactctaggtctgcaatcttcgcctcggtatttctcttgctcctcatccgactcctgtacgtgtggatgtcctccttgaaaccaatcttccaaggaatcacccctttccctcgtgttcgtcctggatgctctggagtctgcagggcgagtgtcagctcgtccctatctctgtctggttggaacgtgccctgagaggaggcttccactgcatctgttagtcgtcgcgcagcctctcgtatctgatcgccgaagaccagtgagccatcagctgggttgagcgttccaccgtgagcatagtaccagaacttcgatcgttccggccaattggctgttgccggttcgatacccctctcaatcaagctagcctccatctgctcccacttcggcatcgcgacgctatagcctcctgaccccaagtggtgatggtacttcttcttggcggcattttctttgtttctttccatcatcgcctgcccttgttcacctgtcttatatgcaacgaactcgtcccagtgatcccttagctttgggaatgtgtcgaagttcggtgtctgccccttcagtatatacttctggtacatatctcccttgaacctctgaaactgttctgccattttcttcagagtccaccttttcactttgtcctctgtacccgcaggaagggtgaatgtctcgagcattgtggtccacagcatctctttctccgaatctgggacaaagctctcatgatctccgcgtgcccttgttcttcgccagtacaccgtactgacaggcacgttatcccgcacaacctaaccgctgtgacgtacatagttcttggcggcttcggccggggcagtaagacgtccatcttcttccacttccgttatgatgtgccgaccctcaagcttcttcgctgcacctcgttgcccgcgtgccctcttctgtccaacggagggttgactaccactagcctcctcctcctggttcccctccacatccctttcctcgtgcccctgctggttcccctccgcatccctctccacgttcccttcctcgttcaagtactggtttggatcctcgttcccctcttcttcattccagtactggctgcttccctccgcgattgtatcgtacaatatctgttcctcatcgcggtcagccatctgttgatacaagaaacatctgctaagtcacgagacatttatgttttaacaatctaagtcatgtatgctaagtgtaaatgtcgtacattagaactctacacaaccttacgtgctaagtctaattacaaatcgtgatataagctaagtctaggtgacgtatattatacaaccctagctagtaaataattatatactaagtctaattacaaataaaataatcttatattaaaactcaaataatattacatgctaagactaaaatagtcatgtatatgctaagtgtttcgtgcgtatatgctaagtctaattaagactacaatagtcaattgctacttgtcgcaccaattccgtagtcaataattacatactaagtctaattacaaataaagtaatcttatattaaaactcaaataatattacatgctaagactaaaatagtcatgtatgctaagtgtttcgtgcgtatatgctaagtctaattaagactacaatagtcaattgctaggagtcgcaccaattccgtagtcaataatgtcatactaagtctaatttgcaataaaataatcttatattaaaactcaaataatattagaacactacacaatcttatatgataagtctaattacaggtctaataatcttaattaattgcattacaaatataacaatcatttatattattacgtcacttgcctgctccaattccttctagggctagctcttccactcaggcttgacggacgactccgacaacacgtcttttctgcaagatacaaaaagatgtattaggataaatgcgaagtaacatatatatatatatatatatatatatatatatatatatatatatatatattgcatttcacgttaacgttcgtcctcgttcgttcgctcgttctcattcacgttcgttcgcttgttctcattcacgttcgttccctcgttctcgcttgtcttcgttcgatcgttctcgttctcgctctcgttcgttcgatcgttctcgttctcgttcacgttctcccggcaacgtacgttgacgtgttcgttctcgctctcgttcgttcgatcgttctcgttctcgttcgttaacggcggtaacgtacgttgacgtgttcgttctcgctctcgttcgttcgatcgttctcgttctcgttcattaacggcggtgtggcggcaatcggggcggcggttggcgcggaggcgtggcgttgcggggccgtggcggcggcggcgtggcgtgacggtggcggcattgcgcgcgcggtggcgaaggcggcggcggcgtggcgacggcggcggcggcgtggcgttggcatgcggcagcggcgttgcgcggcgcgaaggcgtcgtcgtggcgcgtcgtcgtcgtggcgcggcgtctcgtggcgggcgccccgacggagagagatcgagatcagagaagatcgagatgcatgaagggagatctggcggcggcggctctcaccccagagatgcggcggcagcggaggaggcggaggcggcggcgaggacgacgagctcgagacgacggcgagatacagcggcgtcggcgcggggatttgccctaggcagtggcggcgaaggagagaggccgagagagatcgatcggccgaaaacgtctaagtgttggtgaagaagacgagggcgcaccgggaatatatatacccccggatctttactcccggttgttgagaacaaccgggactaaagatatctttagtcccggttattgagaacaaccgggactaaagaaaagatctttactcccggttgttgagaacaaccgggagtaaatatcttttcccgctatttcgaaattctttttaaacccggttagggttaagaaccgggactaaagattatagcactgcatatgattttcccttacatatgtgtttataaaatagaagttaatgcattaacattatttaaagtacaaagattaatgacaattacttcgaaaaattatttttgtctgtaataaattaagtggataaatcgtaataagcaaatataattaataaaaattccaataatcatatatacttagcatatatatgaatgatattattatattggtaaaaactctaattaagatatgtatgtacatactgcatgatttaaaattaataaaaattgtaattatcatatgtacttagcgtaggaattatattaaattaaatgctaaaaactctaattaacatatgtaaatgccacatgcatgatttaaaccttttaaaaattcgaatagtcatatataagtagcatatgaaagatagtaaattaaattgtgaaaaactctaatatatgaatgatagttttaaaaatatattaaatttaatacttttaaaaattctccagtcaattataattagcatatgaatgatagtaaattaaatgttaaaaactctaattaacatatgaaattgccacttgcgtgatttaaaacttttaaaaatcctctagtcaattataattagcatatgaatgctagtaaattaaatgttaaaaactctaattaacatacatgtgaaattgccacctgtgtgatttaaaacttttaaaaattgtaagtatcaaatataactagcatatacatgatttaaacttgttgaaacctctaataatcgtgcgtaattaacatatgccatacatcaattgatttatatggataatcaatacatccaaaatagtttacatcgtgtacacaataattacggcacgtactttctcctcactattgttccctccttgtgatcgctgcgtgagtaaggggtgtcttcatttgataggaggatgctagggtcaatcgtcaccgtgaaagggggttgcccatccaactgatcgtaatcctcgtcagtcttgtcctcaactccgacgatttttcttttgcctgggagaaccacttgacgcttaggctcatcaggccctctgcccttctttcctttgctagacatgtccttcacgaaaaagacttgcgttacatcattggcaaggacaaaaggttcgtccgagtatccaaccttgttaaggtcaacagttgtcatcccactgtcatcaatcattacggctccaccaatcaacctaacccattggcaccggaacagaggaaccttgagaggaccatagtcaagttcccatatgtccttgatggcaccgtaatacgtggcagttgttccatcgtgtcccatggcatcgacacgaacagcgctgttttggttcgtgctcttcatgtcttgggctctcgtgtagaatgtgtacccattgatctcatatccctagaatgtcgcgatcgacccagacggtcccctcgccaggaaggcaagttgttggttgatcgactcgttacccatgagatgttgtcgtagccacgcggggaaagcatcaatgtgatgccgtgtaatccatgcatcggacttaccgatgttcctggcgcgaactagagccaagtgctcctcgatgtaaggagctaccaatgaagagtgttgcagaacagtgaaatgggctttacggaataaattgttgtctaccgtcgttattgctttccttccgagagttccctttccccgtagtctcccttcatggcgtgattcaggtaccccgattgggcgaaggtcttcgataaattctacgcaaaattcgatgacctcctctgttccaaaacccttggcgatgcttgcctctggacgagcatggttacgaacatacttcttcagaacgcccatgtacctctcgaaaggaaacatgttgtgtaggtacatagtcccgagaatacggatctctttcacaaggtgacaaagcagatgcgtcattatattgaaaaatgaaggtggaaatatcaactcaaaactgacgagacattgcaccacttcattctgaagggcttctaatctatccggatcgatgaccttctgcgaaattgcgttcatgaatgcacatagctttgttattgttgcccggacattgtctggaaggataccccttattacaactggtagcagttgtgtcatcaacacgtgacagtcatgagactttaggtttgtgaacttcttctccttcgtgcttattattcgcttgatattcgtggagtatccagacggtacctttatgctctccaagcattcaaacatactttccttctctgccttgctaagagtgtagctggctggactcaagtaatggcttcctttctcctttggttccgggtgaaggtcgccgcgttattccatatgcttcagatcattacgtgcttccagtgtatctttcgactttccgtatacacctaggaagccaagaaggtttacgcaaaggttcttagtgaggtgcatcacgtcgattgcgtggcgtacgtccaagaattcccaatatggtaactcccaaaatatagagttctttttccacatcgccgcgtgaccatcttcgctctctatatgctggcttccaggcccctttccgaacactactttaagatctttaaccatagcaaacactgttttcccgctgtgatgtttaggcttcgtacggtggtcggccttatgttcgaagtgcttgcctttcttccgtaccgggtggtttgctgcaaggaatcgatgatgacccatgtatacaaccttcctacagtgcttaagatacgtactttctgtttcatccatacagtgagtgcaagccttgtaccccttgttggactgtccggataggttgctaagtgcaggccaatcgttgatggttatgaacagcagcgctcgtaggttaaactcctcctgtttgtcctcgtcccacacggggacaccttccttcttccacaactgtttaagatcttcgaccagtggtcttaggtacacgttgatgtcgttaccaggttgcttggggccttgaataataatctgcatcattatgtacttcctcttcatgcatagccagggggggaggttgtagatacacatcgtaacgggccaagtgctatggccgctgctcatctctccaaaaggattcatgccatccgtactcaaaccaaaccgtatgtttcgtgcgtcctttccaaattctttaaattttctgtcgatgtttcgccactgcgaaccatcgaaagggtgtctcagcatcccgtcctgttgacgctcttcagcgtgccatcgcaacattctagcattccccttgttcctgaacaaacgccttagtcgtggtattatagggaaataccacatcaccttagcaggaattctcttctttgttagctgcccgtcaacttctcctggatcgtcccgtctaatcttgtatcgtagtgctttgcaaacagggcatgcttctaggttctcatactcctcaccgcgatataggatacaatcgttcggacatgcgtgaatcttatgaacttccagtcctaacgggcagactatcttcttagcctcgtacgttgtctcgggcaatttgtttccccccggaagaatgttcttgacgagtttcaataaatcgccaaatgccttgtcactaaccccattttttgccttccattgcaacaactccagagtggtatccaactttttgtgcccctgctcgcaacctgggtacaacgaagttctgtggtcctccaacatcttgtccaatttatgggcctccttttcactttcgcagtcctccctggcgtcctgcaatatctgaccaagatcatccgcaacgtcgttaccatcagcagctatttcctcctcgcccgtttgatttccttcaaatccaacatactgagcaaagtccggaatattgtcgtcttccacttcatcttcttccatttcaacaccttgctctccgtgggatgtccaacaattatagcttggcatgaaccccgactcaaacaagtggaaatgaatagtcctggatgcagaatactccttctgattcttacacttattgcatggacaacaaataaaacccctttgcctgttagcttcggccactctcaaaaaatagtgcacgccgtcaataaactctttggaccgccggtcagcgtacatccattgccgatccatctacatgagtcaaaaaaaccgtacacaaataattattcttacaataatgacagtcatacaataattataagatatctttattcatacaaaaatcataaaatattacaccaaataattcttaaaaactatttgtaaagttttaaactaattttaatgtgttttacttcttttaattttcattttagtttgttttctattatttaagattaactttcactagagttttccttctcaactattttataaaaccttgtttagcaaatgaactaaatttctatatattctttcttccccacacacattttctctctcatcaacttacaactaaattttggagacaaaaaaagtgtgcaaaacataggtgcaaatgtagtatgacaaaaaaaaacattggaggatgaagttgcaaaccttttaggcacctccgatttgtatgtaatcaccaaaataaattcaatagaaattttggcatgacctcccctcttttttgaagaaattttgaagcttgctcgggcagctggaggaggaagaagacatatatataggggtgggactttagtcccggttggtagcaccaaccggggctaaagatcaccgggatctttagtcccggttggtagcaccaaccggggctaaagatcaccgggataccaaccgggactaaagttggtaataccaaccgggactaaagttacgatctttagtcccggttggtgttaccaaccgggactaaagatcccgggggggcctgacaggccctgacagcattcgaaccgggactaaagatgatctttagtcccggttggtaacacaaaccgggactaaagatcaaatatgcccgttacccttttgaaccgggactaaagatcatctttagccccggtttttattgcatccgggactattgtggaaatcggccgaccgacgaaagattgtttctccaccagtgcacataaaaatttttatttttccagacgactgcctccagacaggcaaaatccccacacgggaaaatgaatttgaccgtccgaaaaaatagttcatgtagaagtgcgtgttcgaggccgacaaccaggtcaggaactggaataatgatcaggagctcaatcaagtcctagtatgtatatgtataagtgaaacactgaggttgttaaagtgccccagaatatctactgtaactatcacatattagagactagcatattgggcatgcgttgcatcgggattttaattaaagaaaactattattacctcattattactattattttatgcatacattatcttaaatcctttggcccgttctacaatcattttcttttttataaaatgtagagagtttgtgatggggtgtctgttggcccacacgtccttcttctttttcaagatgtggagattatggataccccatatctacatggcatgtatagtccgactgggtacagggtactatgtatagatagaatatcttcaagaggactcgggtgggttaagttttttgtatgtgaaggaaatatccgagattctaatcggttacgattgtattttatctgtaattacatatttcgttagggatatggactgtattttataatacggaccccttcccctatataaggaggggtccgggtccctctagggacacgttttttctcccagatcatacgatcaataatacactcggcggatcaatccccggacaggagtcgggtattacttcttgattaagaaggcctgaacctgtataaaatttcttatctctaaacccatccacttttccagcttggtagccacccccttttagtattgccgaaatcttgtttcgacagttggcgcgccaggtaggggtagcatcaagttcttcgccgattaagtgcgatgggttccgtctccggcatcgacgacttcgtctttctcccgggcaggcgttccggttcggcagtctagacttcatcaccaacgacttcggcaagatttctctcctcgactcggattcgaaccagtcgggaagaggccggatctccgctctgttcggtatcccgaactcggccgagatctaccccaaggtcatctccgacgagtcggtttcaaaccactcggacgagatccaatctacttcaacgccaccagatcaagacgataggtcctacccgccaatcctgatgaaactccccgatgatctggctgccgtctttattacaaggatgtcttctccccgtaggcctaggcaggatccggcttcagcaccgatccggcctagctctagggaagtcggcatcatactccagccactcggcacggtttcgacggatcaattggaaggctacttcagctcccccggtgtcgactcacaaccaacagagatcgtagagtatgatgaattcggctattgttacgacgaccacaacctcgacgacttcgccgaaagctttgaagataactacacccctctctacttcggcgtcttcatggccgacaacgagacggaagaacagcgccaagcccgagaagcagaaggacgacgcgtacaacaggaggccgagcaatgccgactggaagaggagcgccaagcacaagagcaagaatggctgcagcgtgagcaacaggaacgtgaacgggctgcaaaggaggctaaggaccgatgacaaagagccttagacgcagggcgacgagcgcgagaacttatcgggcagcaagacgttgaggggacagcggtcttccgcaccccccaacagaacgcggttgcggcgatcactctcctcgacaccctcctcaaggaagacacactcaaccaagccgatcacgtcgtcaacttcttgaaccagaccaagaccatgattgccgcctcggtcccggttaactccgcaagcgtccgcacaccgactggcagccgagtcccccatcttcgatctcaagattatcaccagccaagccttagcatcgccggcgcgggatccaaccgcaggagcaggggtcacgacgagcgatcggtccactcgcctcccgaacgacacagggagcgccgagttgaacggcctcgctccccacctcgtaggcgccccgtcgatcttcgtgatacaatcaaccagcgccgcgcagcacgaggctacgcccaccgccactcaccggatggctatgacgacgacgtggatggagttgctgcctttactaatgacctgcgtcgagtggattggccagccggcttcaagccaactggaatcgagaagtatgacggcaccactaatccggagtcttggctcaccgtctacggtctcgcaattcgcgcagcaggaggagacagcaaagccatggcaaactacttgcctgtggctctagcggattctgcccgatcctggcttcatgggttaccccgtggcatgatcggatcatgggcggaacttcgcgaccacttcatcgccaacttccagggcacctttgaacgccctggcacacagtttgatctctacaacgtcattcagaagtctggagaatcccttcgagattatatccggcgcttttctgaacaacgcaacaagatctctgacattaccgatgacgtcatcattgccgctttcaccaaggggattcgtcacgaggatctagtcggcaacttcgggcgcaagcctcccaggacggtcaagcagatgttcgagaaagccaacgagtatgccaaagccgaagatgccatcatcgcgtccaagcagtcgggtaccacttggaagccaaagaaagatgcgctgattacgggagggggtggaagtaccaatcacaaggaccgtaagcgtaagcccgaggaacttgttgcgactactacaccctcctcccgacaatgttcacgcgtcaatacttttgacaagatcatgaagtcccaatgtccgcatcatcccaactccaatcattcagccaaagattgcttcgtatacaaacagtttgcagaacaatacgccaaaaatgcacggaaggcctccgacagagatcaaagcacgtcaaaaaagaaggatgacgacgatgatgccccgacaggttttcaagaccattgcaaggagctcaaccacatctttggcggacctctggcttatgagtctagaagaaaacaaaagctgaccgaacgggagattaacgctgttcagcccgatacgccccaatatcttcggtggtcggagacagcaatcaagtttgaccgctcggatcatccagaccgagtggtccacccggggcggtaccccctggtactagacccagtggttcgcaacgtcaagcttcgcagatccctcattgatggcggcagtgcactcaacatcctcttcgccaagaccctggacgacatgcagatacctcgcacggaattgaaactgagtaatgcaccctttcacggagtcatcccagggctgtctgctacgccactcggccagatcactcttccggtcacctttggtactcgggaaaacttccgcacagaaaacgtctgctttgaagttgctgatttcgagacagcgtatcatggcatactcgggcgcccggcgttagccaaatttatggctgtcccgcactatacctacatgatgatgaagatgcctggtcctcgaggagtcatatccctgcggagcgacatcaaacaagccatcacatgcgacaaggaaagctgcgagatggcccaaacccgagagatcgcgatcgcccgagaagacatccgactggctgcaaccacggcaagcgaaggagaagtgcctgcaaccaaggtctcaaagagtggagaaagcgaagccaagaccaagaaaattcctttagatccttctgatcctactaagactgctgtaataggcgctgagttagattgtaaataggaaagcgcgcttatcacctttcttcaaaataataaagatatctttgcgtgtaaaccatccgatatgcctggtattcctagagaggtgattgagcactctttacacgttaaggaagacgctaaacccatcaaacaacgactccgccgctttgcacaagacaggaaggacgcgatcaaggaggaattgaccaagctgttagcagcaggcttcatcaaagaagtccttcatcccgactggctggctaacctagtcctagttcggaagaagaccgggcaatggcgcatgtgtgtcgattatatcgacctcaacaagtcttgccccaaagatccttttgtgttgcctcgcattgaccaggtagttgactcaacggccggctacgagctactcagctttttggattgctactcaggttatcaccagatccgactaaaagaatacgactgcttaaagacttcattcatcacgcccttcggggcatactgctacatcaccatgcctttcggattaaagaacgcaggagcaacttatcaacgcatgatccagagatgtttttcaactcagatcggtcgcaacgttgaagcttatgtggatgatgtagttgtcaagaccaagcagaaagatgatttgatcacggacctagaagaaacctttgcgagcatccgcgctttcaggatgaaattaaaccctgaaaagtgcaccttcggagtaccgtcagggaagctacttggatttatggtgtctcatagaggcatacaagccaacccagagaaaatcaatgccatcctcaacatgaaaccgccgagctcccagaaagatgtccaaaagctgactggttgtatggcggcgctcagtcggttcgtttcacgactcggcgagcgggggatgcccttcttcaagctattaaagaaaacagacaatttccagtggggacccgaagcgcagaaagcctttgaagacttcaagaaactactcaccactccaccagttttggcctcaccacatccgcaagagccgctattgttgtacgtatcggcaacttctcaggttgtgagcacggtcctggttgttgagagtgaagaagaagaccatgttcagaaagtccaacgaccaatctacttcgttagcgaggttttggccgactctaagacgagatatcctcaggtccagaagctattatatggtgttttaattaccgtcaggaaattatctcactacttccaaggtcactcggtcacggtggttacatcgttcccactcggagatatacttcataatcgtgaagcaaatggacgaatcacaaagtgggccttagaactgatgtccttggacatatcgttcaagccatgaacttcgatcaagtcccaagccttagctgactttgtcgccgagtggaccgagtgtcaagaagatatgcccgaggagaagatggagtattggaccatgcactttgatgagtcgaagagactttcgggcactggagctggggttgttttaatttccccgactggagaaagactgagctacgtgctctggatacatttttctgcatctcacaacgtggcggaatacgaggcgctccttcacggactacggattgcaatctctttgggaattaggcgtttgacagttcgtggagattcacagttggttgttaatcaagttatgaaagagtggtcttgccttcatgacaacatgaccgcttatcgacaagaggtaggcaagttggaggataagttcgatggacttgaactcacccatgttcttcggcacaataatgaagcagctgacagactagctaattttggatcaaaacgcgaagcaactccttccgacgtgtttgtcgaacatctttacgaaccaaccgtaccaagaaaagaaacagctgaggccatgtgtcgtgaccgagaaaaatacattttcccgaacgctagtgtattaatccctatcccaggaaaagccggggtacaccacacaaacatgatataaaagacacatctttattatatcgataatatttacattattacaaaggcacttaaggcctgacaataaaaaaataaccagcagcggactagcgggcctacggctccatcttcacagacgctcaactggggtataagccaggactccacctaagacttcttctccaaagcttctcttactgaagggtggggggaaatgattgagcaagaatgagtacaaccacagtactcagcaagccacaccggcagatgcatgattaatgcaagagggtacaaggggtaataatataggggttaagtttgtagaaaacagcatttaaaagtcacttagttgcccaaagccattttataaagacgatcctagagttacacagtgttattaatcaaggccgtgaaccctcacgaacctgccttaacccaaggcctacgatgattcagaccgaactggcaacccgaccctaggtcccagctcgtcccaagccaacccaggccaaccattccacattttagttgttaagcaaattttaagaattaaaacactaacttgggtacattgctaggcttgcccataaccgagggcacggctattcgaataggttatactctgatcagaggtgtacatctttacccacaagacacatcttcctcacgtgtaaccacgtgccacataccaccacggtatacggatggaagacgtgacatagttcccaacccatcctagccataaacaagagtaccgacccaaccccacctacggccggaacctccgggacaggcaggcaggattgagcccctagcagcaggacaccagccctgtgcaatgacatctcgactaccgggccgcagctcgagtagccttcatttgtcctagagatgtccatcgacccccgacttcgtccatctccatccgtgtacttttgtttataaccagactgagccacaaactaagccttacccactagacatgtggaagtatggtagtgctttgcaacagtggcccgagcttaatccttatagtacccgaggtacgactaacaaaaccgaaccacgcacctcgagcccagctgtcacgcccggaaattcactaataatttccgaactaatttgtgcataaaatcctcgtccaggaatcagccgaggtacacaaactgacaatttaatatacaaatccatcataataataacgttacatacttaaaaaaaaaagaaaaacaacagcggaattaacggtctagcgatggcttcagctccactcccacaggcagctcaactggggtataagccaaacgtcttctccttctggatcctttttcttcaactgaggttgattgattattgcaagaatgagcatatgacatactcaacaagccacacaacaaatatgcaagtgcacaaggataccaaaggatggcataatataggctcatttgcaaaagcagcatttagcaaaacatttaagagaagtaaaacagtggagtaattaatcagaaattttaatcaacactgaatagcacacccatgctgcacaggcccaaccatcctgaacaaccatacccggctgtacagatctaactccaaaccaggagctaagcaaattattaccaggtataacatccataattattgtgagaggtgagactaatcacgaaaaacattgctcaacccgcccataaccgcgggcacggctatttgaatagttttactctggccagaggtgtaccactgtacccacaagacacagcctcaacatcatgtctaccatgcgtcacgatactggaaagtacccaaatagaggctgtgacaataccctctgcacaacacaactcaccacagtgcaccattcctggatcataattacccccttataaaacaaggcatggactccccagcgacccccgtgggcttatctccgccacttctcagtctggtgctccgcaatgaaccatgctatacaaaaggtaaagccgttgcccacgctggcttgtggttggcacggttaatgtttcacaacagtagctcgtgaaccggtccttaattgccatgagcacgaccttcaaaaccatgtgctcacaacccaccattaatcatattttaattaccaattaattatcataacacgattaaccatcgtgagctaccattaaatataaccataaataataatgtagtatatatgattcatcccattagtgagctaatgtttctaagcatggctaagcaattatatgtaatatctagctgaaccaatatataaagctcaactagtcaagttataataacccaaggtatcaaagaataaagtaatcaatgcaaacaggccataacaaaggaatagattcacaccacccagtgacattcgaaaataaatgcacagttgaaataaatagagaatttaaatataggatcaacatgctcaaaggattgggtttaggatctgtgtgacttgccttgcaataatcggttttcaattaatcttctaaacactcccgacgcactcacgaaccttcacaacgacggaaacgacaagctaacacgcaaaacgaagaaaaagactaataaaaaccaaataaacagtaaaaaacaagcataaacagtacatgtggatatttttaacatgtagatcatgattttagatgaatttagcaacttgaaccactcaaaaccgagttacgatgatttagttatgaatttccgaagatttaatctatttgaaaaacaggaaaaagaaaaacgatgatgacgtcatgatgacctcatcaatggccggaccaagatggcgacctcgccggagatgggatggtcggctgcgactttggaggacatgaacacgtagaggatgacgagacgaacccaacggtactcaccctcgaaccaaacgacgaacgacgacggccggcgacgaggtctagcggcggcgcggcttcggtcgacggcggcgacggggctccggtgactggcgacagcggggagggagcggccgagcttctccactctcccgcgcacctaacggtggtgacggcgaccggcggcgacgacggaggcggcggcgcgacgcggatggagctcggccggcgatgacggcggggtggagcacgtggcggcggcgctacgaggcacgggagatcacaggagagggggcaaacgaaagaggaggactagggcgtcctatatatagccatgggaggccgggatcgagcccacaacgacgggaaaaactcaggaaaatttagatcttcgccggaaaaaggaaaggttgaaccgcgaaattggaaaggatttccatataaacttttggggatttcttggggacaaggaagaggagattgagaggattccattcccgcaaccaattcggaaataagagcaacggagaggttggattttggaaggggatcggcggcaacaggcacggcacggctctggctctggctctgtccagagctggaagatgaacagtagctcagggagggaatgtagacttcttgccgggcttgtcttttctcagcctgattagaagagggagcaaaaccagactttggctgagagaaaaagagaggatgcaggctcgggttgggccggcggaagagagaggaaggaaaggaatgggccgattcagcctaagacaagggaggagaattttatttcttttccaattaaaataatcacttaaatgatctttgaattgttaaaaatacttccaatgctcaaataatttcaagaaaaatcttgaaaatacttggacactcaaagtacttaaaaaatttataattagaccatttaattattaatttaatatgtgggtaattactgaaatgctctttgtatgattaaaattaggaattgagctccgaaaaatccgagaatattccagagagtataattaatcatggagaatttaatacaaattaaatccatccatgctttaaattaaggaaattttatttcccacatttaacttcacttgtaaattaatgaacagttaatataaattcgattaataatttattaaataatttataaatcctgaaacggaaattcaggctgtgacaccagcctaaaaccattttgggggttttgaatagagggggaggtgtgtgtccaattccaacataagccaaccattctatagtgtccaaatgatatgagaattcccaaagtctaaagttataaaaccacctaatgttgcctaattaatcagcgaagcatctacctaaattcatactagtggaaccatgaatagagtacccactagttagggttttgtttatcctagggtgaacaaggtaataataacaatagcaataataataaggtcataacaaaggtaaataggcatggctaaataaaacagtgataacgcgggaatttaaataaagcgataatgcaataatttaaatcaaaataattttataaactgggattcaatatgttcaaggatgatgtgacttgccttgctcagagataacggccttccgaaccttcggcgacgaccacaaaccacgcttcgggaacctccagaacgacgaagactacgcgaagcacacaagcaaagctacaagcctataaagaagcaataacaatacataaaaagaaagcacagggttctttaggttataacaaacattaggagacttgaacggatcgattcggagctcgtatgaccaagatatgatcatccgaagtttaatgctgttacatggagatttgcggattattataattaggttttgcagctataaaacatgtgtaagcgctagcctggaaaagacaggaaggctgcgccgttgacatgcggaccccacatgtcaacctaaaggaccgcggtagaccgagtacacagagacggtccacgggtcgacagaagcagatcccgtgtgtcaaccgaggcgagtggccgataaacggactccactagacactacacgggctgcacacgtggaaaccacgcggctaccgagcgggcacactaacacggtcaccacacgcacaagcgaatgactaccgacaccggtacacgggtaccggggtcgacaaccgcacaacgggcacgggtgacaccgaaaggacaaggacggggcagcgaaggagagatccttaccaccatgcgacgaggcgagggaacgacaacgacgaacgggcgcgcc

SEQ ID NO: 26301 - DNA, 9366 bp, Oryza sativa
acgatggaccgcgaaggggttcggtcgaaggggaggcgaggccgagggcgaccttgccgctgcgatgccggaggtggagacggcgacgtcggccggtgcactggcacggcgaaaggggctgccggagtgggtgccgacgagaccgagggagaggcggcgcgcgcgacggcgttccgacgaaatacgggcgacgccgtggcttggccggggaagaggatggcgttccgatgccgggagaggtggtggcaacgtcggccggcgcacaggggacgcggcagaggcggccggaggcggaacagtggcggcaacgccactgttgccggcggggatgcacgtccggaggtcttcgcgggaaacagagggcatgccggcgaagaggaggtggctgcgacgctggaggaggcgacggcacggccggccggcgtgctaatacggcggcaggggcggctgaagacggccggcggcacgggagagaggggacgacggcggggaggtggctagggaccacgggagatcgcgggagggggctaaaacgatagaacggagcgagaggattccgttttatagcggagggaagcgagccgagcatgggaggagcggggaacggcggcggaaatggcggccggcggccatggaaagcggccggagttggcgcgtccgttcccggcgattggaggcgccattcaagggggaattaagggggaaatagagaggagggaaaggggattaattccccctaatcaattttggaattcccggtttgaatcgtgcggatttgagggaggaaatggctagggttcacggagtaggaggaggctgggcgggaggaggacgacgacctggcgcgtgggccccacgcgggcgcgcggtcagcgcgtgcacgtgcgcggcacggtcgggagggcgcccctcggcttgggcccggaggcggcccaggaggagaggagggagaggcagcccgggagggagagggaggaggagggagtgggccgggagggggagggaaaaagaaagggaggagggaatgacttcggccgcgggcctggggagagagagggaggctttgggctagacttggcccaaaggaaaaggaggattatttttaggttttctttttattaagctttgataattgtttttgttgcttaataaatatttccggtgctctgaaaattcaagtaaaatttgagggctcattttagaccaaggagaatttaacaaaaattctccgggccacattcgaatttttcttatacgtattttagtgtttgccaatttctttttgaattttaatttattctattattccttttagggaatgatttttatttcgggatgaatttatcaggacgtgacaccatggacactcaagatgtagcaatgattgaagccgactggagagagccccttatacgatttctgaccaaacaagaactccctcaagataaagatgaagccgagcgaatctctaggcgcagtaggctctatattattcatgagaccgagctgtacaagaaaagcccatcaggaatcttgcaatgctgcgtgtccttagaggaggggagacaattgttaaacgatatacattccggcatctgtggcaatcatgctgccgcacggaccattgttggcaaggcttaccggcaaggttttttctggcccacagctgtgtccgatgccgacaaaattgtgcggacatgtgagggttgccaattttttgccagacaaactcatcttccagcttaagagttatagactatcccgttgtcttggccgtttgcggtttgggcccttgacatggtcggcccgtttaaaaaggcaatcggcagttatactcatctctttgtagctgttgacaaattctccaagtggattgaagctaaaccggtcatcacaatcacggcagacaaggctagagatttcttcataaatattgtgcaccggtttggggtacctaatcggatcatcactgataatggcactcaattcactagcggagtatttaaatacttttgtgaagacttcggcattaaaatctgttatgcctacgtagcacaccccatgagcaatggacaggtagaacgagccaatggaatggtactccaaggaataaaggcacgagttttcgaccgactgaatccttatgccggcaagtgggtggaacagctgccgcctgtactttggtccttgcgcactactcccagtcgggccacgggccagtcgccattcttcctagtttacggggcagaagcaatgttgtctagtgaggtggaattcaaatctttacgttttcgcaacttttgcgaggagcactacggagcagaccgagtagatgatctgaaacgactggaagaggcccgcgaagcagccttaattcagttgactcgatatttgcaaggattgcgccgttatcataatcgcaacgttcgatcacgagcattcttagtcggcgacctggttctgagaaaaattcaaactacacgagatcggcacaagttatcccccttatgggaaggtccatttataatctccgaagtcactcggccaggttcctatcgactcaagcgtgaagacggtacttctatcgacaactcctggaatatcgaacatcttcatcgtttttatgcttaagcattacttttgtatttccctattttgactgctaacatcaagctttcccttgaagttatcagtcgggggctactataataataatggagtatgatttttatcaattcaatttgcttacttgatttatcattgccttgattaattttttggcttagtcagtgaggactgaaagttttttaatagcttttgctggttttaggctcaataaggtttgacaaaagcttttaagaaatcagaagctaagttcaaaatattgagcacagcataaattcatcagtattgtacaaattgttcctccatcatcatcatcatcagaatcattgttatgacataacatcaatcggtatcagttttttcatcatcagagttatcagatccagtcggccgaaggtcgttgtcctggaatctttcaactacatcaaatgctatcttatcagcggctttctgcgcatcattgatgaggtcaagagcagcttcttcgctcgtcccatctacaaagccatcaatggcgtcaatgtcgatcttcgggtacaaggacttggtcattgccaacgccaggcttgcccccatacttccagcctctttgatattcttaaaatatgtatccagagtaactctcagcttgtcgaagatttcggaagcatcaaatgtactcggaccattgttattgaagaacatggcttggacgagtggggtagcagcgttggcgacttcatccctggctccttcaagcctcttgattttgttgactaagacatcgaattgggcctgcgacttgattttgcggtctgcataaacagatccatatcaatgagcaagcataaagaggataatggcttttggagtattgattgctggtaccttcaacgtctttcaaagccgagtccctctgccttgccaattcagccttgtcattttccagagtttggatctgcttttccagttgagatatcttggcagcttgcactatattgcctctggttaattgatattacaaagatggcagcataaataagttggacagagattgtgtgtaccttttgaggagccactcagttcgaagttggagtcttgcagctcggcgatccgatctctcagaacatgttcagttttcctagcgagctccctagcttcgtgtagctggtttctggtagcctcaagggttccaaggtggggaactaacctctcaagagttgcagttttcgcttcgttcctgagatggattctctgcaatacaattttatcggcatttgagctgagtggcaaacaggattgttgaggccgtgcatgagggaacttacgtttacaatgcgagtagcctggctgagtgcctttttcagtaggcatacttcctcatcttctttttgcttgtttatcacgattctctaaggttgcatatcgtcatcccaccacttgactagaatgggaaggcgagaatcttcagctgctcgtatccggaggactttttcttcatcaccaatcattggcccttgtatattcatgaataaaggtgagacaatcgaatgaagtctgttagatcaaaatgatttcaaagaatatgtttacctgtgatgatttccggtcggggacgagtagtcttttgtactttaacaggagaactggaccctgggtcattactggtatcatttctcggagggctgtccgtttgagttccaacttcagggatctctcagtttggttctgcgcccgactggtttccagtcgggggcacctgattaaccccgattctagcttcggccgactggtttccagtcaggggctcgtcgctgggttttacattgtcgggatccggctgattattacttgggtgatcttctgcggtcggctcggtctcttttgaaggacccgtctccatgtcagttggttcagaatcttttccagaaggatctatgtcagatggcttcctacaagtttgagttacgccattattattgcttcaatagtgggtgagcagcgctacgagggaggtagtcaaacaatttgtacctagaagatttcctgatctttggtattggacgactagatgttttcttcttagggttggtttgccttggcagttttctggttgcccctttattgctggattttccagcatcatcgccttcatcatcactcaggaccaatttcctcttgcgcgagtccgataggatggttgattttgagatgtttgattgggtttcagaccggatttttggtcctccgcttgcctgaccagtctgctggcgaggtgatcggcgttgggtaatcggagggtttgatttcatcaaggcgaattcctgggtatgatgattcaagctttttatcaaccttgcagataatgaaagaatgcttagaaacgagctgggattttaaatacataccggtggagggggattgaaggcattgtatggcaccacaggcagcaagtgcgaatagctgactacaattgcattggagaagattttatacatcctctccttcatgaccttgaattcaagagattcgggatcttcatggttagggtcatgtttgccgtcgaattcaaaggctgtgcgagatctttctttgataggagctagccggctcttgatgaagtgccgggtgatttgttctccttgcagaccttgctcctttagctttagcatgtgatccatcagggcgagcgcttgggtggcttcttctcccatttgaagtgaattccaggtgtcctgataaactggagggagacaggagtactcggggagtgcaggctcggggttttgtacataaaaccaattcgcatgccagcctttgtttgaagttttaaacggcatggagaaatacttttggctcagagttccccttagttggaatccagctcccccaactacgcatggcttacttttgtttggttggggcttgaggaagaagatgcgacggaatagggcaaagtgtggcctaatgcccaaaaaaccttcgcagacgtgaataaagttggcaatgtgaactatggagttcaggtttaagtgatgcgggctaatcccatagaaattcagaattccccggaagaatcttgaggttggaagagaaaatccgccatagaagaaatgagaaaatatcacaacttcatgtgtgtcgggggtcgggaacgcttcgtcgaatgctggacgccacccaatgatttccttcgccggaagaacgccgtgcgccaccatttccttcaggttttcctctattacatcggagggcgcccattggctctcgaagctttctctctcctccgccatggatgcgaattgggtgatgcgatttgctttggaaatggcagagagtggatgagggatcagtgcggtggttgcgcggaaggttttttgtggagttttggaggatggattggagcagatcgatgaaccctagctttgccggcgcaattttgcactgtagcaggaaatggggaaagtggcgagagtctcggcgaggaagacgaagagacgttttatttctctttggcgttattagggtatcaggagtactaatgggcttgggcctaaaaacagtacttcagcccaattctattttcagcgtggcttgttgtgatccctggggaattaggcattttttgctttggcaatttgtgctcacaatggtgtggcccgatgctgttaaaatcctttttaatgcagttagatgatcctttggaatcactacgatgcgaacaaaaaggtacccaacagaaaagtgttatactatttttgtaagcttttttaggctgcaaaagctgtttgggttgattcgagatgattagttttctcatggtcattctcttagcatgttatatgcttattttgattatggtgagagtcatagcctaagctgtttagactcgttaattgccatgattcttatcatatttggtggatcatcttaagagttttttactcggattcttgtcaaatatgtttatttatggaccttaggagtgtctatcactcgggctttctcatatttccgttcttggtatgttaaagctaaaagcagtcggctggatgttttattgaatgccgcatatgctttgttatatgatgtttggttgtaaaaccacttggttcttgactatatgtttagttttctaactaaccacatagtctggggctacacctaattaggtgcatctagtcgatgcacccggttttttctattttaaaccttcacagtctttggttttggtattcggagatctatacagaagaaattgaagcactgggattattactttatgttccaagagaaggctatttcgtcgactgcaaagatctcgggggctactgtggagattatggataccccatatctacacggcatgtatagtccgactgggtacaaggtaccatgtatagatagaatatcttcaagaggactcgggttaagtttaaacttgtatgtcaaggaaatatccgagattctagttggttacgattgtattttatctgtaattacatattccgttagggatatgggctgtattttgtaatacggaccccttccgctatataaggaggggtccgaatccctctagggacacgttttttctcccagatcatatgatcaataatacactcggcggatcaatccccggacagaagtagggtattacttcttgattaagaaggcctgaacctgtataaaattccttgtctctaaacccatccacttttccagcttaatagccaccccttttagtattgccgaaatcttgtttcgacacaagagtaggtaattggtggccaacacgtcctttttctttttcaaagagtaggtaattcgtgatgagagtggtggtagattcaccttttttttacgtggaaagagtaggggaagccccagggtgattttcatttaataaaaacaaaaattgtacaagagagattatagattgtcaatccatgtttgaagataaggtctggaaactaatctaagcttaggtaaatgtagacttagttcctccttgagagtggtagattcaccattcattcctaaaagagacgtatatttttctcgactataaacttcttatctattgtctatttgtgtcaatattagatatgtgtgcacgtacgtgtgcatatatctgtccgctcagaaaatttatacggaagcgtctaaattttgacggcatgaaattttcattaattccagtccctttgatgataatccaatttttctgatctaacttgctacttattagctatcactcactccagtgattgaacaataaactattatacgtgaactattatgacgtaaacaatttacaaaattacaaggaacaaacttataactcaaaaaaattacaaaattacatgaaaaaagttaaatagataaaaataaaataaagttacaattaaaagaaactaaaaattgtacatttatagcaccataattttaagtgttgtactttttgagtggaagctggtagcaaaatttatccaactacgaaagtagctcgcgcacatgtatggacatcttatttaatattgcttatatttttattacaatggtttatatccgggtgatattttttactaaatattatttgactccttttgaaatatgtatttcttagttatttgtttgggcattgactatgattttctactaattacccttacaacatataaattttaaactataaaattatttagaaccgtctagtattgaatttattaaaaaaaatattatgttacaataaagaagttgattcctatctattttcaaccatgtgtttcttttttaaaaaatatttagtgatgtggactagggttcccaaccttccgaaggttgtgataaacatttgatttggtagagtcacgacacaaatcaatccggcttctgaacgaacacgctcttgagccccgcaatcgcaacaccacgtctcctctaattatcaaccgtgtcgaaacccagttgacctcgccgagaaggctaatccctgcttgcgaatcgaagaacacaaacaagaacaagaaaaaatacaaccaaattgcagaggaatgattaagctcacacgttggagtcttataaaccgaaggatcggcgaaactgttcttgacagattaatctaagcaaaacccaaaacctaaaggtggtggtggctactaatatatagagtttagggtcatgcaaacaacccttgagcaactctaatgagctccaacacgatacacggctcaaaggccataatacggaacaaattctatacgtcaactttttcggttgattcccgattacttggaaagaatttggatatgggacaagaaccattggaaaggctatcttcttagctttccatccatataaagaacgccccaatccgagtacgtatgcgacctagaagcccgttttactgcagactagtcctagactccgagacgtactcgaagtcgatttggcttgggcctccatcttgacttggacgcctttgctgatcctccatgcctctaagtccctctctaagtgtctccttgtcctctccattgttcctaattttaatataataattaggtagcaatctattctcaaaatcatataagaaagaaaataggaatgagctcacctctaaatttaattgtcgcacgcaagctcttgtgattggtccttgaatgaacggtggagaattgttgtgtatatctgaaggagagatatccttatcatttagcatatttttttgagttttcaaacatcaagtaatactttttt

SEQ ID NO: 26302 - DNA, 8870 bp, Oryza sativa
agtaccaaaatgtaccaggatctcaaggaaagattttggtgggcaagtatgaagcgtgaaatcgcagaatacgtagcagtatgtgatgtttgtcagcgagtcaaggcagaacatcagaaacccgccggtttgttgcagcctttgaagattcctgaatggaaatgggaggaaatcggtatggatttcatcactggtttacccagaaagtcatcaggccatgactctatttgggtgatagtcgacagacttaccaaagtggctcatttcatcccagtaaagacaacctattccggaagtcggttggcggaattgtatatggcaaggattgtgtgtttgcatggcgtccctaagaaaatagtgtctgatcgaggcagtcggtttacttcaaatttttggaagaagcttcaggaagagatgggttctaagctgaactttagtactgcttatcatccgcagacagacggacaaaccgaaagggtgaatcagattttggaagacatgttgagagcttgtgctttagacttcggtggaagttgggataagaatctaccttatgcagaattttcgtacaacaatagttatcaagctagtcttcagatggctccttacgaagcactgtatggtcggaagtgtcgcactctgcttttgtgggatcaaacgggagaacgtcaggttttcgggacggatatcctaagggaagcagaagaaaaggtaaagatcattcaagaaagattgcgtgtggctcagtctcgtcataagagttatgccgacaatcaccgcagagatttgagttttgacgaaggagattatgtgtatcttcgtgtcacgccttttcgaggagttcatcgtttccacaccaaaggaaaattggcaccgcgttttgtgggaccttataagattgtcagtagaagaggagaggttgcttatcagttggagttacctcaatttttggcaggagtccataatgtgttccatgtgtcgcaattgaaaaagtgtttaagggtacctaccgaagaagctaatcttgaacagatagaagtccaagaggatctgacctatgttgagaaaccaatccgtatcttggaaatagatgagagaagaaccagaaatcgagttatccgtttttgcaaggtccaatggagtaatcactcggaagaagaattaacttgggaacgagaagatgaattgaagtcagctcatccgcatttgttcgccagttcttccgaatctcgaggacgagattctgtttaaggggggtaggtttgtcacaccctaaaaattcaaaatatataaattgttgtttaattggaatttttagaaatgattttaaaaagcctagaagagaagatctaattttaattaataaattccaatataaaatggggccagataaaatttcattaaatactttataatttctagatttttctgggatttatttgagttaaggaagtatttttaataaatggaattgcatttcatgaataatttaaattgaaaaaggtttttaaaagtctcttttggctttgggccgaaagtcggcccaaaaccttctctctctccccggcccaagtcggcccagtccgcagccgcccgcgcgcgcgctcgctgtcgctgacaggtgggtcccgcctgtcggagtcgtcgtcttcgtcgcgccgccgccgcccgaaaccctagccgagccgcgccgccgtctgtttccaaattcggccgcgtctttccttctccggtgaaatcaatagaggggaaatgatcttcgggatctcctctaccttttctcttttggaatcaccggctaaaatcgtttggaaattcgtggattcgagttcgattcggatcggcctctttcctccgaaccccgacctttccttctcgtcaccggcagccgtgggcctttgccgccgctctccaacccctttaaaaggatccccggtgtcgccgctacccgtcgccaccctcgcctttgcctctcgtcgtccgtagcgccctagcgccgtgtaacctcgagccgccgtcgtcgccgccgctccagccgtgcgccgccgccgttccagtcgtcgccgtcgctcggggagatcgccatcgttgtcgccatcgcgtcgccgttcttgtccgccccttcgccgtcgctattgaccgccggagcatcgtcgtcgtcgtcaagccgaagatctgcgccgcctttcctcgtcgccgtcgacgtccgttgatcttccgccgcttctttggtcaccggtgagttcgccgcgtcgcgctctacgtcctggtgccctccgttctcgtcgtcgcgccgttgttcgccggcgagcgtgcgccgtccgagccgccgccggtggtgacgtcaccgctgacgtcatcgttgccgtccgtcgtggtccggtcgtggaccgatggatctcggtcgtccgatttggatggatcgatctcggccgttcgttcccgtgaaccgccgccgtgcgctcggtccaccgcaaaccctagccgctgacgcaataaatcctttttccttttcaaaaataattcattattgcgtcataattcaattaaaatctatataagtgttttaatccgattaaatcttcaaaaattcataactaattcatcttagctcggatttagttggttcaagtctctaaatttttctaaaattgagatctacatgttaaaaatatccacatgtactgttcatgcttgtttatgtgctgttttggtgattttgctcttttctgtttagattccgtcgtttccggagagtccgttttcgcaggagaagaatttgaagagttccaaggccagcaaggcaactcacacagatcccaaacaaccctttgagcatattgatcccgtttaaagctactgtttctattcaactattgcatttattttcgaatgtcattaggtggaattaacctattgtttgttatagctcttttgttcttgattactttattccttgataccttgggttattataacttgactagttggtctatatatattggttcagctagatattagatatgattgcttagccatgcttagaaacattagcacactattgggataacttatgactcactattatttaatgatggcttaatgatagttcacgatggtcaatcgtgattggttaattaattacttgccaactaaaatatgataatggtgggttgtgagcacatggttttgagagacgtgctcatgacaattaaggaccggttcacgagtttcggttgtgaaacattaaccgtgccaaccacaagccaacgtgggcaacggctttaccttttgtatagcatggttcattgcggggcaccagactgagaagtggcggagataagcccacgggggtcgctagggagtccatgccttgttttataagggggtgattatgatccaggaatggtgcactgtggtgagttgtgttgtgcgaagggtattgtcacgatttccccctttgcagtgccgtggtggtacttcagggcatggcaacatgtgtgaaatcgtgtcttgtgggtacagtggtacatctttggccagagtaaaactattcgaatagccgtgcccacggtcatgggcgggtctaacaatgtctttcatgattagtctcacacctctcatcataataaaagatgctttaattggtaataatttggttagctcctggtttggaatggtatattcctggtttggagatagaactgtacagccgggatggttgttcagtatggttgggcctatgcaacagggtatgttgtatagcgttggattaatattgtttaattattacttaactgttttattaaattctgaaatgtttattaaatgttgtttatgaaaatgaaaccctactatgccatcctttgttatcctgtgcacttgcatatttgctgcgtggcttgctgagtatgtcatatactcaccttgcaatcattcatcagaggaagagttctacaatgatgctgatggtgtggaggattaggtgtagccctggtcaagctgcctgtggagtggagccgtttatcttattttccgctgcttagatctttattgattgagaggaactatctacctctgtaatgacactttattcgcttattaattagagtaataatgttactctattatcaatttgttattgtgtgcctcggctgattcctgtacgagggtttacacacatgtaagcgtttggaattttggatagaaattccgggcgtgacaagttggtatcagagcccccttgaccctaggttatgccaaatggttacccattgcaaaagtagaactgttctcctctccttctcttttaattaaaccaaactaatggcacatgcatttcatgatattttttagtggttctcattcaaaatttatttcagtgttattagtactgtacatctattactgtactaatggctcattttacccgcaaaagttttacaatattgttttatttaatcttgctgcaataaaataaatttagcatgttaattttataactttcttttatttcttttggaacccgatgttcaaaagtacaaaatttgtaaccttgtttccaactgtttcaacttatcttgcaagcttggtttattttatttacttacctttttactttgattttctaactttattcaaattaatccaaaaacttgtgctattaattggataaatgtcttaactccctcctttcacttgtctttagatgtcgcgctacaagcctgagtacttgtttggtgttgagggatttgttcagaagttgcgtacgatgtcctttgtcataggatttgggactgcccctttttatgcccagattcctcatgatcgtcacgaagagaagtgccgagtcaaagtcaccttgaacagtaatagtgaagatatcccctcagtgatgttcgaggctggaggaagaaactacatccatgcatgtcaggaggtggcaaggatcgccataggagagctccgcgatcgctacagtgatcagttggccgacagtgagtatcgctaccatcctcgccaaccacagggaagtgaccgtggcagctacctagagaccgagggaattgagaatgatgctaccacaaagcatttggttgagatgctgtgggctatggatgaaacccgtgcggagactgtgttagcggctcaagatcgtgaagaccggaatcgtggtaagatttgcaagctagaggacaaagtggatcgtttggagaaggaactagccgcattaaagggagaagcaccgccgcagaaggccaggattcgtcttaccgcaaggaagagagctctatttgtccctcgctaccaattggcgccaaaggtccgtgtggtggagaaagaagttaccccagccctagcggatcctccggtcatcaacataagtgatgatgaagaagaagaatccaagcacactcattccaagattgagtggggagcaactcaagatgatgaagacgagccgaacgagccttcaatcaactccgatccccggaagaattagagtgccatgtcaagtcgttgtcttagatcgttgtgttagtttgcttgttttaagtttggttgcgtgtgtctcgcatgtgatttacatcagtggtgggatgtaagtgcatgcgtttgtttgctttcgagtgttaggtagttggtgagtttagtggtgtgagagtctttagttttgtaataacgaaactcatttaagatcaataaaagttaaattaattccctgtcttaagtagttttccccggtttctcttcttgtgctcctgtccatgccagatggtgctcactcgcagcaacgggaatggccccaacaacaccaataataacaacaacaatggagagaatcccacacttgcccaagtcctggctcaacagacacagcttatgaacatgatgatgcagcaactccagaaccagcagaaccagggaaataaccatgcacctccccagaacaagttagcagaatttcttcgtgtgaggccgcctattttctctagtaccactaatcctgttgaagctggtgattggctgcatgccatagagaagaagttggatatgcttcaatgcacggatcaggagaaggtctcatttgcatcacaccagttgcatggccctgcctctgaatggtgggatcacttccgcctgaataggactactgctgaacctatcacttggcttgaattcaccgctgctttccggaagacgcatataccatcgggagtggtgtctctcaagaagaaggaattcaggtcgctcactcaggggtctcgctctgttacggagtatctgcacgagttcaatcgtctggctcgttatgctccagaagatgtgcacactgatgaagagcgccaagagaagttcttggaaggacttaatgatgagctttcttacccactcatgactggggattatcctgatttccagaagttggtggataaggctattcgtcaggaggacaagtacaatcgcatggagcagaagaaacgccggattgctcaattcaagacacaacaggggaataatcagaagccgcgtcttactttaggaccccagtctatgccacagggaggtttttcgtctgttgttcgtccgcagcgtcagttcttcaacaataacgcgggcaacaacatccgtaatcaagctccacgccctgttgcagctccaacacaacaacaacctgccaagaaggagcaaggcagcaagctcgtagtgtgtttcaactgtggagacccaggacattatgctgacaagtgtccgaagccccgacgcgtgaaggttgtccctgcccagagcaactctaccgcaccagcatcaaaggctcgtgtcaatcatgtcgctgctgcagaagctcaagatgctccagatgtgattttgggtacatttcttgttaacttagttcctgcaacagtgcttttcgattctggtgctacacattcattcttatctatgagttttgcgggaaatgatgggatggaagtagaagatcttagacgtcatttgatggttagtaccccaagtaatcaagcactctctttgcagcatagtccctctgtcagaatagaaattcaaggagtaccctttctggccaatcttatcctattagaatccaaagaccttgatgtcatcctagggatggactggttagccagacataaaggtgtgatagactgtgctaacagaaaagtaactctcaccagcaatgatggacgagttgtaactattcatgcattgtcatctgagtctttaaggccaagtctgaaccaaataactttggaagagattcctacagtccgggagtatcccgatgtgttcccagacgatttacctggtatgccgactaaaagggatatagagttcagaatagatttggtaccaggaacaactccgatccataagagaccttatagaatggcagccaatgaattagcagaagtcaagaggcaagtagacgatttgcttcagaaagggtacatcagaccgagttcatttccatggggagctccggttatttttgtggaaaagaaagatcatacccagaggatgtgtgtggattatcgtgcactaaatgatgtgactatcaagaataagtatccgctacccagaattgatgatttgtttgatcagcttaaaggtgccaccgttttctccaagatagatcttcgatcaaggtatcaccagttgagaattaaagaggaagatatacctaagacagcttttaccactaggtatggattgttcgaatgtactgttatgtcttttggacttaccattgcccccgctttcttcatgaacttgatgaataaggtgtttatggaatacctagacaagtttgtgttggtctttattgatgacattcttatctactctcgaacaaaagaagagcatgaagaacatcttcgccttgtactagagaagctacgagaacatcaactgtatgctaagtttagcaagtgtgaattttggttgtctgaagtgaagttccttggtcacgtcatctcagccggaggagttgccgttgatcctagtaatgtggaatccgtaaccaactggaaacaaccaaagacagtttcagagattcgtagtttcctaggcctcgcaggttattatcggaggtttatagagaatttttccaagattgctaagcccaggacacgattgcttcagaaagatgtgaagtacaagtggtcagaagaatgtgagcagagttttcaagagttgaagaatcgcttaatatcagctcctattttgattttgcctgatccaaagaagggtttccaagtgtattgcgatgcatccaaacatgggttaggttgtgttctgatgcaagatgggaaggtggttgcctatgcatctcgtcagttacgtccgcatgagaagaactaccctactcatgatcttgaattagctgcagtagttcatgcgttgaaaatttggcgtcattatcttttcggtactcgtacagaggtatataccgatcacaagagtttaaagtatatctttactcagccggatctgaacatgagacaacggagatggttggaattaattaaggattatgacatgggaattcattatcacccgggaaaggctaatgttgtagcagacgctcttagcaggaaaggctattgcaatgctacggaaggacgacagttgccattggaattatgcaaggaatttgaaagattaaatttgggaattgtccgaagaggtttcgttgcagccttagaagcgaagcccactctaattgatcaagttagagaagcccaaattaatgatcttgatattcaagaaatcaagaagaatatgagaagaggaaaagctatcggtttcatggaggatgagcaaggaactgtatggttgggtgagagaat

SEQ ID NO: 26303 - DNA, 852 bp, Oryza sativa
ttacagcattcacagttgtatatcctgtccaacacatttgcagctacaatgaatgcccttgatccataattcctaacaggacctccattcggttctactagatacatgttttcagaagttcaggtcaatttatatgatgttgaagcaataagctctttttgaaatctgttgaatataggccttgtgtagacctccaatgcttttgtttccatgggatagttagcccacatagaagggattgtttcttctgcttcaaactcattctgatctgttgcaacagtgattttttcttgaatcttcttgtactgcaaaaataagttgtatatgctgttttgaggatttacatagcgcttcagcactgcgttaaatccctcactccgtgctgtagtctgaaggaaagggaagaaacagtgcataaagtatgctgggacccaacaccgtctcatttcccaaaggtgtcggaagtgctcactatcttgtaaatgatatgttgtcaacattgcatcccatttagcatcaaactcttgctctgtccagctgttgtcaaggcagtcattgaatgcatcacacaatgctttgtcatgatctaatatatggccaatcttcttctgagcattctgcattatatgccagcagcagttgcgatgcttagcatgtgggaaaactagcgctatagctgccttcatagctaggtcttgatcagttattatgtttgtgggctctacaccttccatagcctctagaaatgcttgaaacaaccatacaaaggtttctgtcttttcattccatagaaatccacaacccagctgaatatcaaaaataatacacataaggaagtcagtacagttttga

SEQ ID NO: 26304 - DNA, 1047 bp, Oryza sativa
tccagcaagaacctagttctgccagttgaggacggaggaggtctgcaggaactctcctcactccagtcactcaggatttcagattgtggcagaatgttctctcgatggtgcatggtcgatgcaggagctcgtaccagcaagcccctcccttcttccctcagggagctcagtatttgtagagagtcaagcatgcagtcgatggctctgctctcaaacctcacatctctcacacatcttacactattggaatgtgaagacttaacagtagatggatttgatcctctcattacactcaacctcaaggaattggtggttttaaataattgttatgagaacaattattcttgttccatagcagcagatttgctctcagaaatgacaaggaccaaagtattatctgcaggttccttacaactggaagcacttaaggtggacaatatctcaggagtgcttgttccctccatttgcagcctccttgccgccaacctccacaagttaattttcaaatctgacttgcagatggaaagcttcgatgaagaacaagagcatgcgcttcagctcctcacctccctcaagcaactatattttgccgactgcccaagtctgctttccctccccgatgggttgcatcacatttcttctctccagaaattgcacatatataattgtcctaaaattggattcctacccaaggagggcttcccctcttcattgagagatctagtgttatcagagtgtagcgtcgatctacaagatcaattgaagaaattggagacatcaaacccagatttatttgtacaccacatgaggtaaaaaggaaagaaaaagaagtgttctctcaactactacttatttcagcatccatctgtaaccttcaatactaaactaaaactgctctgctttgtttcctactttgctgtgaaggatgggccgaatcagtctggagatatagcggactatctgcatccgcatgcgagtaactcaatagcacatgcgggccaaaggatcgatcggttcttccctctgcaacaatctggaaggttcttg

SEQ ID NO: 26305 - DNA, 6927 bp, Oryza sativa
tgaaaaatgcaataaaaaatctgttctgcaagttcaggacccactattttattggcaggttctcttctccagaaaaaaagtcaatacattttccaaatcagtgatgcatctgtgcgttgatcctgtctgacttgctgtttctcaggttgcaacagaagcagaccttggtttagcagatgcctacataaatggctgcttctcttttgtcaataagagagaaggccttctgaatcttttccttgtaatactatatattttagttcattactttcttggtaaagcaatatccatagtgctatttattaatcggttttcagacttaacccatcaggcttttttactgcagatcctcattgccagtagagatgcacacaggagttcttgcaggaattctagtcgaaggtatcaagtcctctgctcttcactaaatccctttcgactgtttgatcaaaatgaagtagcatatgttgtgtgagattatcagtttgataaaaatattgccttgttctcaggggttggtggacacccttgctttttactgccggcgttgcatctgctaaatattttctgcgtcacatctcaaggaagaactctgtaacacaaactcgtcaaaatgtctctcagcactatgatttggtcagtttgtatatgtccttttttaattatctatcaaaattaacagatctaactccttgctgaatgatgacttagctcaaaatagttagcatgttgatgctttctctgcctatacagcttctggatgcttgataattttctttaattcccatgtctacataattgactagtcaacaagagttaccctttcttatcctatatattttacctgcagagtaatgatttcttctcgctttttctggataagtcaatgacctactcatctgccattttcaaggtaagtgaaacatatgaatttttccgcagcttgtaaattatcataagaatatgttggactaatgcacagttgatttattgccctattaatttgttaggatgaggaagaaagcttagaagaggctcagctgcgtaaaataaaccttctaatccataaggtgataattctatcatatagtagtttttgtgtttccacctatctctctctcaccacataatgagagagaacatatgtcttgatcgatatttactatgaagatgaacccgaccctttcttatctatatacatggtctgatgttccttcaatcttttacatgtccacttaatgaaaggctaaagtgggacaggatgatgaagttcttgagattggtagtggttggggcagtttggctatggaagtggtgaagcaaactggctgcaaatatacaggagttacacagtctgtggagcaacttaaatatgcccaaagaagggtgaaagaagctggcttagaggttgcgtactatttactctctctccctttcacatcatctgcgcatatgatttactggaatcagttttagtgttagtttagtctcctatttaaatatgtatggtgaaatccctgataagttagcattaataataactatatatttttatttattatcaggaccgaataacttttctgctgtgtgactaccgtgaaataccatgtcacaaatatgacaggatcatatgctggtaagtactagtactaccatgtgagtttcaattgaaatagagtaatcaagttggttttctcccatcacctgaaaaataaagttggttatcatcgatcaacactgggtacatgttcatgtgattccgccagttactaattgcttccagcctattgcataattcatcagtgagatgattgaagaagttggtcatgaatacatggatgaattctttggctgctgtgagtcccttttggctgaaaatggcatatttgtcacccaggtgtgtacaaacaacctttgtcattgtcattgacactgactgttgatatatcccacttaaatttacatgggattattccagtttatctcaattccggaggaacggtatgatgagtaccggagaagctcagactttattaaagaatacatattccctggtggatgccttccttctctgactcggataacatctgccatgtctgctgcatcaaggctctggtatgttcaagatcagtcaattgatgctcaatacaatacagtgctcacactcgtacattgatttattggttttggattggatgcacgtcgagttcatttgcagcattgagcacgttgagaatattgggtaccattattatacaactctgatacgctggagggacaacttcatggccaataaagagtaagtacaagcatggccttctactcaaagtgagcaactagtaccaatagggtatgtgttacacagaggcccaaaagagttgaaatttcagaaattttagtcaaagcacagaccctgccttgtactttggcagtgttaaaagtgtcctttccaatttcttttatctccaattgaacaataatgttaaaatgatagccatagtgtgttctagcaaattaccataaaacaagagtgtcctatggcaaagacatgtttttgaaatgtcttacggcaaatggcacaaaattatggtgccataagcctgctgagcaagcaaatgcagaaagtagcagttcaaaaatccaaagtatgaacacacagtatggcagttcagagtttacacagaatttccctcttgtattttcagtaaaattttggccctgggctttgatgagaagttcattcgtacatgggagtactatttcatatactgcgcagccggttttaaatccaggacacttggagactaccaggcaagtactgtactactgtacgtatgaacatatatagagaactatttattactcacttggttgcttgaccctttcagattgtattctctcgtcctgggaacaccaagatgggatctggcttctaaactcaaaattgacctctgccctagagcacgagccaacctatttatctttgccattgtgtaataatttacaggaaactttggtcttcatgcttgaagatcatgtttgaaaaaaaatgaataagtctatatttgaaatccttcaactattggcgactcaatccatgaactttaaaacaggacaaagtacaaccctggagaaattaccgccattgcttgtttaaggcatgttctgtgccatgtcacccttgtttggaggggtgactagtaaatattctgatgatctattacctcaaataaattccatatggtgtatatacacgatgcaagatgcattgcttgtcctagcattgttcttgccatttgagcgcattaaagatatgttgggtttggttggttttaaaaatgaaggttaccatattttggtaatgtgaattttctgtacggaagaatgatttgaatgtgttaagagaaacatggaggtgtttgcaagcggatttgattatggatattttgagagttcacaaattactagcatatgatgtcgtgcattcgcgtgactatatgcctcctattacgtggcatgtgggggtggcaatccatttttcatgggtttctcatcgctataaagaaaaaacataagtcatttattgcaaaattcatatttgcctgagtcattgttttatatgtcatcgtggttgcaaaaccccttattttctattgcgtgcactctttatagcctacgtataaatttttgtatgtttttaaggcatgagtttgggttcattttaaattcgtgtgaaaatcatgattgtgcatgtagaaatattttcctcaaatatattaacaattaaaatatttattgtaaaattcatatttgcccgagtcattgttttatatgtcttcgcggttgcataaccccttattttctattgcatgcactttttatagcctacgtataaatttttgtatgtttttaaggcatgagtttgggttgattttaaattagtgtgaaaatcatgattgtgcatgtagaaatattttcctcaaatatattaacaattaattgttccaaacaaaattaattatatgaacgtacatttgtatatgttcttaaatagctcaatcttgacaggtgaatataagagagtttatttataaaatagttttttttattataggagcaaatcgtaaattatatgtataaccttgtaccatcctatgtctattttctatctttttttccttcctttctttcctcttctaatagctttgtctccaaaagcctctttaattattgattttaccatccatttaatccaatagtcaagattcatttattcttttccgtcctatagtgaatccaatggcaaatatttatcgaatgatgtggctcattctcgttttattttgagtgtcacttttcattagtttgttaccggctactaaggtatttaaagtgttcggttatgttctcttattgaaatagcataagcatagccagagacactttgggcctattcagattgtagccaaaataaaccttaccaaattttggcaagttggcaatattgccaaaattttggcatgattccttatgtatttatcaaaatttagcaacaaattaaacgtatacacatttttggtaactttgccaaaaaaaggtatgattgaaaataacatcaatctgaacagcccctttgtgaagcgttttgtgttagtttatcttcaaggctttgtgtttacctgaactaggctgagttttacaaacgttgggaaagtttgggacaagatttggattacccagatatcgaaaaaggaatagctccatcatttcgtttaagcttatcaaatacaactaaaatttaaattttacatcttaattttataattttgattttttttatcgtactttattttctactattggcttttaactcttctcattgcatggcaaagatgcaaagatatatcactggcagatagagcagggtaatcagcacaacagtatattctacacccccatagaataacttaacatgacatgacatagaatttccattaatagtggatgacaatttacataaccaatgtttttctcaaacgattatatctagtccttatcattctcaaaccaaaagtaaatctttgaaatccatggagatgaatcgaatttcgcacgtatcaccaccatcgacgattcacgattgatgtcgaaccaaaacgaaagataatattactgtcaacggctaacatcaaaccagagcaaaagatcgataatgctgaagagtaactgagttgtacatataaagtcaatcttgtacagctatataataatacatgttcggaacatgcacacaacagcaagagagagaggcatgtgggagctcatgcttgtctcccaaatattccaaacttggaatccacagaaatagtattaaaaagagctcatcctcgttgtcaccttcaggttgatcctaagcatgccgacgtggatgctaaatccttccggattactgcacggatttgtatatctccccttcgatctccaccgaacttccagcccaatcatggtcgtcgttggatcgagctgatcatgtagctagcgtgtggtatcatgggccagattgtactgctaccacttcagaattaagccacctatgtcgtctctctcgctgcaggctgcagctgcctgcctttgatctttcttatctccttctcttcctcctcgatccatggtcaagtgatcgtatcttcaattcctacaatggcgatgccgtgggagacggtggcgtgcatcctgcggaacgtgtgggcgctgctcgacggctggatcgccgtctgctgcctcgccgccgacgagctcgcgggcctcctccgctcggcgctcggttagctgatcgacgacgtgctcgatcggcgcgcgtggccgatcgagctaactaactactccactaattaactgcaggttcgtcggttgctttatcattcttgctctggttgatcattgcttaattccttctcaagtaatgcttctgttcctgcatatgtgtatattttggacaatgcatgtttcttagttactccatctctctctctctctgcttaattagaccagtagaactttatttctgtggtaattttatcattcttaagaaagtatcgggagcaagggcggacccataattttaaagttgtgtattcgaaatataaaggagccaaaaaaattttaattagcatgcacgaatcatcgaaatgagccgctagacttgcacaaattaggccattagaggagagagaggatggagcaaggcctagaaatatggttttatttgttttatttaaatatatttatatataaatataattttattatatatatgtattacattgtatatacttattttgttttgtaaaaaaagaaatgaatacccttcgtccacctctgatcgggaggtaccatattttctattgtaaattcggtacatataagtagaaatatcttgaaataccaaaaattttattgtaaaatctcaatagctcgaggtactttctcattaaaccataaagtttctcttatttttcacataactcattttctcacttacatatgggacttggatcatcttgttggcacgaatttgctagcgagctatgataatgtacctgcttacatcatatgttcgctgcaggcagttggaaacatatctcccacgtatgaaaaatggagcggtccattagcacgtgattaattaagtactctctccgtcccaaaatataataacctaggatgggttccatcctaggactacgaatgagtcatatctagatttatagttttaggatggccatgtctagattgacccatcctaggttgctacattgtgggacggagggagtatttgctatttttttaaaaaaggatcgatatggttttttaagtaactttcatatagaaactttttgctaaaaacacaccgtttaatagtttgaa

SEQ ID NO: 26306 - DNA, 4757 bp, Oryza sativa
atgcagaggtacctagatatttaaggtggtgggagcccgacctaggtgccttaatagtcatgatcctcctggctgtggtgcgcccgcttttcaaactactaaacggtgcgtgttttgtaaaaattttctatagaaaagttgctttaaaaaatcatattaatcaaaatttatagtttttttagctaataactaattaatcatacattaatccattgctccattttacatgtcagaggtgagggtttcacctaggaacacggccaaggatgtgttcttggaaccctcaccttccgcacgaaaaacagagcgatggattagtgcatgattaattaagtattagctaaaaaactttttaaaaaaataggtcgctatgaattttgaaagcatctttactgcggaaaatttttacaaaaaatacatagttggtgaaacgtgtgtgtggaaaaaaggaaggagaggatgggaatcagctgagccgaacacaaccatatggtatctacagacgatttgtagtgatgaaacttgtttggtagcaatatacattattatcgaaaaccatcgtcatttgaacaaaaatcacatttgaacgaaaaccatcgtcatttcgacaaaaattacatttgaagataatattaatccggattcatgattttgagtttaaaagtttaccaggttttaaatttagcgttaatactgcactcagaacgaagtttgaggtaaacaactgaatttttcaaaataaaaataaaagccaaactctgcataagcttttgatttttttttttcaggggaacttcgcataaggtttagccgtcaagtatgctattgaatgaaataaccccctactcttctaaactgacaaacagtggaatcaaatcaaatagtatatatcagatagaaaaggttcaactttgaaattcattttgtctttgctgatttgtttatttaaaccgatgatcaccaaacgacagtggtatttccagcggggtatagatggccattggacattggacaaaatcaatcgagccaatcatacgtttgctattattggtcagaacatggccagatggacacatgtatgacaagtgatactatttatatataaattacatgagtaagcttgtcgtcaatcatgtagtaactgaaacatgatggtcgccagctctagtctgctacttgagactttgaattatgtgatttgaagaatcgactgatatcgatctgttttcgtgaaaaccacccacataaacaattgttttagaccctgggaagtgtaattttgtctcccttttcgatttcaggtctttcatgttgcacggagaagaggctgatcgatgtacagacaatttcttttttttctttgttaatgtaactatgttaatggtgaagtgatcatgcctttttgttctgaaaaagaaggtagatcaattaatgtacagacgtgaatgtgcaggatatatattgtaaattttgaacttcatttgttatagattaattattgatgtatacacgaggctctttagcagattttacttgttcactactccctccgtcccataaaaaaccaatctacttctagatgtgacatatcttgattctacgaatttggacatttatccaaatttatagtacagatatgccacattcgttttttatggggcggacgtagtacaccacaccaaaaaggaggccgctgtcggtattttttttcgctagcactcaggccttatttaattcgcgaaaagaaaatttttgtgtgtcatatcgaacatttgaccggatgtcagacggggttttgggacatgaatgaaaaaactaatttcataactcgcttggaaaccgcgagacgaatttattaagcctaattaatctgtcattagcacatgtgggttactatagcacttatggctaatcatggactaattaggctcaaaatattcgtctcgcgatttccaagcaaaatgtgcaattagtttttcattttatctatatttaatattctatgtatatatccgaagattcgatgtgatatttatgggaagaaaattttgggaactaaacaatgcctcgatatgccgggaaatgtcctgtcacagtgtctactggtgaaaattctgtggtagtagttgtttgtctgtcgacacgtgtagatatgcatctagcttgccaaagattctgaggcgacctaagagctattttagactctctatatgtccatttagccaactgtttaaaaaaattagctagtcatatttgccttttactccaatagtctctccatctcactctccaatcttatagtgggtcccacatgtcagtctctattacttctcccctttcccacatgagcccgcgtgcatgcggatgaggcggccacggaaggaggtcgacgaatccacggagggggtcgccatgcaagatcggcggtggtcgagacggcggtgggggctgcagccagagctccaaacggcagatccggcggcggcactcggcgggggattcggcgggcggatccggcggtggcactccctcgttgactcccctgtgccgtcggcgggcgaccgagcggacagatggcggaaatcggcggcgaagacgacgttgctgctgcttgcaccagcgagaggcggcggcgatgctgcgcctactcgtgccggcaagctcggcagcgagcgggcatacctctccatcggcgacggcgacgaggagtaggaggcgcatacgacgggaggcgacgacgatgggagtcagcttcgacgaggatttggccgccgccgccgccaccaagattggcgcctccgtcgtgccatccccgttcgccgccgctagctgctttgccgaggcgtgcggcggtgccgacgacgggcgccgggctgagaagggtgtggagccgaggaatccgggcggctgcgacccgcagcgccggtgggttggcgagacgacgctggtgacgaggagagcacgagtcagggacgcggaccggtggttcgacgcctcctccgagttcgacgccgccgtgccgcacagcatcgatgctgcgccgggaggacagcagcggtggcgctaggcggatggggcggcggcgctaggtgaatagggcgctgggaggatgacggcggcaacactgggaggatggggtggcggtgctgggcagatgggacgccgggaggacgtccggcggcggtgctgggcggatggggaaagggggagagagaggatagaggaggtgggacccacaccagatggcaagccgtcctggctagccaactttggtcaatgaggttgggaatttagccagtcggatggtttggagagccatttggctagtttgttggagtaaattttttatccaatttagctaaattttagcttggagaaccatttggctagtctcttatagatgctctagatagtggggcgggaaatgagaggcggcaaggagggaaaagtggcgggatgtgaaactttcagggctctctttcccccattccatttcctcgatctgaaatcaatccccacacaaaacacccacaccaaaccaatccccacaccagcagcccttcccccatccacaatagccatgatgcatcgcctctgctgcttcattgtccgtacgccgcctccaacgagctaagtgttcctgctcaacgacccaggaaagctttggacggagcacgagaagcacgaccttcacgcccctggctaagtctggcacacatggagaagagaagagaaaagaagagaagaggagagaaggaaaaaaggctattatagctagctacagcacgaacttcaatacgttatgtgtgtatgagatgtgagaccatatgttaatgatttatagataactaatgtatgaatgagctgttatattggctataaatgatttgtagctagtaattgggtatactattaaacttgctctgaggaagcaatggcttatctataaattttatatgaatggtccaacttatataatttttttaaacaccttaaatataactaagttagaaatatctattgattaaatatgtatcataatatatttataaaatatttataaaggagcttttttctcctttttttcaaaagtttattttcatatatctatactttctatattgttagtacccactgataattattacttcatctgtccctaaatataagggattttaataggatgtgatatattctgtccagattcgctgtactaagatatgtcacattccaccaaaatcccttatatttagagacggaggtagtaaaagctaaacctcaacatccaaacatgtcacctcatcagctactaacaatgagcatctaaaattttatacgagcatgacacatcatcttctcccccatattattttcatagcattttaacatcatcatttgtacaatattttacatatattcatgcatcaattccgtagcaaagcgtgaaataccacctaggtatatatatgcatttggctatgatttttgagtaaagtccatcaccggtccctaaacttgtaccgccgtgtcatcccggtccctaaactcgcaaatcgaccgttcaggtcctcaaacttgttcgactgtgtcatccggtccctaaacttacagatcactcgtttagatcctccaacttgttcagttgtgtcaccccggttcttaaacttggatttgaatatcatctaggtcaaataggatggtctaaagactttatatttaaaaataattcataactttttcatgtgaattctaatgaa

SEQ ID NO: 26307 - DNA, 15480 bp, Oryza sativa
attttctaaagctatgtttcttgtcatcacttgttctggataaataggtatctcacatttagtgatagcatgttatctttttgtcttcttgctgattagggttgcattattttaattaacatatttcctgtacataagagatatgtaataatactggatggtatgtttatctttgcctcttgctgatcagggttgcattgttttgattaacaacatatttcctatatagaagagatatttaataatactgaaactcattagctctttatattaaaaggacatatttcttagaagagagcttgtctaagcatggaagcagggttgaggccaaaagtggcattggaagagagcttgtctatgcatggaagcagggttgaggccgtgctgtagcgtgtagtttgacaacttgacatgttaaatgaaggttgtgccaaagtggcggatgctacgacgaaacactgtattaaaattaataaagttgtagcagtagaaagataatctgatgtaatattgtattttttttctgtacacatgataactcaactataatcaaaggatgtggctggctatttattctttagatggcttcgattgaacttttggctcttggaaggatgtatgccgctggaaagcagaaacatacaacaggaatggcttgcagcttgctgacaaatacttagcttgaatgcttgaatcaatgataaccaaaagagtattatagtcatggcagaaataatcaaaagacaatatatgtttcagtaaaggatattgatttaagacatgcaaaagaagtaatgataagaagagttatatattttgttgttaatacctcctattataaatatttgaggtttactctccggtagggtttaaaaaaaattcaaacttattagactggcttgataacaaaaatgtttggttttgtgttttcggcaagtttaaaaattcaaactgactttaaatttttgacaaaattcaaccatattttacctgaagtcaatggtttttgcagtaatcggttgggtcgttcgcggtgcatacttacccaaaaaaagattcatacttatctatcttgatttctcgaggaatagctcaaccattctttttggcatggatatgcattgtcctcgtatagtgtatattgaattgattagatataatcgttgatgatcttgaataaataattttaagttatatcataatatttttttgatatatgaccttggactgaaagcttaaatggacagattttaggaacattattttaattgcaatcgaattttaataacttattaagaaaaatgttatgacaccgtagcgttaggacgggtatattactagtcactataaggccccgttgtaagcgtagtagtcaacggatttttgctgtaaattatttgcaccatgcttttaaaaatacgatttctcatattggccgtgggtgatctgtttagactacttgttttaaactgttcgttggcacctttttggtaaatacgtactcaatcacttaaatatttacggtgctatgaaatattatcaaccacctcgacctagaaaagctcttgatcaagatgggtttagaaaagataaaaaccgactagcaaaactgatttagagatcaaacacttgttttgtgagtaaattggaagcatatcgcactttcacggtgaaggcatacgatttaccgtgcaaatgcataaagatggatgaactatgatattattaggtagaacataaagtagaaaacatgactgaaaaaagtttaggtaaaattatgattcgattcattgtccagtacaagagtcaggagttagaatcgaatcgaccgtagcccttacaaagcaggttggtcttacatccacaagcattctccatattaagcattctccatattttattttattcagagatcaactaggactaaataaaacctcatgtataagcaaacaaacacgaaaacaaccatagttttggatttggactcggggttgccggtccgaccactcaaacaactaaggtccgaccgtccctatgccgctggttggaccgacatcgtatagaaggcccaggtcctttaatttccaaatcccgctaaaatttactatattttgtacttggtgccatatttggttttcaacactgttttgttacgtttttgtaacccatgatatttaatttatcatcagtagaccatcgatcaacctccatccgcgtttcatccaattcagacgctacctaagaggttgtagtttcttcgtcaactacttcctccgtttcataatgtaagtctttctagtattgcttatattcatattgatgtaaataaatctaaatatatatgtgtgtttagattcattaatatctatatgaatgtggacaatgctagaaagttttacattataaaacggatggagtagacaatattacttggctagtaaactaagcttgatctgttctgccatcttctcatatgattttttttttcacaactaaatgaaaaaaaaaatgctgctgctagctacttacaaaagagatatatagcagccgcgtcagcttattgctggatgaatgatggagaataagtgaagaactacggtacacgcccgtgacttaccccctccgtcccataaaaaataaatctagtaccggatgtgacatattctggtacaattaatatggacatatgtatatccagattcatagtactagaatatgtcatatccggtactaggttgtttttttatgggacagagagagtagctgtagtttcgatcatgtcagacggtcggaggagccgttgaattcatattgtcagacgtttccataaacaaaaaaatccagctgtgtaggacaaattcttatggtgcaagtaagatgtgcatgcagatgcggttactatgcctatagaacaggaatagattagtctctcgaaagaatatcgcattgttttttcatgttatttaaatagttataagaaaattaaaaaaaattgataagataaattaatgtaggatatataattcgagaatctattttataccactgagtttgtcatagttcaacaatttaccattgacattctctttttataatatactgatgacttatcaattattcaacaatacgcctttggcctccttaaaaaaatatgaaagtttatatataggttttatttttttttacattttgacatttttaaaatataacttatatgttatatgctatctaaaatgctttttttttgtgtttttgtttttaatgtaaattatctttaacatgctccataagattttttttctattatctcttgtgtaagcagtttgtctcgatatacctaaaaatatttttcctaaagtataaaaataccaaaaaaaacttaaaacttattatatacaaacttctctgttgtgtaagaaggtcaaataaaaagtttcatattttgttttaaattctaatgagataaattaattgttagcctcgtatgtctctaagggtattttggttttttttctgaaaaaggctcagcacagtggtatattataaaataattgataaaatcactggtattgttgatttctagtatcggcaatataatttataaagtgcactagatcaatgagagatggtgacacaaatttatactggttcataccctcgagatgtggtaataccctactcaagttggtgcagattggatctatgccggtgtgcgcaagtcagtgatgaagcagccaatggcgcgtataaatgacggagtgtctaacccctaagggtttctcccggcgcggcgccctttatataaagctagtgtcaccggtagccagttgatacatgccatctatttacaagggataagattgatttccctatcctatatctctttcttagattacaagttagccgcatgggcgttgggcacttggcccatcccatgccgcacagcccaaaggcctttccttaggtacccaggtaccatgtaccccataggtaatattgtagaaagagaatattagtagtaaatcgttgaatgagataaactcagtggcatataggtagattctctcaactctataagcaagcaacttaaaattcgatccacacaagttgtaacaaaaaaaaataataaggagtattgtgcacatacttcaaattcaatttcattctttttatacttagaaatgcagacttgtagttattgaactaggtatatttataaagattaataatattgtaatttaagttcttagatttgtttgtttcaaattttaaaagaagaatgaatcacaagcaaaacatgaaacggaacaagtattgaaaaaaacataaataagtctatgaatgatggggctcgaacaagttggtaggagtaaaccaatttaaccaccgcactagcttcgctaactaggcagcggcgtggggtagggtgaccggtggagaaggcagtggcaatgcccggcgcctacgacggtggtgcgacggagcgagcgcgaggggtagggtaaacgggggagaaggcggcggcaggttggcacactcaaccgtgagcgaagattccttttttttctttttcttttgattgatcggtaatttctgtaaccaatgtttatgcggagcagagatttctaattccagagatggatcgaactcgtggcatgaaccattggatgaaaagatctaagggttagaaaagacgtgtggatgaaactggtatatttttttattagtatagatttgtaaaaagcaccacatatgtcacttgaagtttgatgttctatcccataagtccccataagtccttttgttgcaaatgctcacctatgtaatcaaaattttttttttcaaaaaccaccctggtgcatacgtgattaaccaaataaatatgttttcatatattatgagccactaatcaatatgtctttatcaaaattaaatacttctagagtatagtcttgacatgataaagcctgagttccactcgaaatactcacggccataattggcccgatcttttggtgagttgatgataactacgatttgggagaaacgttgacgactcgactacgaccgtacaacacgttgttgtgttgcgccttaccgatcgatacacctctccatgcgttgtttatcttgctgatgcagatcaaccttattcctacaagcaaatcgaataaacaagtaagaataataaaaaaaacaatctgaattacaaatataaattgaatacaaatgataagttggggttctgtaacgagtaaaccggtgatctaaccgatcacggaattacacgacaaagtaagtgaaactaaactttaatctaatcaaacccgagaaacgatgcagaggtacctagctatttaaggtggtgggaggacgacctaggtgccctaatagtcatgatccacctggctgtggtgcaccctacatggctggggtgcaccccacatgggccctacttgggccggggtcccagatgaagttacaatcccatgaggtccattataggcgacgcagcatattgtttctttgattgcggttatgatggaatttgggaacacgactggatcacaggccaaaaacagagctcgtatgcagatttggcggcagtttgaagttagcaatgtagctggtggccgaatcggattgtaatacttggaggacttgatattgatatccttttattgattcatgatgtgagcacggttgtatccatagtagccatagttatatcatgacactttttgagattccacaaataaaaaatgcttatgagagcttaaatgttttcgcactaagtttcgctatacccaaaacaaaattttaatgaaacatgaaaaaaataatctaagattgagacttggctagcttagcctgtggtagccctaaagcgatattaggctgattcacttaaaaatatatggactgagatggtttttacaagaaaacaaagtaagggatggacatttgtaataaaataataaaatgtcaaacgtcaagtgacatatgaggtgcttttacaattttccccaaatataaggaggctgttgaccatgctgtaacacatgtcctaaatattttggttacttctacaatatgctttctccgtccaataatataagagtattatttccaatttagcacaaattaagtaagatgaaaaagtgcatctaggacttcaagagtacacattggatctgcacgaagtacacttttgaggaacaaactattgaacttcggcatattagtaccaagtacacgtgattttcgccgtgcttttctcaaatgggaacgggtgggactactgatcgttgatgtactgatcctatcgggatcgggataaccaaaacttcctataatcctgaacaaacgcccggggtgggggtgggtgttgtgtttagtatgtaccacattggatgtttggaaactaattagaaatattaaactagactattaacaagacccatttcataaccctgaactaattcgcgagatgaatctattgagtctaattaatccatgattagcctatatgatgctacagtaaacatatgctaattatagattaattaggcttaaaaaatttatcacgcgaattagctctcatttatatgtaattagttttgtaagtagtctatgtttaatactccaaattagtgtcaaacatctaatgtgacagggactccaagttggtccctggatccaaataagatccaaagttgtgttcggcaagtactcttcctaactttactttctcgttttatgtaatcatgttttctaaactgttaaatattatattttctaccagaagaaattgagaaatttgtcttaaaattatattaatttattttttaagtttttaagctaatacttaataaatcatatataaataagtagctcgttttatgtacataagagatgagttacgaccacagccaagagaccattatcccctatagtatagtgctggagagagggagtatctggttgtcgttctccgggtcaaaacagaggtttcccctacgatttgacaattgtgtaagcaaacgacaccgatccaacaaatcatagtgtttccttgcttgttgccgagttgtaaaagttcgattttgacaacgcagttggggaggaaccactagtgttgtgatggtagagtcatgggtgtatgacttcacccaccaagatttaaatttcggtgtccataaatattacacacatgttgctaggttttcaacatgactttagtgacatcagagatgtgttgttgtttttgtctcttaagcatttaggagacgcattcgtagggatgactgtggtgttgcgtgtatagtggtgtgtgcgtgcgtatgtcatgtttgcttctttttttttttacatttgatccttttagaaatttattttacaaatcggccctaaaaagcttattattgaagattcttttcgtggcgtcagtgttattggcgctgtggtcaaatattgttgtgccaattatgttggtgccatgtcctaaccctccggtgaaagcaaagtcactaatgtgaaggggatggcgccaatgttgtcgacgccgatgaccaatttataattttttaaaaagaacctattcgtaaaaaaaaattcaaattataataaaaaatatttacatataggaccctagagcaattattggcaccgaagacctatttgtaaatacttttattacaagtaggttcttttctgctacgagtacatcctttttaaaattttacaaatatattctcggcacccaacgataattggcatcgtccccattcatattagtgacttaacttttactggggcgagggggatgacgtcaatgttattggcgctgttatattggaccacagcgccaataacgttggcttaaaataagtttttcaaaagaacaggaaggtgaaaaatctagtctgtggtgtaattaaaaaaataaattttgacaacgcagttttgcgagcccacaggccgaaatacctgactcacaaactccggagtaagttcactttgggtccctctatttgtcacccaatctgatttttgttcctcgatcgcaaaactgggtataataggtcccccaacttacgaaaccgtttaaataaggtccctcggcagtatttgactccggttttagctaaggtggcgcctacatggcaaatttaactcggtctttgtctgatgtggcattgaagtggcgcttacgtgacaaattcgatccaaaaaataagaaaaacctatgagactcacatgtcagtttcacacacactgtaacaagaaaatggtggggtcatcctcactaccccttctctctatccactctctttatcctctctctctccctcttctctctccagccggagggtggggtggagcagtggcggtggtggagcggcggccagagttgagtggggaaggagcggtggcaaccttcaacatagtatgtatttggggtaaaatttgtgtgtgtgctaccttctctcccatgacttcttggatttgggcgacatcgccggagatgctgtgcatcacctcgccggtgctcacctccgtgtcaaagaatccgatctcctgcctcagcaccgccttcaggtactcacgccgcatccgcagcgccgacctcttgccgatgatcctccagcaggtgatctctgcttgcacagagtcagaaactcataattcgattcaagagattcccaagaattgaactttgtcatggttaattcgcaaaaatgctcatcaagataggctcctacgacgagacctgcagcaaggaacgccatgtacacactaatctgcatcaagcaaaaaaaaacgaaaaggagaagatcggatttgtatcaaagctgagaaatcgaagaaggagaaggagacgtgtagctgttcgtggttgtcgcgcgagaaggagacctcgcgggaggcggcggtggcggcggccttagtgtcgctgtaccggcgtcgtggccgtgcgcggagtagacggcggagtcggcaacgacgctgtcgtcgttgctggcgaaggaggtgttgtgttaggcaccacgacgatggcgcggctcgcgtcggtcaccacgctctgcagctccagccgcctgccgccaccggcgacgggtctgtgcgccgacgaggagatgtcgcggtagtgcgggcgggtggaccgcctcgacatgtagtagtccctcgccgtccgccgaaacagcgcggggcggggaggagtgggccaggcacctgatggcgacgacggcggagggcggcggggtggaggagtcggagtgaggaggagccggaaggaggcgatgcgggccggcggttggcgtccgagggaaggaggcagccacacggcggcgccagacctggcacgacgatgggccgggccgaggcaagggcggtggccgcagtggtcgtcgtcgcgctccacccgccgctcgtcgccgctccacccgccgcctgccacctctcagctccgtcgccacccatctgcgccgcccgccgccgctcgctattctcaggggagagagagaggggggagagagggaagaggaagtagagagaggatagagagaggggatagagagaatgggtagtgaggatgataggtggtgtccacgtgggccccatcatttattattattgtgtgtgaaactgatatttgggtcctatagattttattatatttcggatcaaattgccacgtaaacgccacgtcagataaagaccgagccaaattagccacgtatgtgccacctcagctaaaactgggtcaaatacagccaaaggaacttatttaaacggtttcaagttggggacctatcgtacccggttttgtgatcaagggacgaaaatcagactgggtgataaatagagggatgcaaagtgaacttattcccacaaactcctatgcccgagaagctaaacaatcctggcccggcccattacttttgatgggccagtattgcgggcccaaaaaacaggccttatcgtctcgtggaagcaatccgccaatcacgccttccttataaacgcccccgctttgattcctctccatttcgaaatttccgaccgttgctcctccccctttcctttccccacccaacggcatctcgtctccacgcgagggatggcggcggcggcgagggaggcggcggagagcccgaaccctaggtcggcgccgcggcgtgcggcggcggcggcggccaaggacgccagcagcttcctcagcccgcgtttccggtcggcggccgcgcaggccgggtgggacgaggagtcgctcctccacgcggcgctcgtcgtcgaggacacccccgtccgcgagtcccgccgcaggaggcgggcctccaccacctcctcctccgccggcggcggcgggagcgccggatctaacactaggtaggtaacccgatcccgcctctgccttcctcaccttccccttggttggtttcttgtaccttttcttggttccggagaaaacgttgcgttgctccaggaagcggaggtcgtggaggcagccgccgggatcgatcccgccggtggtttttctgctcgacgacgacgagaagaagccggataccacggcaggttggcgattgcttctcgcttgctttgctgatcgatccatttcttgagtgtttcttggtggggtatctcgaattctcgatccgttgttaatttgggggatctgcagatggcaagaaggaggtgaaggaggaagaaaagaagaccgtcgtcgttggggagaaggaggcctgttccgagaaagcagcggcaaccagcgagctgccctgtatggatcgcctccgggaggagctgtcttgtgctgtaagagggatttgctgctttattttatttcgactgatattttgctctcgcatagttgatttgacgttcttggagagtaatttgtctgttggatttttttttccttttttgcagatatgtttggagatctgcttcgagccgagcaccacgccttgcgggcacaggtaattttatactgtactgtttattcgaaaggaagtggcttaaattcagtaaaaaaagtatcatgaaacaaagcattattagcttctgcaatcgaaagggatttggcatagagatgcatgtatgtatctatcaaaaaagcagtgcactgacaatttcaggaattagtatgctttttgctgaattgtgttggtgttttgcatcagaataaggcaaattttatttgcaatctggatttgcagtatagatatcctgcagtttgttgtctgtgagttatgattttgctaatatttggtcattttgcattttattatgtagaacaacattactcatctcactcgataaattgttccgtaaatcatttactcaaatcatatttaccactattcagtcatcaactactaagttcaatatcacttccttgaacttgattaggtcaacacattttagtggaaactggaaaacatgaactggaatcaatttgaacatttccttgttctgcataacttttggaacctcgtaatagttgcccttttcagttttcactagtcagcttctgaaaaatatgcttaaatttcaggaattagtattatcttttctgtttagtgaattattcgtcgtcatttgaatctggactaaagtgaaacatatttctagtccatatttacagttttgagataccttgagttttttgctttgagttcgacaggcatctgcctggaagaaaaatgataactttcatctatcatagctggagtagacagaacagatactaaatatttccttaaatttggaatttaccaccttttacaagtggtactcatcttagttttcatataaccgttcataaattgttaattgaaattctctccccaaattgtatccaatggtaccctggtgtttgattcaggaacaaatgttgtgagtgaaatgttgtttcctgagggaaaattccgttgtcatttacccatttggacctggattaaaacaaatcatatttgtcatctaaagattacagtttagattaccttcaaatccttgctttgtctgtgttgatagtttgtcagctggaatacggtagttaattttcatccattatagctggagtagacaggctggatactaaatatttgtttaaactggaaatttatcatttttacagtactactcttcttagtaatcactacaaccagtcataaattattccatgaaatcatctttatctccgaattatatctaccactacctggttaaatactgttttcaacttgacttacagaacaaatgctttctctctgaattataatgatttctctctgagtttgattgagagaacaaatgtgagagaaatgggagctgtcaaatgttttattattcctttctcaatggtacagaattaccaagctcatatttttgtcactaattttgctgaacagcttctgcatgaaatgcttaaaacatgccgcagctaaatgtggaaaaaggtgtcctaagtgccggcaattaatcaggtaaaaagctctacagttgtgcaatgtcattttctcgtagcatgtatagtaaagaactaaacgaattgtaccctgcagcaattcaagatcttgcacagtcaacacagtgctctggaacaccatccagctgctatttcctagtgaaaccgaggcaaggaggacttcaatcgcttcatcctcggaaaccaacgacgacttggcgcaacaaatctctcaaagaagtaacagcatggcacaaggtggcataagaagcagcagttccaatggcatcggctacatcacgcagcgcagcacaagaagcagcgctaccaacaacaggagcttcacaacaacaggcagcagaagaagcaccttcgtcgcacaggagggcagcagcacagcaacagggagaggctttgtccgggcttcgcagctggtccctagtgccagggtcgtctcagtgagatcacaccagtctgatgacgcggcattggcgtacaggctgcagcaggaggagttcatgacggctttcgagagcgagggcgagaggcagccacctcggagcagcagcagcacggtgtccgctgctcgagcgaatctgagagctatggcctcccgggccattcgtctccgagctcgtggctggcctgtctagttttggttgcctgtttgttctaatcttttctgcttactaattgctgattcttcctcatagtcatagcagaagtgtcgtggggtattctattgagtggacagatgtaatttgctacgaaataatggttcttcgctgtgtcaagtggccatcattcgttggcactcacaaggttcagtttgtgtaacagtcatatggcatgtcaagttaactcaacttgttcagtgttattgttccttgctaattcgaacatagtcggtttagcctgctaatgtgcctgcttagcttttattccgttttgtttttttttcccagtcaaacttctttatatttgaccatgcttatagaaacatttagcaatatttacaatacagaattagttacattaaatactatattgaacttgataatatgtttgttttgtattgaaatattgctattttttctatagtttgatcggaaaaagtcaaaccgacttacaagatgaaacggacattgtacattataagggtaagtgttaaatcttcccttcaactcaacggtggaaccgcgcctgggcttgagacatggaaaatttttgatggtcttatacttagaaattgatcagtaccatgcctcagccctaggcttagggagtgtttagatctagagtataaagttttggtatgtcacatcagatattatatagagtgtcgcatgggtgttcgggcactaataaaaaaactaattatagaatatatcagtaaaccacgaaacgaatttattaagcctaattaatctgttattagcaaatgtttactgtagcaccacattgtcaaataatggagcaattaggcttaaaagattcgtctcgtaaattagtcgtaatatgtgcaattagttatttttagcctatatttaatacttcatgcaggtgttcaaacgttcgatgtgatagggtgattttggggtgagatctaaacaccctcttagactgattatttagactgcttgtttggactagtaagaataaacatatagcctaacaatcctacaaacaaaaccatatgcttcagcgtctcgtcctccaactcctagaaggctagaatcactgtgatatagccgcggcggtgcatccgcttcaagttccaattctcaatgaaactgacttgtttcaaataaactgcaaaagcacgcacaaacgcatcactatacatacgaacaaactagctttatttttattatgttgttgtttttttagaaaaaaaaactgactttactatactaaataatagatatgcttctttccatctatagatgcgctataatttattgggtaaattgtaattgcgataatttattgggtaaattgtaattgcgaggatagaatgtagagaggggttttatggaccttacatcgtacttttggatagctttagtctttagttttgagcgctaggcttagagaaatcctggctctgccactacttctattcgctccatcgaaaagtctaaaacatatttctttttatacaaagaccaatgagcaattaactcattcaccatgtgacaaaaccaatgaatatgtaactactcccttcgtcccacaatataagggattttcagtttttgcttgcaacgtttgaccactcgtcttattcaattttattttgcaaatataaaaaataaaaagttgtgcttaaagtactatagataataaagtaagtcacaaataaattaattaataatttcaaaaaattttaaataagacgagtggtcaaacgttgtaagtaaaaactcaaaatcccttatattataggacggagggagtaataagcactaaaatagtttcttgggttccaatcaataatttaatttagcacattgtgactaaaaaaaaactttttttttaaaaaaaaaccaaagaatgtactcagtcttaaactttttgatggagagagtacctggcaagaagcattgtgtgattaataactactccctccttcctaaattaatcatcatataatagaatccatgatttctcaaatataaccgcatggagacacggatttaatcgaaatacaatttttttagcatgctagggtgtaattggcatagtgtcttaaacgatgcatgcattatgggccggagaatgtgtgcatgctgtcttgattgatgtgatttaaattatgcttagtataggtgtataaatatatatatatatatatatatatatatatatatatatatatatatatatatgatgattaatttgggaaggagggagggagtactgctcaatcatatggttgctatcggcaacaaggaataattaataaattatgctatttgcagtgtcaatgagtttttgct

SEQ ID NO: 26308 - DNA, 3467 bp, Oryza sativa
acttagaatttttcttagcaacaccaagatccttcatctcaaactcactagtcaattgtttcttcaatatagtgatttcttccttgctcttggcagcaatcagcatatcatcaacatataatagtaagtatataggtgatccattaataaatttaatgtatacacaactatcatattcagacctcttgaatccacgtgacaacataaatgaatcaaaccttttataccattgacgaggagactgtttcaaatcatataaggatcttttcaacttgcaaatataatcctccttactaggtattatgaactcttctggctggtccatgtatatctcctcctcaagctctccatgtaaaaatgttgtcttcacatctaactgctcaagctcaagatcatgcatagcaacaatactgaagaatgtacgaattgaactatgctatacaactagagagaacacatcattataatcaacaccaggaatctgactgaggccttttgctattaaccttgccttaaacctccgaagctcactaagagataaaccctcatttcccttgaatatccatttgcaatggatggtcttcttctgttttggcaagcgcacaagctcccatgtgccattcttctcgagagactgcatctcctcctgcatagctgagatcaacttctcacgatcatcagaaacaacagcttcagtatatgcagccggctcatgagtattcacttgttcagcacaactaaaagcataataaaccatatcacattcctcaattagatggactagagctccacaactcctctttgttctgcgatgtgcaataggttgatcttgtggctgcaaaacaggggatgagtgcttgacagtatcatgaacatcattatcaacaatttcaatttcctgatcatccacgtgctccacttgcacgctgacatattggtgctcctcatcaaaaccacctggtataacatctgtggacaagctctcattaaacataacagattcattgaaaacaacactcttgcacatgacaatccttttagtttcaggattccataacttatatccttttactcctaaaccataaccaagaaacagacacttaatagctctatgctctaattttccattatcaacatgagcataagcagtgcagccaaaaactctcaactatgaataatcagcaggtataccagaccatacctcaatgggagttttcttattaagtggggtagaaggtgacttgttgatcaaggcggtgttagtagcctctgcccaaaaacgcttgttcatacgagcgttggacagcatacaacgagccttcgagatgatggttctgttcatgcgctcagccacaccattctgttgcggagtgtacggggtggtgtgatgcctgacgatggtttccttcctgcagtaatcatcaaaagcatccgaacagaatgcaagaaataaggccacacttttctagagtaattatcgataatggtaagcatataacgagcaccaccattagagggcttacgagaaggccccacaaatcagcatgtacataatcaaatatacctttggtgcaatgaactgaggtattaaattttaccctcttgtgcttaccaaaaacatagtgctcacataacttcatgttaccctgagtacagctatccagcaggttcctcttcatcaattctaccataccaagttcactcatatgtccaagacgcatatgccacatgttagtcttactaggttcatcattagaaacagtggtagcggtaacagaaccatgcaatgtacttcctctaaggacatataactttgcagaattcagatcacctatcatataaacgagagagccttttgatacctttacaactccacctgaactggagtatttgtatccttctgcatcaaatgtgctgagagagatgagatttctcaccatccttggtatgtgtctcatatctttcagcgtacgtgtcatgccatcatgcgtcttgatctgaacagagccaatgcccacgatctcacgtgggttatcatctcccatacgcacgacatctccattctgcacaaacttgtaagaactgaaccaatctctgttaatgcagatatgaaacaaacatgcggtatcaaatatccattcatcatgaccagcaacacaaccagcaaaaacaataagacagtctcctgaatcagagttttcagcaccgagacgacagaggccttaccattggatttccttttctccttattctacagcttccaacattcttcaatgaagtgatctttctccttgcaatacttatagaacttcttacctctggacttcaaacaatctccaccggttctggctcttgccacgatcgttgctgttgttgtaggttctttgctctgacctgcaatgcttcgcccttggaggatgacacgtcagactaaaccatacctttcatcttctccctgttctggagtgcctcataaacttccaaaaggattagttcttcacggcttaatagtatggtgtcacggaaatttgcatacgaactaggaagtgagcataacaatagaagacctaaatctttatcatgaaactgtacctcgatcgacactaggttggcaacgatctccttgaagactgatatgtggttcaacatagaaccagtttcctgcaacttgtgcgagaacaacttcattttcatatgaattttactggttagatccttagacatgcagatcaataccagtttgagccaaagttctgcagcagtttgttcctgcaacacttttgacaaaatatcattagatagatgaaattgaatcagtaatagagccttacgatctttcctcttctcctcagcggtccattcatccttcttctttttcccgaagctttccagcgcctcatcaagatccgaagattgcgttagaacagcctgtgtcgtaacttgctacagcgagaatctcgtcttttagtctagcagcagtagatcatacttcatcgatgccatcccggaaccctaatgtgagaacaaactctgataccacttgttaggaaatgataggaaaacaaacaataaagaacaatagatcaatcatagaaaacacgagatttaacgtgaaaaacccttccaaagcaggagagaaaaaactatgaacaccagccagcaaaatatcttcactatatcggggtgaggttacaatgccgaacggcggcttacgagaagtgtgttatatatatatatatatatatatatatatatatatatatatatatatatatatatatatatatatatatgaaggtgaaatcctaaaaggataaagatccgtaccgtgacccccctagacgtcccgggccttcgcttcgctccgtccaaaactagcctttatatgtgcgcaaatgaatttggatcacaactcaacaacggcgacatgtggaacaggagaataaatcttcatttccaatctagaa

SEQ ID NO: 26309 - DNA, 17212 bp, Oryza sativa
cattaaatatatattaaaagaaaaactaattgcacagttagagagaaaatcgcgagacgaatcttttcagtctaattagtctataattagccataagtgctacagtaactcacatgtgctaatagcggattaattaggctcaaaagattcgtctcgtcgtttctaggcgagttatgaaattagttttttcattcgtgtccgaaaacctctttcaacatccggttaaatatccgatgtgacacccaaaaattttaatttcacgaactacaggccctatatttcttctctgaagaagaagtttcagacgatgggttcaaatcgcttttaagaccaggaagtacagcggcgccagtctagatccaaaacttttcttcaaatttctaattttttcatcacatcaaaacttttctatacacaaatttccaacttttcaactaaacttttaattttgacgtgatctaaacgcacccatactgtaagcagcgtgaaccactgaactggcgctacgctacatctctgaaagtccaacgtttgtaaaatcattgacgctgtccaggaatttttccatttgaccgtcaccatttttcccttgaagaatcatgttgtccggtgcatatgaaatttttggagatattatattttttgaagtataaatttagttttttttcttttggatttattttttctttttttctttttttgccatgtggggggtggttagtccaagttacccaacatgtggctctgtccctctttccaatactacaaaagaaacacgagcttttctccgctacatgaagacgtccgatcaaaggggaaaagtactttttcggcaaaatttatagtattaagctaaagtttggcggtcattaatcataacaaaaagaaccataaattaatctctaaagtttaaaattcgatatagcttacaagttacaagagaaatacgccacttattgacttcttttattcattaggcaccatatcctgtacttttacatcgaaatcacacaggcttgcttctctgcttagtcacaatattaccagctccagcctccaggttacttagcaagcacaaaactttaacccttattattatcccaaaacataataaaaataataaaaatctatctatcgctaatcattacttaatttaacttaaacctcactaagctcctctcccttaaactcgtacgcgtcgctcttcctgacggcgacgaagagcggctccttcttcctcgtggcgaggccgaacgtctcgtcgaggttgacgtcctcggcgcgcacgccggcgggcagcgcccactcgaagtggtagagcaagctggcgagcgacacctgcacggtggcgagcgcgaacgtgtagccggggcaccctcgccgcccgccgccgaacggcagcagcttgtagtccgggtccttgaggtcgatctcgccgccgccgccggcgctctcgaacctctccggcgagtactccagcgggttgtcccagatctccgggtcgcgccccatggcgaacgtgttgatgaacacccgcgtcctcgccgggatgtcgtagccgcccagcgtgcacggcgcgacggactcgcgcggcactagcaacggcaccgccgggtgcagccggaacgtctccttgatgatggcgcgcatgtagtggagctcgccgaggtgggactcctcgacgcggccgctgtcgccgacgactcgccggacctcctcctgcgccttcttgaggatccgtgggtggcggactagctccgtcatcacccactccagcgtcgcgaacgtggtgtccgtgccggcgacgaacatgtcctggtggttgttgtcacgtcatgtcaagatcagaggaggagcaacaatggcggcgagtcaattcgagagttttaatggtgggtattaatggcgtaccaggacgagggccttgagattgtcgtcggttagggggacctcgaggtcgggggatttctggacgcggaggaggacgtcgacgaagtcctcgtcgcggtcgccggggatgcgctggcggttgccgctgatgtgttcgtccacgatcacgtcgcaggcctcgcggaggtcggcgaggcacttcttgaggcggcggcggagtccggtgacggtgctggcgacgggctcgagctcggggaagaagtcgccgatggtgaacccggcgaagaggtcctgcgcctcggcgagcaccgcgccgagcttgtcgccctcgccgtgcgggaaccggcggccgaacgcgacgcggcagagcacgtcgttggcgaggttgaggaagcactcgctgaggtcgacgggcttcgccggcgaggtgttcttggtgaggtgcgcgagcaggcggcggagctccttgaccctgacggcgccgtacgtggcgacgcgacgcgccgacaggagctccgacaccaccacgcggcgcgccatccggtggtacggccccgccggcgcgaacgtcacgtcggagcagccgaacgacaggaactggccggagagcaggtgcggccgcgacgccagcgcggcgtcgttggtggtgagcgcggcgcgggcgaggtccggcttggagatcaccaccgccggcacgctccccagccgcatccggaacagcggcgcgcgcatggtgcgcgccagctcggccagcgcgtggtgcggcatgccggacatgaggtggaggtgcccgatcaccggccaccccggcggcgacggcggcagccgccgtggctttgacgacgacgaccggctcctcctcaacgcgaccaacacgtacgccgcggagagcacgagcagcgcgagcgacatcgtcgacgccatggtgagctccatatcgtcgaacacttggggtgcacgtttggtccaagaaacttaagcagcaatggagatgtgttggtatgaactaaccgtggttaagtggggaagggtttatatagtgggtggttggttggaggagaggtagatgcacacgttgggcactgaagattttcattagatttatcacatgagttgaagagatcaacgttatctgagatcaaggtgtggaatgcgacagatagtgtatacttgtgtagtactctaactagtaagatggatgttgaaacagcgaattaatgtggaattaattgcatcaaattatttatgcatagactactgtagacagaaatatataatcatcatgcatgattgcattagttgctaccatccaagataaggaaattaatattgacggcatgaacagtaatgtgatagaaagatggcacgtgtgaagtgcgtatcgaccaagcacgctcctcctatactcctgtgtctagttcgcgaaaagaatttttttaatgtcacatgggacgtttgaccggatatcggaagaggttttcgaatacgaatgaaaaaaataatttcataatttgtctggaaatcacgagataaatttattaaacttaattaatctatcattagcacacgtgagttaatgtagagatccaaaagcccaaactgattaatgaagcaattcaaagccctaatttctgaagtttaaaattggttgccacggctcagtcaagcatgccccaactaccaaccagagaggtctgacctctatattttatactttatatgttctccctttgttttatactataagccgttcttttctaaacaaccgtagttaggtttcactgaatttataaaaaaaattaacaacttccacaacaccaaattatttcttttaaatataaaattgaatatatattttgataatatgttcgttttacgttgaaaatgttactatatttttctataaaaaattatcaaacttaaaaagtttagctagagaaaaaaatcaaaacaacttacaatattaaacgaagggagtataatatgcccactttacagtcacagatgttacatataaagcacaaaggctttgtttagatcccaaacaattttggccaaaaacattacattaaatgtttggacacatgcatgaggcattaaatgtggggaaaaaaccaattgcacaatttgcatgtaaattacgaaacgaatctttcgagcctaattacgccatgatttgatatgatgctaccgtaaatatttgctaatgacggattaattaggtttaataaatttgtcttgcagtttacaagcgaaatctgcaatttttttttgttattagtatatgtttaatacttcaaatgtgcgtccgtatactttaaaaactttacacccaaagaactaaccacacccaaaagaaataaaaatcatgcacagatgtcatttgagaggaatatataatgtgcccgctgcactttgacttagtgaaacggacaaatggacaatactgcagaaaagtcaacccccataagggctgtgcttagttcacactaaaataaaattgaaagtttggttaaaattagaacgatgtgacggaaaagttgaaagtttatgtgtgtagaaaagttttaatgtgatagaaaagttaaaagtttgaagaatctaaacacggtgaaggttcaacaatctacccagaagccagatccggagtcagaaaatttggttttccattattttattaaaaaagtagagaagagttttgcctttcaaatatcaccagcaaataggtacaacgggagtagaacgtttgcagtatgaaatgcgcaccgggtggagatatttcatcatttgtgttaattagcattttgaaaactaaccttacttaaaaaacataatagaacttaaatacatgcatgagtgccgtacattaatatggaaaacaaaaataatttgacatgttgaacattcttgatataattaagggttaattggattggtgccaatataactttaacggttttcaaatacatcgttactatttaacaatttgtaatcatgccattataatttccctattatttgatatatgtcattacgtaccctttagaccattctacaattttttttggactaaaatgccctcgtcttcctcctccaccctcctttctaaacttcatcccttctcccctttcttctactggctgcagctcagcttctctcctccatctctccatctcctccatccctctccagtctctccaagcttgaaaaacgtgtggcactcgcagcgtcgccgctaattcatgtgcacgcgctgtgacttaagagcatggaaggaggtgtcgggaaggccaatgttatcaaatgacaacagcgttcagatgtactgtgtgcgtggaagctgaatcacttggacttcggtggcactgcatgcacgagttaagttcgctgcccccgaagtagcagccactttgaatacaccatgaaaagacaaacatttaaataccacaagttcagtggtacggaaccatatttgaattccatgtggcatatatgtcacatcaatattacgtaagattatgaagggatccctgcaatcttggatcgaaatgacacactttatattggtggagaaatcatctttgatcggtctggcaaaatccactttatacaagattgtttttagtcccagttataaaaattttgatctttagtcccggttggtaatctttagtcccggttcatcccctgtcaaatatatgtcagggggccgaggatctttagtcccggttggtgtcaataaccgaaactaaagatcaccactttagtcactgttggtattaccaaccgggatgatctttagtcccggttgataaattgaacacgtatatataatccctatcacttatcctctcctccacagttacaacttaggcagatcgaatctcgccccctctcctcagatctatcctctctaactctcttcctcatcccctttcctccaactcctccccttcctcctccccttcccatccggcgggcggcggctagcgcggcgggaggtggggcgaaggccggcggggccgcgcccagcggtcgtggcgagcggcggcagtggcattgttttttctttttttaaaaaaaaaattgtgattcactaagatgtacaaatttatgattcattgtttggatttgtgatgtatttgagtattttttaggatattgtgatgtatttgatttgtgtgtataagtaactttatgatttgtgatgtggatttggtgatgtgaatttgggacgttactttgatttggggattgatttggggatttgcctaattgattcgcgagaaaataaaaagaaaaaaagaaaaaaaaaggggaccatctggtaccgccgctattatctctttagtcccggttggtaacattaactgggactaaaagatcctctctctttagtagaactaaagatccctattatttcaaccgggactaaaaatagacatctttagttccggatccttactcccggttgaaaaaccgggactaaagaagggtttccaaccgagagtaaagatagtttctccaccagtgttaagaagtttaaatagctgtatctataagagttttagaaactaaatgacatggcctcaactttagatagctagcgtacttcactcataatatattcgcagtatatcaataaatataaaacaacatcgtacgttgtattcgatcaggaggagcactgaagtacagtgacgaatccaacatgaggcaggtgtgcttgagcccccgctacatactgttcaattcttccggataaataagttgttagggaagaaaaggataaataaatacaagatcactattaatttcataaagatgcttatatgtaaatattagatttattttatatttagtcaacttggaatatatttagtcaatgccattcttctccggaggaaaagatgccgcataatgtgtaccctaaaatttagttctacgtttgccgatgctgaagtacggtgtacgagactacataaacaacatcgttgaagtatactccctccgtccaaaaaaaacaaaccctaaatttccgtgtccaacgtttgaccgtccgtattatttgaaaaaaatataaaaaaaattaaaaagataagtcacgcataaagtattaatcatattttatcatctaacaacaatgaaaatactaattataaaaaaatttcatatagaacggacagtcaaacgttggatacagaaacccaggtttctcttttttttttggatagagagagtaaacttgaattgcactagaatataatcattcatcaataaattaagctcatgtacattttttttatctttttagagaagggtaatttttacccggcctccacatccaactggatatatacggccattgaaatagagaacttagcaccgtaaacaacccaatctaaaattcgctcctacgaagatttgaactcagaactttaaggtactactcggataactgcaaccactgtctctcgtaagctcatgtacatacatgtatgaaatagcttaaaagttaaaaagatgaaaagaacagaagttgcgccgttcgttcactggatcccccaaacagtcaaacgtcgggaaggacatgcgacgtgttcctcttacgacgtgttcggttcataggccgttcctcttacgacgtgttcggttcatgcctgcgagactttcgtcggttaatccctcctctaagaaaatcaacaggatttatcttgtttctattatatgtggaattaatcccttcaattcgcttatattagagattaaccgaccaaagaatgagcaaactaattaaaggattaactaaataaactttagtgaggttaatttggcagtagcatgcaggtccgggaggtcagccacggaatccaaggtgccgcggcgcccatcgatttcgattctattcgatttgaccgggacaacccgatactactctctccgtctcgaaaaaaacaaattctaagtttccgtgtccaatatttaactatccatcttatgttaatctttttataattagtattttaattgttattagatgataaaacataattaatattttatgcgtgacttatctttttattttttttaatgattttttaaaataaaacggacggtcaaacgttggatatggaaactaaaggtttgtcttttttttttttacgggggagtacgcttcaaactactgtagtatctaccaacctagcggtgagcttagccaacgccggggtttttttgagaacagccaacgccggggttgaccaggcgtttcctggcttggctgctcgctcgctcgctcgacgacgatgacctacatgaccgaccaatcgcgcacggcgtcgatccggccgcacaggcttacgtatacacacgcatattcggaaaaagcggttggaaagggtgacatgtcgtaatcgctacggtgggcacacgcacgctcgtgcccatttcctgaatttcaggcatctaaatatttataaattttcagtcacctagaaactactctctccgtttcatattatatgtcggtaagcttttttcttagttacaattctttagatttgacgaaatttatatagaaaaaaagttagcaaaatttacatcaccaaattagtttaattaaattgaacattaaatatgttttgataatatgtttattttgtgttgaaaatattagtatatttttctataaatttgatcatacttttaaggtggtgtttgaatctcctgaagataaatatcaagataaagattaagtgtttcacgcaaaacgagttggtaataacgtgtgcttaattgagttttagttattacaaacttgaaaaatagattaatctaatattttagaataacttttatatagaaagttttcgcacgaaacgcaccgtttagcagtttgaaaagcgtgccatgaaaatccaaaacttcatccggtatttctagtgaaaacgaatggggcctaagtttgactaagaaaaaaccaaacaacttataatatgaaatagaggaagtacatggtattaaaatttcatatcaactgaaaaaattggtacagtgggagtggtgatttgtaacgattgggacagtgccatatattttatcgtgccgagcgtgccgatgtgctgctaatctgaactaaatctttagttacggttattttacgtgggactaaagatagccatatttaattttagattcatggtcctggtttgcaacccggaactttacgagagttgcaaaccgggacggtttctccaccagtgagacccggtgggggaatttgggatcactaaactgatgattaaaactgattcactgaaggtgacaaatatgtgcctcaaatagaattcgataaatgatttaggacgtgaaaacaatactaaatggattcccataatcaaaggtggtgtggactcggcgctcgccgaataaagttagtcatatgttagctgaagaagatgtttttgtagaggtgttttatgacatgggtttcggtttctccggaattcatttattaatgtttggcagatgactgtaagcccgatatacatgttaatagagctaggcccgatttattatattaaatctcaaaggcccataataaatgttaagaataataatgccacctcaggaattaaacgaggagtatctcaacttaaatagggagttattggaggctccctgttgaccggttgaggtggaaatcggaaagccacacgcgcgccggggcgagggcgtggcgtgcgttgtgtctgcctgcctctatcctttttgcaacgaccgatcccacgattgcctccgtaacggccaggcgattcaattccaattatcgcgtcggtcgatatcagtcctgcgatataaggaaaccgctaatccgatcagatctctctcgcttgctttccatctctggtgttcttcctcctccgcgcgcctgtgctgcctctgttctacctccccgcttctgatcgtttgcgcgcacgagagatcggaacgagcagggcctccggaaccacaccttcgcctgagatctgcaccggataggcgggtgatcaggtttttggggagtgcttccgccgccgccgtcgccgtccctggagccgctgccgccgtccctggagatggcgcgccaggagccggagccgctacaaacgtcaacgtcaacgaaggcagttctgcctcacaatccagcggagggacattctcggggtatatctttctcctactgttaactcattctttgatacctctgttagtcgtgttagtcgcaattctattgcgtttttggtatgttcatgatgcttattataccttaaacatgctcctggttatatttgattttatcactagatcaccccacattgttcatgccatgattattgtcttaatattttggattaaaatatgccgatatatgactatatttccaacaatccaaaaacctgataggtcattttcggtagttggctttgctgctgcactaaaatcatatgcatttgatggttctaactataagaggtggaaagcacgtacactattgtggttgacagcgatgcaatgcttctatgtttcacggggtaaacgaagtgaaccacctctctctcctgaggaagaggttaagttcgaggcttcggattgcctgttccgtggagcattgatcagtgtactggctgacaacatagtggacgtgtacatgcacatgccttccgggaaggacatgtgggatgcacttgaggccaagttcggagtttccgacgccggcagtgagttgtatgtcatggagcagttctatgactacaagatggtcgatgaccgttctgtagtagaacaagctcatgagattcagatgctggctaaggagcttgagaacaacaactgtgagttgtcggacaagtttgtgtcaggtggcattattgccaaattgccaccttcttggtcggactttgccacttctctaaagcacaagagacaagagttcagtgtttctgatcttattgggtctttgggtgttgaagagaaggcgagggcaaaggacaaccggggcaaaaaggttgagggaggttctagtgccaatatggtacagaagaagaaccctcatgcatcccacaacaacaagaaagtcaagcctgatgtcaaacccaaggctacaaccaattttaagaaaaaaggcaagggaaaggcaaagggagactgctttgtgtgtggcaagtctgggcattgggccaaggattgtcctaaacgcaaagacagaaagtctgccaacatggtcattagtgagagcggaggaacatcggcgtacggtaaaatattacctatagttctctctgtttttcattcacctgattggtgggttgatactggtgctaatattcatgtatgtgctgacatttctctgttttcttcttatcaggtcgggagaggttcctccttgttgatgggaaacaggtcgcttgcggctgttcatggtgttggtacggtcgatctgaagtttacttcgggaaagaccgtgcagctgaagaacgtgtagcttgtcccttcaatcaagaagaatcttgttagcggctctctattgtgtagagaaggttttagacttgtgtttgaatccaataaatgtgtcgtatctaaatatggaacttttgttagaaaaggttatgacagcggaggcttgttccgcttttctttggataacatgtgtaataatcataattttgtgaaccatattagcgacaatgatgagtctaatgtgtggcattcgcaactttgttatgtgaatttcagttgtatgacgcgcttatttaacatgagtttaattccaaaattcactttagtcaaaggttctaagtgccatacttgtgttcaatcgaaacaacctcgcaagcctcacaaggcatctgaggcgaggaatttggcacctctagaacttgttcattccgatttgtacgaaatgaacagcgtgttgactaaagggggaaagaaatatttcatgacactgattgatgattgcactagattttgttatgtgtatctattgaaaacaaaggatgaagcattgcattactttaagacctataaagctgaggtagaaaccaacttgaaaggaaaatcaaacggttgagatctgatagaggtggggagtatttttccaatgaatttgcatccttttgcaaagagtttggaattattcatgagaggacgcctccctattcaccccaatcaaatggggtggctgaaagaaagaaccgtactctaactgagatggtgaatgccatgttagacactgcggggctttccaaggaatggtggggtgaggcagttttgactgcatgtcatgtcctgaataaaattccaatgaagcataaggaagtgacaccattcgaggagtgggaaaggaagaaattaaatctctcatacctacgaacatggggctgtttggccaaggtaagtgtacctatagccaaaaagcgaaaacttggaccaaatactgttgattgtgtgttccttggttatgctattcatagtgtgggttatagatttttaatagtaaactctggagtacccgacatgcgtgttggtacaattattgagtccagagatgctacattctttgagaatgaatttcccatgaaacatacacctagcacttctagtcaagaaattgtcataccccatgagcattttgcaccgatagaacacaatgatcaaacgcctgagggaaatcctaaggaggacaacattgtagatactcgtaagagtaagagacaaaggtttgcaaaatcctttggagatgactacattgtatacctcgtggatgacaccccaagaaccatagaagaggcatattcgtctcctgacgctgactactggaaggaagcagtacgcagtgagatggactcgattatgtctaatggtacttgggaagtcgttgagtgtccatatgggtgcaaacctgaaggatgcaaatgggttttcaagaaaaagcttaggcctgatggtacaattgaaaagtacaaggcaaggcttgtggccaagggtcatacccaaaaggaaggcggggattttttcgacacatactcaccagttgctcgcttgaccacgattcgattagtacttgctctggcaacctctcatggtcttctggtccataagatggacgttaaaacagctttcctaaacggagagctggagaagaagatctatatggatcaaccagacgggtatgtactagaaggtcaggagggaatggtgtgtaaactgttgaaatccttgtatggccttaagaaagcacctaagcaatggcatgagaagtttgacaccacacttacatctgctggctttggtgtgagcgaagctgacaaatgtgtgtactatcgctatggtgggggagaggcagtgatcttgtgcttatatgtcgatgacatattgatctttggaaatagcctcaatgtgattgaggaggttaaggactttctgtccaagggttttgaaatgaaggatttgggagaggctaatgttatccttaacattaagctactaagaggagctgagggtgggattacacttgtgcaatcccactatgtggacatggttttgagtcgctttggatatagtgactgcaagccagctcttactccttatgatcccagcgtgctattaaggaaaaaccgaagaatagcaagggatcaactgagatactctcaaatcattggtacattgatgtacttggctagtgcaacgaggcctgacatctcatttgctgtaagcaagctgagccggtttgtctcaaatccgggagatgatcattggcaggctctggaaagagtaatgcgctatctaaagggcactatgagctatgaaattcactataccgggtaccaaaagtactagaagggtatagtgactcaaactggatatctgatgctgatgagataaaagccacaagtggatatgtgttcacacttggaggtggcgttgtttcctgtaagttttgcaagcagaccatcttaacaaggtcaacaatggaagcagaacttacagcactagatactgctacagttgaggccgagtggcttcgtgaactcctaatggatttgctggtggttcaaaaaccagtgccagctatcctaatgaactgtgataatcaaacagtgattattaaagtgaacagttcaaaggacaacatgaagtcatctaggcatatcaagagaagactgaaatctgtcagaaagcagaaaaactccggagtgatatcattggactatgtccaaacggctaaaaatctggcaggttagtttatcaaggggctaccacataatgtgttagacagtgcatcgagggaaatgggcttgatacccacctaaggttgcacaatagtggaaacctgtccattgtgatcggagatcccgtgaatttggatggtgaaataaactattgtgtgaatgagagaagagacccttgaaaatggctcattttcatgatgtacttctcttcttttctgcatggtaggatggctgatgccttaatgtgatccgagtggcttttctaagcagagatgttgacctgcagaacatctcaaaaggaacacacctatatgagtttgactgctagtcacagtctatgagatttgggcgatctctagatactcatgaaaaggcctgtagtttgacttatatgctccaaacagaggggatgcgaacggcagcccagtaccagtcaagggtttgagtgaaacctaatcacacaagactgataattcaaggcatagtccattgttcagttgtggtttgatgtagctcatttcctaggtggaagttcaacttaacagtctccaccaaaacactggtatatcaaacagtcacaaccttgagaacatttcttgtgagccttgaaacttggtggggattgttagaataattgggctaggcccgatttattctattaaatctcaaaggcccataataaatattaaggataataataccaccacaggaattaaacgaggagtatctcaacttaaatagggagttattggaggctccctgttgaccggatgaggtaggaatcggaaagccacacgcgcgcgttaaggttgtcacgaccggaaataacccaacgggcgttccttacgtgcgtgcattattccttgttccaggaggcaaggtacaccaaaagttgatacagttcagagtttaacaagcggaagcgtaaatagttaatttattacatgggcggcgaaggcccagcacacacaaagacaaacgggaaacagtggaagactagggcgacgaccacaggcgcttgacggtaggcacgagctagacaccaaagccttcatcttccaggggctcctcttctgggtttgggaaaaaattgagcaagactgagtacaaccaccgtactcaacaagacacacccacaagtgcagcataaatgtaagggagtacaagggagttataatataaaggattagggtttgcagtaaacagcattaaaagacacttagttgctcaaagctattttgcaaacacgattctagagctatacaatattattaatcaaggccgtgaacccacacgaacctgccttaacccaaggcctacgatgattcagaccgaactggcaacccgaccctgagtcccagctcgtcccaagccaacccaggccaaccattccacattttagttgttaagcatgttttaagaattaaaacactaacttgggtacattgctcggctttcccataaccgaaggcgcggctattcgaatagattatactctgatcagaggtgtacatctttacccacaagacacatcttcctcacgtgtaactacgtgccacataccaccacggtatacggccggaagatgtgacatagtttccaacccatcctagccatagacaagagtaccaacccaatcccacctacggccggaaaccccgggacaggtaggcaggactgagcccctagcagcaggacaccggccctgtgccatgacatctcgactaccgggccgcagcttgtgtagccttcatttgtcctagagatgtccatcgacccccgacttcgtccatctctatccgtgtacttttgtttataaccagactgagccacaaactaagccttacccactagacttgtggaagtacggtagtgctttgcaacagaggcccgaagaccggtccttatatggccgaggtgctactatcaaaaccatacaccccgagcccagcctaaaaccatttggaggattttgaatagagggggaggtgtgaatccaattccacaataatccaaccattccatagtgtccaggtgataagaatatcccaaagtctagagttgtaaaaccacctaatgttgcctaattaaccagcgaagcatctacctaaaatcatactagtggtaccatgagtagagtgtccactagttggggttttgtttattctagggtgaacaaggaaataataacaataacaataataaggtcataataaaggtacataggcatggctagataaaatagtgataacgcgggaatttaaataaagcgataatgcaataatttaaatcaaaataattttataaactgggattcaatatgttcaaggatgatgtgacttgccttactcgctttcccaaacatcggcttcaacctccacgaagagcggatcttccgaagctgcagcgtctacacgaccaacggaaaagaaaaggcttttactctaataaactccatataacaagcagaaacaaagcacaaaaatgggttcttgacttcttaaggaaaaattagagacttgaacggtccaattccgagttcaaatggccaagttatggtcatttgaagtttatatgctctttaaatgaatatttgcgaatttcttcatttaaattttaattttaaaagggtttattgcgtcagccgaggggagggggcgcgcggaccgggtccacgggagtggggcccacgcagcagcctcacggtccacggtggactgggcgcactcgggctcgcaccggccagcgccgtgggtcccacgcgtcagccgcacctaagggcgcgggcggctgatggccgggccccacgcggcagccactcggtgcgcccgagggcagccaagccggcgcagccggcgggaggcggcgcccgcgcccctatggtcgccggcggtggccataggcacggcggagcggtggccgagagaggggaagggaagagggaaaagaggcggcggtccacggctcaccctaggtcgacggcgacgacgaaaaaggcggccggagcgaaggaaggcggcggcgcggctcgggtcgacggggtcgacgga

SEQ ID NO: 26310 - DNA, 8431 bp, Oryza sativa
cggcggcggaccggagctcgacgacgacggcggagagagagagagagcgatggcgcgagcttgattccggcgaggaggaagggcggcgagaggcggaaacggacggaggaggtgcggggagggtttaaatagagccgggacgagagagggcggccggggaaggaaggaaaccggcgcgggaggtcggccgccatcaatggcgccggcgagatttgcgggggcaaatctgcccgtttgaacgcgggagagagagggaaaaatggggggaaagggagaggggatcacggggagtgattttcccctctttattgcacgcggggacggcgggattcgcggcggcggtggcgctagggcgcgggcgaggcggcgggagcggcgggaggaaggggatgacgggtgggccccacccatcagcgagggtggcgggcgggcccgcccgtcagcggcgcgcgcgcggggagaggccggatgggccgcggggagaggagagggagggggagggagatgggccgagccggcccaagagggagagggagggaaaggggactttttagagtttttctttttataaaatcattttaactttgtttatttcttaataattattatttgtgctctgaaaattccactaaaatttatttacgcattttaggcttttaggaaatatacaaaaatccttcaagccttatttgacttttaactttgcacattttaattgttggaggctttcacacggattttaattattctaggtataatttagaggatgtattttagagtcgttttgagacgcgacaaaggtgggcatgggcgagggcgtggtgtgcgtgcgtgcgttgcgtctgcctgcctctatcctttttgcaacggaccgatcccatgatcccacgattgcctccgtaacggccaggcgattcaattccaattatcgcgtcgttactatggcaactggcggatatcactcctacgatataaggaaaccgctaatctgatcagatctctctcgcttgctttctatctctggtgttcttcctcctccgcgcgcctgctatgatataaggaaaccgctaatccgatcagatctctctcgcttgcattccatctctggtgttcttcctcctccgcgcgcctgtgctgcctctgttctgcctccctgcttctgatcgcttgtgtgcatgagagatcggaacgagcagggcctccggaaccacaccttcgcctgagatctgcaccgggtaggtgggtgatcaggtttttggagagtgcttccgcacgactgctctcgacttctgctctattcgtcgtcgtctcgtcatccaccatgtttgcaactggagccgccgccgccgccgccgccgctgccgccgtccctggagatggcgcgccgggagtcggagccactgcaaatgtcaacgtcaacggaggcagttctgcctcataatccagcggagggacattctcggggtatatctttctcctactgttaactcattctctgatacatctgttagtcgtgttagtcgcaattctgttacgttcttggtatgttcatgatgcttattatacattaagcatgctcctggttatatttgattttatcactagatcacccccacattgttcatgccataattattgtcttaatattttagattaaaatatgtcgatataagactatatttacaacaatacatcaatctgttatatactaaagtccattaaaaatcgtacaaatgttcctgtgacatcttatggtactactacaaacgatctaaaccatcatgtgacgttctaatctctatctctactattataaaaattcaaggtgtttttttcaaggatttttagtacgtcactaggagatcatgtcggacacagttatcgtaaacttcagacgttcccatttctttccgttttttcgtctgttggaatcgctcgcgtcggatgtgagaatcatggagcgaaggagacaacccggctgctcacgaagatacaataaagtggcgagcccacaggccccagcccaccaccgcacggcccctctaggtgatgagcgtgtacaggtaggcattgaggcttacagccggccagcgatattcaacggagaggtgaatcaatctactcatttatccttcttcgatccattgtgccttgggttgtgtttgtatgctcggtgtagataccatacttctgcagacctggctaccagttccagcccatcttaaattcaggaagttgttgcggtgcatatctatatatctatatacctaataaaaatacgcaatgactccggtgaaaattttcgtccgtcctcacctaaattttttttcgttcgtaacatctgagttcaagaaacaaaatcatctagagtctgcgtcaaataacacaaaaaaattaaatcaattcgtgttacatcccaaatacatgaattgaaaaatggcaaacgaaggaaaaaaacaatcgaacaaaaatctagccaccggacctcaccggaaacacgagtggtacgagtttgccaccgtggagctcgaagccaccgtcgtcgccttcgagctactgccactgcctcccaaggccagatccggtgaggaggaggcacggagtggccgccggtggtggcttggttgagttgtcactgccgcccgccaccgtctcccaaggttagatccggtgagcctcaagcctgatttggcgaggagcgggtagcgttggcaccctgacgaggaggaaaggggctaattgtggggagagggagagcgccggtgaggggagggcgagggggagcagtgccgcccgtgaggaaaggggagggagggggagaggcgccgccagtggagagagacggcccacggcatagagagagcggtgacgccattgggattagggttttggcgattcctgggcgaccgggagacgccggcgatatcccacattgtgggatggcttaggatggagttcttctccgatccggttacgtcgtttgcagggttttcgcctgccttgtttaacatcatggaggggtttttgtctcgggatcttacgtccttgggacaggtgattggttctcgactcggaggccagttcaagaaaattagtttttgctacgataacttaaggttggtaagtttttttcacatctatgatccatacatatcccctatcagactccgtttcagggatgttaggatccggaaggggaagaagtgccatgttcaatctaatctgttggagtctgtctcggtcaaggactctgtcgttcagtgctataaattggagagcctagggcaaggatctgcaccctgtacaagttccctgaagacaatcttgcaaagccgcaattccaatctgcgtctctcctgcttgtttggtgttctcatggcgtagtctgccggtgggggtgataaagggatcatcactgcgatggttgcccacccgaagccggccgggggaggtgagatcgtcatggcgaatcaaagggaggaggttctgaataaaggtactttagcaatcggggtagcaacaccagatgaaaaccaaaccacgatggaaggtgcgggtactgctgttgaggtggacagtacgactcatcaggggccagcagctttcattgagggggaggttgtggaggaggatgaggacgcaatcgaagtggttatagaggaagaggaagtgcagaaggctggccaatggactatattagcaagattctattccttgaagtctccaaatcttgccgctctctttgaagacatgcgtcgtgcttggcggctgcgatcagacatgacttacaaatcgctgagggataacttgtttatcatatcttttggtgctgagggggattataggtttgttatccaaggtggtccatggattcataggggggatgccctgttggtggcagagtttgatggcatcacctgtccgtcaaaggttactttggatgtgattccagtatgggtgcggatttatgatcttccactggtgctaatgacaaaggcaaggggtgagatatatggtagcaaactgggcagagtacgggaggtggatgttggggacgatggccgcaataaacatgacttcttccgtattcgtgctgatctctcagtcaagcgaccactaaaggataagttaaccatcaaaatctctgcacaaggtagagtggaaacaagaagttttgcacttcgatatgaaagagtgccacacttctgtttcatatgtggcttcatggggcatgctgataaggactgcgataagagaggtgcaaatgtggagaatccctttcgcttttcagctgatttgagatgctcacccttaaaaccgtttgagcgaaaagttaacaaggtcagagcaatgcagaacactggagcagctcgcaatctgttcttccgtggagctggaagtgctggctcatcgtcctcaaagcagagagatgtggaacagtgggatgaagccattccacccagagtggatgctcatgataattttgatgacaaggagaaggagggggatagttcagtagatgagcaattggctctgcaagccaatctgatgaatatggcagggacagaagggatagacaaagagcatgatgatagtcaaggtccgaagttaaagagtgggtctaatgttgtggccctggctggatcaacaggggaggccataccctcaaaagagatgattcatgctattgcaaatcttcagcaacaagcctcctttggggatgggtcgtcagatgactggagtggcgggaataggaagagaacgcaagacacgacagaaattaacaagccggggcgggtccagcaagcgctggtaatataccagagtgcaacggtgaaggatgcggcggatagtagagaagccggcaaggacacaagagcgctgaagcgttccaggaagacggaaggaggttcggaggtgtctaattcggaggcaaccagccatggggccgctggtaaactgacaggacctatgatagggtctcgtcaggagcaatgaattgcttggcatggaattgtcgtggtattgggaatgccacgacagttcgtgatctcattgccttggtgaaagaggcaaattcccaggtggttttcctcagtgaaacgagacagaagattgaaagaatccgcagacttcgttctagattaggtttaaaaggttttgttggatgtaatagtgatggtttgagtggtggtcttgctctcttttggcatgagtctatctttatggatgttaagagtgtgaatgaaagatatgttgatgcgtatatgcgtttgtctccggaagatcctctatgtcatgtaacctttgtgtacggagaaccgagagtggagaatagacatcgtttatggtctcggctcctggatctcaaacagtcctcccccctcccttggatgattattggagatttcaatgagactctttggcaatttgaacatttttctgtttctaaaagaggtgaggctcagatgagagctttccgagatgtgttacaaatatgtgagctggttgacttgggcttctcaggggtcccctatacttatgataaccgaagagaaggtagatcaaatgttaaggtgcgtctagatagagcactagctgataatagttggagagacatctatagtaattcccaggttgtgcatctaacctcgtcctgttctgatcactgtccaattctcctgaagtttgctgcggacagtagacagtctaaccgaaagaagtgtttccactatgagatttgctgggagcgtgagccggcctccactgaggtgatttctttggcctgggctgaagtaggagaaaaaagaaccttaggggacattaattttaccctcggaaaggtaatgggagcacttcaggggtggagcaaggtaaaatttaagaacgttagccgtgctatagaaaaggccaggaaggatttggcaacccttgttagccacaatgctgactatagtgagatcaggcgatcctctgatgtcttgaatgaattactttatagagaagagatgctttggctgcaaagatctagaataagttggttgaaagaaggtgatagaaataccagattatatctaaattgcgtgggcctgatggtaccgtagtgaagtcgactcatgaaatggagaaaatagagacagattacttcaaggatatgtttacagctgacccctgtattgatcagtcaagagtatcccgtttgttccaggaaaaggtttccccggagatgaatgtggatctttgcaaagatttcactgagcaggaaattgcagatgctttatttcaaattggaccgatcaaagcccctgggctagatggtttcccagctcgtttctttcaaagaaactgggatgccattaagaaggatgtggtttcagccgttaaatctttcttcgaaacatcaatcatgccagagggtgtgaatgatactgcaattgtgcttattccaaaagtggatcagcctatggaactaaaagattttaggcccataagtctgtgcaatgtgatctacaagattgtttctaaatgcctggttaatagacttaggccaatcttggacgaattggtctcacaaaatcagagtgcctttgtgcccggtaggatgattacagacaatgctttgctagcttttgaatgttttcacttcatccagagaaataaaaatgcgaataaggcagcgtgcgcctataaacttgatctttcaaaagcctatgatagggtggactgggtgtttttggagcagacaatgtgtaagttgggtttcgctccccggtggattaaatggatcatgacatgtttgtcctcggtgagatattcaatcaaatttaatggaacccttctggatacttttgctccctcgcggggtcttaggcagggagaccccctttcgcctttcctcttcttatttgtggctgatggattctcgagactaatggaagaaagagtagctgctggggatattacgccggtcaagatatgtcgaggtgctctaggcatctctcatctactttttgtggatgatactctgctgttttttaaggctgactgtgagcaggcaagactgatcaaaggggtgcttaatgagtatgctttaggcacaggacagctagtgaatccgaacaaatgttccattctgtttgatgatacttcccatgctgaaacacaggacgcaataaagaatttactgcagattgtgtgtcacaactttgaagacaaatatctggggttccccaccccggaaggaagactgaacaaaggtaagtttcagagtttacaggagaaaatgtggaaaagaatcatcttatggggagaaaactatctgtccagtggaggcaaagaaatcatgttgaaagttgtgatccaagctattccggtttatgtgatgagtatctttagactaccagagtcggtatgcgaggatctgaacaaacttgctcgcaatttctggtggggagcagataaaggaaaaaggaaaactcattggcgggcctggagctgtctgacaaaaccgaaacacaatggtggcttggcttttagggactttcgtctctttaaccaagcgttgttagcaagacaggcctggcgtctgcttgataaaccagatagtttgtgtgcccgagttatgaaggctaaatactatccaaatggatccttagtggacacggcttttggggggaatgcttccccgggatggagagctattgagcatggcttagcccttttaaagaagggcatcgtctggaggattgggaatggccggtctgttcgcatctggagagatccttggatccccagggaccattcttgtagaccaataactactaaaagaaattgcagggtgaaatgggtttctgatctgttgggacaggatggatcttgggacgttcagaaggtttcccgggtttttttgccgattgatgctgatgaaattctcaaaattaggacatcggtgcggctggaggaagatttcctatcctggcatccggataggttgggacaattttcggtgagaagtgcttataaactggcaatatcccttgattatgcagatgaaagttccagttcctctggacagaatccacagaagatatgggatctgatttggaagtgcaatgtgccccagaaggtgaaggtcttttgttggcgtgctgcaaacaactgccttgctaatcaggaaaataagaagaaacgtaacctggagcgttctgagatctgctgcatttgtgggaatgaaacggaggatgtcagtcacgctctaagtcgatgtccccacgcagtccacctctgggaggccatgaaagctgcagggagcctatccctgaatgttgccggaaatgctacaggaggctcctggtttttcgaccaaattgaaaatacaccagctgaggaaagaatgatgttgtgcatgatgctgtggcggatctggtttgtt

SEQ ID NO: 26311 - DNA, 5822 bp, Oryza sativa
cggtggtgtggagggcggcggcggcggatccggcgatggggaaggttgtggcgacggatccggaggcggggaactcggcggcgggccgaccgtgtgtggtcgagcttctccgcccgcccgaccacgatggtggccgtgctcgccctcctctccaccggcctctccctgtccctctcccgcgcggacctcgccgccgtcgtcgtcgctgagccgcggctgctctacgcgaaggccgaccgtgcgtcgtcgcgcttctccgcccgcccgaccgcgatggtggtcgtgctcgccctcctctccaccggcctctccctctccctctcccgcgcggacctcgccgccgtcgtcgtcgctgagccgcggctgctctacgcgaaggccgaccgtgcgtcgtcgcgcttctccgcccgcccgaccgcgatggtggtcgtgctcgccctcctcttcaccggcctctccctctccctctcccgcgcggacctcgccgccgtcgtcgtcgccgagccgcggctgctctgtgcgaaggccgacaccatcgctgccagcgctcggttgggtcatcccgtccgtcgtcgtcgccgagcccaccgccgccgacgtcgcccgagcccgccgccgccgctgtcgcccgagccgtctaccgccgccgtcgccgagccccccgcagccgctcatcgacgccatcaaggaggccggcggcgaccacgtctggaggtgagggcagaggcggcgtcggccatggttgttgcaaacggcgttgtcggtggttgtaaacggcgctcatcccatccctccctcgttccttgaaccaaacaaaaaactgggatcatcctattctacaaaccaaacacccgaatggaatcatcccaatcctcaaatcagggatggtttcatcctatcccacctagtcccagaaccaaacacacgctaagtggccgaatcaaatccgatctttccaacccaaatacccaattaaatagtccgagtacagagccaaattaagtgtcaaaatatacagctgagagtccatatacacagtccaattacaattatacactcccattacatgtttgcagtccatctacaaatttcaattacaattggaatgtacaaattctatttcctttttccctctccctcagcccagctttcttccctctgtcggcccagcaggaggtctgcttctcctccctttccctcagccaggcaaagccagcacgcacgcaaggtgttgggtgaaatgcctgcaagccatgccatccaaccaagccacagcacgtgaccctaccaactcgaacgaatgttggtgtcggccttcaagtcgtgggtccagccacgacaacctctctcccctctgcacccaaacatccagctcacaggagccctccccaaaaatcggcaacacagtgagaggaagctcacaccgaatgcaaagccgagtacacaccgaaaatgggagagcaagcgcagcatgaagcttaccttatacagtactcctccctctgtggatgtcgacctcgtcgccatccatcccatccgccgccgacacgtgctcgggggaagcctttgaccgacggtcacaacgccgcctccccaagccgctactcctcgtccacacgctcgtccttgtcctccactgctcatagacgggcgtccacgctgcacgccaccacgccgccactgtgccccaccgcgatccttctcctcgaagccattggcatcacaagcaaaaccaacgccaggagcgactcttcctccttgtgccgctctctcccctccgccgccagccacctctttccccgcgcgagctccgcctccacggccacgccggcccgcgcgacggcctccccttccatcgccgccgccgccgccggctgcctccccaaccggcgcccgaccacctcatgcccggcgcaactcccccacttccctcctctgactggcgctgcccccgcaactcattgtatagcaacgttggcgctgcccccgcaactcattgtatagcaacgtttgttaaaatatataacaagtaaatttaatataaaacatatgcacatttggttgattacatggttatatctgagctattgtctcctcatcaccttcttccccatccacccgaccttctcccccatccacccgacgccccctggccgccctcagatcgccgcccagccgggaacggccgcgccgacgcgggccgctccgagcaccgcccacggcagccttctttcccctgccgccgagctcctctctccccacctcgccggccatcctccctcgccgcgccgccgtgccgcctcctgccgcgccgctcggcccgagccgccggcgccccagcctcctcttccccaccaacgccgctccctctctcctctctcctttcccccaccgccaccctgtgccaggccaccatcgccggcgcctgtcttctctcgggcgcgcgtgaagtgaaggagccgaaggcaaagaagagaacgagagagagagagagagaacacaggaagaatcgggaagaggggaagaaaccggaaagagaagaaaaggataagaaaaggaaaaagggaagtggcacccacagcggggcccactgtcttgactcatctcggtggaacactttgactcaccaaaagtctatatcactaccctcttgctcgcctccactaagaagttggaataagttcactttgagtctttctatttgtctatttgtcgtccagtttgattttcgtcctttaattgcaaaaccggtacgacagatccttaaacttacaaaactgttaaaataaggtctcttagcagtatttgaccccggttttgggtgagttggtgctaggggtggaaacgagccgagccgagccaggctcggctcggctcgtggaagctcgcgaaatgccaggctcggcttggctcggctcggttctccaaccgagctgtacattaggctcggctcggctcgtggtctggctcgagccggctcgagctggctcgtgagctttgcaatagcagcagttgtattgccagcagcagttgtgttgctttgcaatgacttagttattcagataataactctcaagtccctacaaagataattaggtatattgtatgcagccaacatataacaaattgatgggcttttttggttttcggccagaagtctttctattcaaaccgagcctactaagctcgtgagctgctcgcgagctggctcgggctcggctcggttcacaaacgagctaaaacccaggctcgggctcggctcgttcaggattcgagccgagccaagccaggcgagcccgagccgagcttgagccgagttcacgagcccgagctatttgtccagccctagttggtgcctatgtggctagtttaactcggtacgtggcattgacgtagcgcttacgtggtaattcgatccgaaaaataataaaacctatgagacccacattgtcagttttacacaacaataataaaaaaaaatggtggggcccacgtagaccccacctgtcatcctcattacccttctctctcatcctctctctccctctctctagccggagtggcggggaggagtggcggcggccggagtggggctgggaggagcgggtcgggcacccgacgaggaggccaaagaacaggcggtgcgcggccagggcgacggaggcggccgccgcggcgccgcacgccacgacgaggcactcctgagatatcttcctgatggccctcaccacctttagcttccttgccaccttcctgtggctcgacttgatgccgcgaagaatggacgagtacatgtcgtggacccgccggaagctgctccgcgtcgctgaacgggttgctccgcacgacggcggcggcgccgccgtcgtcgctacggcgccatcggtggcggcgacgctgtcggagatggtggcgaggaagcagcccatggatatgtagttgctctgtgcgttcttgatgttcgtcaggaattgcctgcagatctcagacgcctcgtcgctgaagttgaagtagcctaccatcgccagctcgatctctgacgacgtcctccggtgcatcatccgctgcaattccgcggggacgacgcctctggtgcagcgtgctgatgcactcctcctcaatgctcatggattccatggctgtgttccaatacaaaccagaatttctctgcattattgatggcaaaatgaactgagtaacggacacacaagaacagataaacagatgacgaaaagctcaatgttctatctctttttttcttctctctactgatctcaccatggtgtgatgggcacatgaattgtccccattccaaaactcaatttcttcgagtttcttgatcttttgggacaagcactgtttgctttcttggagttccttgatctttttgacaagcccatcctaggataagtccattatacctcctcccgtccagaggatacccttgagaatatttctcccaaaattaaaggaagcctcttccaaattttgggtatcctttttcctcggtatatataaatccatatgaacttcagaaattcatatcttgcgaactccgattggctccgttcaacttccgtgattctcctaaaattgagatccatccaatggcactacgggtctaggatgattgttactttatttggaggattttgtatggttttcttgtattgatcgcatattaattaaatattcgaatagtcgtgctcatggatattgagcgccgggacttgtactactcttggctagcctcatagattgtaatcttgcttagattaggaattgaggtgtgaccttgcccgatgggcgggaaggtcattatgatgttgggaatgtggaaaactgaatgggagggtaaaccggaccaagcgaggcttggggaagatggatgaaccctcgcggattaatgacaacttcaacttaacgttgtttttcagttaaaactgctaggtcataggtttgtgaaatgaattatgaaaactagctttatgcaaagaaaccaagccatcctttaacccctgtgtgcactaaaggcatatgtagtggcggcttgctgagtacggttgttactcacccttgcttaactaaatcttttagataggaattggagttgaccatacatgcactatgctgatgaagagatgtcgaagacggtggagtcagacctaggttcaccagtcgatgcctgtggagtatattagaccaccgctgcttcgcttcctctatctcatctatttgttttggtactttgtaacgtacatgatcatgctcggtctatttggatcctgttttggctaccttgtattattaatttataaattaacctgtgtaacgatgtcagcctgtgatattcaactgtgccatgtgtgtactatctacggattcagagaatggtaatgtaaaacacatggggttttcggtgtacaaaaccgaaggcccatggtaggcctattatttttaaccattagatcaaatttaaaaaagaacaaataatttctgcctctacctccctctctgtaggtgacaggttagatcaaacttaaaaaagacatgtgcatgatgtctcctcgggtacgtatatacgtactctccgtccattacactggtggagaaaccatctttcgtcggtcggccgatttccacaatagtcccggatgcaataaaaaccggggctaaagatgatctttagtcccggttcaaaagggtaacgggcatatttgatctttagttccggtttgtgttaccaaccgggactaaagatcatctttagtcccggttctgaatgctgtcagggcctgtcaggccccccggggatctttagt

SEQ ID NO: 26312 - DNA, 28899 bp, Oryza sativa
ctggtttatttcctgaattttgtaactgtaactttttaaatctaaacgaaatgttaaactgtttaaaaatcttaattctaaaaagaaattacagctatcacgagctcagctcagctcaaggaagaggaagaagaagaagcagcttcaccacctcagctcctcttgcacacacacacacacactctcttctcttgtctcgctgtggctcgctggacacaacacacacccacacccactcccccactctctctccggttcatgtcctgctgctccccatgtcgcccccactcgagctcgactacataggcctctcgccgccggtgcccgccgccgccgatgccgccgccgacaacgacctgaagggcaccgagctccgcctcggcctgcccggctcccactcgccggaccgctccccgcccgccgccacgcttgaccttctcccgctgccaagggcgccaagcgcgggttctccgacgaggcgcgttcgctgccggggtccgccgccgccgccgccggcgccgggaagggcaagaaggcggcggccggcgaggaggatgaggatgccgaggaggaggacaagaaggtcgccgccgcgccgcaggcgcctgctggcaagtatgttcggaattgcggattgtggctttgatttccttctttggggttcctctttttttcttgggaaaaaaaataaaagatggttttgtaaattgtgaagctctggcctctgggttgctataaggagaattttggtgaaaaattgtttttgtttggtatgatgaagcattttcagttttgtagaaatatttttttcccaggctgatatgtttgatatggtgttttttcttgagttttgggaaacaaaagtagggagttgagagagttgtgggcaaaggttgaatttttgtgtcaatagatcctttgtttcagttcaattttgcctctccttttttccctgtgaatttggcttctctgccgttaattagaggagggaaggaaaaggttttgagttattcttcctgaatttccacttttgctcttttcttcaaatttctcactttacaaagttgcctcctttttcttttaacttgagctttcttgcaactcttttttttttcctcaaatccttctattaccaagttttatcatctttaaggtgttcctttctgctgcattttcttggcagccttttgatctgacattactttgctcgaattcttttgctcttgagcctaattggtttctgtattccctccctgcacatgagtagagctagaacatgtagtgatctgactcctccttgtgcatgatgtgttgttgtgcagggctcaggtggttggatggccaccaattcgcagctaccgcaagaacacgatggctactaaccagctgaagagcagcaaggaggatgctgaagcgaagcagggccaggggttcctgtacgtcaaggtcagcatggatggtgccccctacctcaggaaggtggacctcaagacctacaagaactacaaggacctgtcaactgcgcttgagaagatgttcattggcttcacaactggtgagatgtctcgggttaccctgcttgcatttctctttgtaattgcatttccttttgatgtggatgctcttacaattacatcgtctaggatgcctgtgactaggaaccaatatatgcttgatctgtacaagtaacttttgccggtaacatggatttgttcctagtagttttaagatcacaaaaggcgggttatggttcatttagttgttttaagatcacaaacagcaatttatggttcactaatttttacaagaaagcgaaagaggccttatttattatgtgctgattgtatttgtactatacatcttccaaaaagattgtatttttaaagataaattaaaattggctctaattctaattttgtgatcatcgtacaggtctttttttagttctgaacattgctcaatgcagatcatctttatttctgaatattaatcatcgtcaattcggatggcatattgttttaattgccttttccgaatgtatttcaattatttcttgctgttttgattatttttatttcagattacgtaggaaatatactttcattatactaatagttataccgccttttctcgataattaatagacacattgcttagtaatattttttttgtaaaaatctagaaagtgagaacaagcgcgaatttttgcaatagaaattttagtacaaggagagattctcttctgtttgttttatttggccttacaggttagtgtggatgtattgccatatcaggcaaggatggcttatctgagagccgcaaggatggtgaatatgtgctgacttatgaagacaaggatggagactggatgcttgttggcgatgttccatgggagtaagtacactagttcttatctagttatcatcgcaaagaaagaagtaataacaccaatgagatcgaagaaataaaaatgctgttactgaagaacttttgatttaaattgcaggatgtttgccaactcttgtcgcagactcaggatcatgaaaggttcagatgcaattggacttggtaagtttgtatgtttattatgttgaattgcacgttcggctgatctcattttatttccctttaaattgcacttgtagacctatgtgtttttgacacagagtttaaatgcatcatgtgacatacttgctcagtttcaaaatataagcattcctggaatatatttggaacagagggagtatcagtttaggaatattggttttcttgtgctttctttcaaattcaacttagcaattcatacttcatgctgtagggcatgttgaaccagggctggtgacataactcaaaatactctaaaatcaaggaaaccataactcattatgctatatcgatatgttggatgcttgtatttaagaggtagatgtgcaattacggttgaaggtgtcatgcatgtatctaaccagcgctataaaaaagctaactgattgagatctgagtcttactattgatgttcttgttctaatgcattgtttcaccatgattcctttgtgcactaatcatggaatgaattattggatgtcaaacttataatgctttgaatggcattatgtggttgttagctgttatcattcaatggcttcaccttcttttagttgttagtttgcatttttacacatggctcggtaatttacttgtcttgtttctttctcatgcagctccaagggcagttgataagtccaaaaaccgcaactagaatggtttctgccccacagtcaaaagcaagatggagatcaaatgactgtagggaattttctgaaaaccaagaagtctaacagttttaagatggagtctgccttatggtctgtactacatggtttgctattgtgaaagttaaaaaaaaaggtgtcttgttatgttagcttcgccaaatctcctagggacataaactctatttgattgtgcccaagtctttgtacgtgtgttaatgctattcgtgtaaatggtttggacaccatgtgctactgctatgattgagcacccctacctactttgcaaaatgttgtcaatgaactgtttgttcgctacataaatgttcaatgaagcttgcaaatgtattgtccaccaaggcatcaactgttcatgctctgttccatacatctcatctgttttggagtctgatgaagcaaccttttttaaggcagtaactttctacagttgtgttctttcaatttcatgtccatgctttttcatggtgaaactgtgcttcctagccagctttagtgtgtagttgctgagtgggggcatgtagtgtatgcagttattatcttccaaggtaatgatggttgtctctctagtgtcattttaaaaggtttccatctcaaccatcattcaggttggatattatattatcatttctagagagatggcaatggcttatgatcccttagaatcaggcttttctttgccttggtgtgtatcttcctccttagaaatgatgctccactctgcttactttttgctgcctttttctccttactagtgtctgttagttggtatgcatgtggagtggtgtccatttgttccaatgaacacataaaaattctgattctgttcttgtttcaactcaaaaggcatctttcactaacccaaatgagccttcatctgcatttgtttatctcttgtagcttgcaggctgtcgcatctcgggcgctgaatttattcgactatgctgaggcgcgcatcggctgaaagtgactgatagagttcaccattcgtgctgattggcagtgcatgaagcaatcctggatcatctggtttagttttctaacacttcttcatcttcctttgttacctcctgttgttttccaactctgaacttgcaatatatatttaataccagcagcatccagtaccttataggctctggattcctttgttccctggtggtcctgccatgccaccaagttgctgatattttaattaaacctttgcttgatccctttaattaacagataaagtcactcattaggatggtagtttatttagcttctgtgtgtggctgtttgctccatatttcactgtgtttcatggcctgcagataattgtgaatgtctggactgcagcattgctttcactttcatcttttcaggaagcatgagtatgcatatgttccctctagcttattaggtatatcatgcattctgtcatttttatttaagagataaatcttgcatgtcaaggaaggaaggtgagcatcttcccacagtagcttctcctgtgaatgaaatcaaaattctgtttttctatcacaccctttcagtccttttagttcatgtcctatggattttgatggtgttgtgtacgaatggaatttcgacaaattgtcgcagatagtgatttgcacgacatgattgatcttctttttttattattattattaaaactaaaaccctggctcgtcggttgtttttttttttctcattttgtgaacaataattcgtgcaacttttacagatcgatgttaacttcgtactacattttacagacatattgatatttgctctcataattctgcatttctcattagcatatcatcaccaaaaacttcagcatttttgtctacatagttgacaaaaggaggccatggctggtaagagacactgtcagcctttctttgtcagctgtaaaagcaacatttgtgaagcaaatgctgagcatagctgctcatctcagtgaagcgtttatccccaaactgcctgcctttgtggtggctccagattttttttttagaataaaggaaactagttgcagctgcaaattgacagcactgttttgtcaactgaaaaattctgagccaaattccaacgacgtcacatgatctttgtctcatctagcagcataactcatctgtttgtctctgcgaagttggaaacattatctctttgttttaaccgagtgtgaactagacagtgtttccttagatgcaaatattattatagcccagataacaattgctatagcctaaacacaatatgttaaagttgtgtccaactttttggcaaacaagattcatatttatgaggaccattgggttcaagggaatttcagaggattttcctaggaactaaactatcttgcaaaaaattaccgcgttttaaaaattgcctcgaatttcacagggaattagtttaatttccataaaattcctgcaatatctctctgttcaaaagagggggtaaattcacaagattattacctagactctccgtccttaaaaaaaagtctagatttatagttaaaagttattttttttacagagtagtatttatctagaacagtatcctacactgcagatgttatatgtgcctcacttgcgacatctgaactgaactgaactttatatccatgattcatgcaccggaggagatcatcaaagtatgaagaaatcatgggcattaccaacactggtcgctcgctggccccattaattaggaaaaaaaaatgggaccatatattcttattaacataaagatcccaacaacacatttttttttctcttcagcatatggccattcccagcccaatgagaacaatgtccatagcattaaataatctgtcacgaaaattaaaaaaatgacgtggcaagtgaataaatgaggaaagagaagaaaatcagatcttacatgagatatagtttctacgcaacatccaagacatcatgtgagataaataacattaaatttaagtatgtaaaagttgtgtttgcattaaaataatagtgtacagtactagtttctttataattggagttaatggaaactactggcctaattaaataagccatctatttctgacggtcaaaaaaggcaaaacaaaaacaaaaaaaaaccgaaaaaagagtgcagaaattatgagaggtcgggcccaccattgggctggactgagagacacaattatgacgggcatggacgcccaaaaaaaatgagaaaaaaaaataatttgcaatgcgccccaacatccgctgccccacacgaaagcgacgtaaacacctcgctcaagccccaacacccagacgctgacagtgggcccggggatgtcaccggggcccacacgtcggtggaggtagggccgctacgtgggagtgggggtgcggggggagagacggtgcgggtgggccccacagtgaagtggagcgtggctgtgggtaggaggacagcctgggccccaccccctcccgtcgcgagcatcgtgggccccgcgcaaaaaaaaaatgaaaataatgcgccgcgcgcgtgcgggcccacacctgggatggatgacaggtgggccaacgaggtggtggggccggggtgtcattgagcgttgtgggtgaggttgcggggggaaaaaggaaaaaaggaggtgtgaggtggcagctgggtggggcaagtgaacatgggcgcgggtgtgtggagggcgacgcggttgggggggtgcaactgcaggaggcgatgggtacgcgggaacgaggtctctcgctgtcgggtgggcccacggacgtgacacgctggcaggaacaggcgtctgccgtgtacccctgtatccctgtcaagttcctgtcaaggttgacggtgtgtgttagctgtgttcagattagtaggattgcaacgtagtatcatgtttagcattagatttgtttttttatgacatgtactcgttgaattctagtatgttagaaaatgttatattttatattagatttatttattttgaaacagagattaaacagagtatggtttgtttaaggaaattgcttatgagtatcgttggtactatgggttggaaatactttgcttcgcaaagaaagcagtataactcattttaataagtgtggttaattaaatgttagttgaaaaacttaaaaataaattaagatgatttttttaacaacttttgtatgtaacttttttctttatgaaaaacacagtgttttactgttacggaaaacgagagtgaaagttgataaaggtgaggaatgaaatcagcctactcttagagtgtactttgtatatccatctatttcaaaatataagaattttcttatactaactccaattcacaaaaattcttatatttttagagaattagggcttaggaagggaatttaagtaatttaaaattttattaacactgaggtgacttaaaaaaatatttattcataaccaccaaactaaatgcttgctagttcaaattgctagtgaggagagtcgctatggtattctctaaagtaaattaatttcagtgacgattagtacgtagtactagtacattacgagtgaggtatacgaacgtaaattgtctctatcacacttattttcgtatcaggcatatacacattctccatccgtaaaaaagaaaaacccatttttaagtttgaatctaaatatacactatatcatttaaacctagaaatagtttttttatggagggagtttctttcgtgtcagctacagcagatgtacagtgctttctcattggtctttgcgttacacactacttttggatcacccatacggccatactccgtataaactgtgagtttatgttggcctactgttaattagggttgttgtatgagtccaccaatcagatattaataagtgtatctagttgaacaactctagagtgccaacattagtcaacctagccatttctttttcaaataattgtgaataaagggcgctaggagtgaagtgttcaaccgtctctaggctgcgcattcagagcaagaaaaaatagttactcctatttgactaacacagccttttaagtccctttttaattttagttattcaccagattgtttatcctacagtatgaaatatatgtttttgttaaaaacgtttttctatcgctttttagaccatttattttaagctatttaccaattctattttcttgaaatatttaattgattcttatagttaagtagataatccgtgacaataatctacttaaatttgtctgctgtgagatccttcccattgtggcaactggcaagccgagtaaaatttcattgctagtggtgcccattgcttagctttttaaaaagggcgaatcaattgttccttgttatcgcatctcatgcaaactgacggagtaataagctccatcatgcatgcctgctagctaggttgttgtttaccggtagcagcacaaattcatcaacgaaatgccaccactaagcaatttcgaaaattcctagttcaattttggtcggataaggcctatgtggttgttcaatttcctagtatatagaattgggactttgggagatacagatcaaaattaaatttaaagtacatgttcccatacttgtagtagccatctcatgggttttatatacggccccccgcctatttggattatgacatgcaaactgtcagtgtctatctttgtcctctccctttccctgttttcttcttttctttattccctacttatctaaatcacatcaacaaaaatctggctgtcaacacaggaaataacaatgttgtatcgtcgccaacaaaaccacaatgtagaactacattagtgttaatctgtttttgcatatttcaatctcagtacttgcatgattaagatatgcggctaagttgattaagtgggctttctttgaacggcctgaaatgttgttacaagtgctaccatatgtaattcgcataaagtgttgtagctcaacgcacaccaacacatttgtgcacccaggaattcagcatagttatcgcaagaaagtgcagtcgcgtgtaaacaaaatgtcccaaaaccatgcatacaattatacaaatctggatgaaagtacaactttgccaatattattgtcaataaaactaggtcaaactcaacttacactgacgctggtattcatagaatcttttgctatataatatgccttcatatgttaacagtgatgaacactgtcgccatctcgctccatgtcaaatgggcaccatatcaacgtaaaagatcacatgtaacctttctctcctttcttccagggcgcccatggataaagcacaaaagacttttcagttctcagcgtttgtgctcctcactcgctgattccatacttaccaccattcattcatattccatgacatagaatacaaatgacaagaagtcctacagcaggaatgctaactttcgaatgtaaaatggattgattaagaacaatagttctgacccggaaaacaaaatttgtacatatgatttgacttcgctaacaaaatggattgcgcatctacatcgcttggaatgttgtaatctaatgctctattaaactaccaactgtggaatggtagatttgcatggcctatctacaaacctcagttcgaggtggtgtggcttttacaagatttcaagggcgcaagatgtcaaatcaaggggaaaaacctctgaatcctgtaccaagatgagatcattggcaaaaactcattcttccaactccttgagaaaatctacattatcaacaaatacctgcaattatggtaattaatgtatcagacggaagaaactgcgggttcttcatgaaaatagaggcatggcacaaaatatgtaatgcaacagactaataatgcatatgcatatacttttttttctgacaaatgtacttaggagtattattattctgaagatcataaaatcgcacagaagacatgtacgactacttcacatacttgtttcaagatggggaatattcatggcaggtcagcagaacagttgacttggtctaattcatcattattgtacacagtacaataaaaaaaaactactactccctccgtttcacaatataagtcattctagcatttcctacattcatattgatgctaaggaatctagacatatatctagattcattagcatcaatatgaatgtgggaaatgctagaatgacttacattgtgaaacggaggaagtacaatttctgttctcaaattacacaaagaataatgttaattttcttaaatatgcctttactgtatacatggtaataaactaattggatatccttttttctagggcagtgagaatcactaaagattttatggtgcgtatgtattattcaagacacaccaacaaaatagcaacaaatttcttccaagtttagttatcatggaaagtttatcgccataaagtgtaaatggcccagaaaaagctcatatggagcagtcagaaacagccaagaacaaacaacctttagcaaaaattatgacccccttatctacacacacacacacacacacacatgcacgagagagctgtgattctcaaacaaaaagaaatagtacatactgttttccagccatctggatctgtgcaagcagttatcttcgtattaattccaggtaatgggccaggttcacgagttatttgtccaccattttgtctaatgacttccgcagtcttgtagacatcatctgtgctaatagcaatctggaagggtaaaaaaattaaactccacgactgtaatgtaaatacgagggatgaaccctcatgaaatgaaactcctattatactcatatttgacccaaaccctttcggatgcttctagtaaccaacgaatggcaagtgatccccgttgtttagatcatattcaatcagaaatttccacatagatccttttttattactaacacagtatagaagagaaacttccaaatccaatctaaacactcaaatataatatacctgtgcataagcatttcctttatcatattccttgacaccatagttgtaggtcaactccagtacagcatttttgtcttcaggaccatatcccatcattgcaatagtatactagagaaaagatacaattagatttctaatagttataaatcacataaggaaatcataggctatgaccaaaagggttaggtacatgcagatttggttgcaaaatattaacagacaaaattgtaagcatctagatataacaaaaataatacttcctccgtttcataatgcaagtctttctagcattgtccatattcatataaatgttaataaatctaagcatatacgtgtgtctagattcattaacatctatatgaatatgagcaatgctaaaaagtcttacattatgaaacggagggagtatatatcaagatcattcaagacagacaaaacctgttgtggtgaaaaccagtaacagaaaatactttgaggtctattttttatttgttatacgtgcatcaatttgacatgactaacgccaagcagctgtagcatattctctaaaaccctgtgtggactgtcatgaaaaaaaagtgaaaatattttttaacataggtttcgctatcatatatgcttctatgaaattgcaaggttatgttgtcatatatacttattatgaaattacaacttaacacatctatattgcttggtggtggtggtggtggctatggccccttactggtctcacagcctgacagcctgatgtatggggccaccaggctatgagaccagtacacaaatgagtgctatgctcactgtgttgtctctaatagtttgcttctttttcaccttgattcaagtgaaaaactcaaggacattttagttttattagtagttcactgcacaatttattattaatacgtgtttcattattcatgtcaaaatgcattgaaggttttatgtctcactttggaaaacaacaatcctataaacatgtacattttctttttgtttcttaaagatgaagcgttttgtttcaaccaaacagaagcaaacaagttctttttttcagaaaatggactcaatatttttatttctataatctgctgcaatgcacgggtatttgactattgttttgtataaggagaaacaaaatagagaaacattggtaaggagtaaagtaggtcgattttagtagttcaggaggtaaaatgagtaaaaaaaaatacttcagaggattaaatgctccggtgaaatagtttgagggagtaaaatggattttttttccttttttttgttaagtcttgcatcatttgtatctgtagttgcatatccagtgtaaattatgcatcagagtttctagattaaaagacaatcacttttacatttgtaagtttagaacttaagatatactcccttcctccacaatttgattttgccaagtttagcagaaattaaggtagaaacaaaaagacatgtgcccctaaaaaaggtgggggacaagtttggattggcaacatttcaggataataaaagtgcaaaaaggtaaggggattgaatgcaaggctgagtttgtctgctgtagttcactccccgggttctcaaaaccccttatatttgtggacaaacgaacagggccaaaatcccttatatttttagaaatttgatatttgttcaatgcatatagatgagtaatatagggaaaaaaaggtaatctgaaactttgtttcacgaatgagtggcataataactcatcagaagaaagttaacaagcatttggactgtaataatatcggatcacagggttctagtccttttgacagtgacccttatccatagcttggatagcaactgtgccagagaagtatattttgtttccagattcatgagtgaatacgaagaataagacaaacatgacacaagatatcctgacagagaacagacaaagtttgtgatcaaccctatgcacaaggtaccagaaaaccagatggcacaacatgcttgagactaagatttcaaaagaaaagaaaaaggcttgtcaacaccagaaaatgatgcctaaaaacaatgaagttcccatctctagaaagaaatataagaaacaatggcatgtataatgaaacaaccagtaaatgcacatgcggaacttgctatcacttcggttttatcaataccatgcctactacccaagtctgaagtctgaacccagtgtatgaatgtagcaaaaatcaggatacaaccataatagctacatttaacatgttctccgtaagtcaggataccactgtataagatatggaactaagcaaatagtttacaaacaaaaagtgcatttaacatgttctcatatttcgaggtagtagtgcatgtttttccttatctcacttaagcaaggatcagattagaaagcatcagggcaaacagaagccatgaggacaaacagaagtcatagcaatggaggtgatgaggtacattgatggaagctcttttgaatgtttttctagtactttgtagtagagcataacattagaaagcatcagggcaaacagaagccatgagtgtcacgaggtaaatccatgcaatggttttgaaaagtaccaaccttgtattggggattgtctcgtttccggagaagttccatgccaaatgccttatgatgaaaatatagtacagattagttgctgaatgaataattatgataaataccaaatactacaagttaaagacaataagtttaccttctcatagaaattgatagcatgatcaagatctcccactcgaagcattacctggcataaaggctcaggtgtaggacctctttctataagctcaaatttgtaaccatcaggatcttcaataaaagcaattacagactttccaccttttacaggtcctggttctcttgttaccgttcctcccttggctttaatgagatctactgtttttgcaacctacaagttttttgtaatgaaacttatcaatcaaccaagcacatatccatctttgcaaaggcaaaatattaaaacctataatcagatacattactaactgatggcatgtttaaaactctagtcttatccagtgcacaaaaatagattacattattcttggatgtttgcatgaccagagtaacattttttaccactattaatgaaaaagggaagattatccctcaatgtgtgaactgaaaacatgagtaagttattgttatgttatgaaaaaccttttatgccatctccatggaagaaaagaaggcattgtatggggtttggcatgatgagattaatcatgccaaaatctagcatcctaaaaaggctatttgttttcaactagttccctactacatggttcaatgaaaatttggacaaagcaatttaagccagatcacctggtttaaggttttatggcactcaagaatcacactaacccctacgtaactaagcaagccaattagttgtaggcatcaaaatataagaaaaaaagtgtattattaagtcacaacccctgagagaaatcttatctggatgatacatggataggtctggtaaaaaatttaagcctaaaaaccagtgggaactagcttgaaattctacaagcaaaagggactagtatctttttgagtagccaaaaagaaaaaaagcatgcccagttgaaggaagtggcagttatacacacagggctgaatgtcaaacaactcaactactcaacaaaaatactaagataagcagcagaatcttacgtcctcgacagcaatcccgaagtgaccgaaagcagtcccgatatcataactttccacaccataatctgccaatagatgtacatcaggggtcttgcacggatacaacagataacgcacactatgtgaggtataaacatatgataacagcatttggactgtagaagcttactgtaagtgagctccacaacaaaatgcgagtcctcaggcccgtacccgagaaaagcattggtatacctctcctccggaatgtcgcgcttgcgcaacagcttcatccccaagcactcggtgtaaaacctgcagaacagcaaatcaattcaaggctaacactatggtagacgccagagcaaattttagttgggagtaaatttcattttgggccaccttttattaccgaagtttcgctttgtataaccttctaaccaaagtaccccaaagtggcataaaggtaagattaccccatccaaagtgaaaacatcggttaaaagatgatccaaaacatcggtaataaaaggtgaccccaagtgaaatctactcttttaattaacaactatacgggttgtagttttttttttttttttttttcgttttctatacttgatcgtcttgtcgaggtcgccgacgcggtagacgacatggagcatgcgcctccggtccttcttgacccactccaccgcctcgtcctgcccgatcacctgcgctgccgcggcggccgacgacgacccgcccgcctccgccccggcgctcacccctctcctcgccagcctcaccggcgccctcgccgccgccaccctccccccgaagagcagcgcctcacgccgcgccactgcaaaccaatcaaaaaaaaaaacaaacaaacccaatgaaaacagaggccctcccacacgaacggggaacatggagagggggggatgataggaggtcggcgtaccggaggaggagaggacggggaggcggaggcgggaggcggcggcggcggcgatggggagggggaggaggaggcgagccatggcggtggcggaggaggagggggatttggggggcgagagaggtggggtggctaatctcctttttcctgtcgtgtccgcgattgctgcggtcgcgggtttggatctgtgcggggggatgtcagtgaggctggcaggtggggcccacgagatgggggggtgggccaaagcggaggctgtttgatttgatttcggaaggtttttttcttggccgtccgtgtgctgtcagagattttggaataataaaggaatgaatggaatttctctgtattttctctcatgttatgtcttccttttttttgtgtcttcaacttcttttgctttttggaataaactacaaatcagatcgaaaaacgagtagtcaaatatttcagctaatcaatgagtaaaatattaagctatggacgtgtctacgacgagacggtgcactggattatcataaccagctacctcaatctaatatcaagttgctaatagtacacccaaaagtacatacatttttgttcttttcatagaattttctcttaaattactcatccgatttacaatctaattacaccattgtgtttgtaataattaaatctttataacaaaattttacatgattatattttttataaaaaaatacaaattacttatataatatatctaaattacttttagatttcattaaattactttttagtcataaaagtaaatttaataaagtttgaaagtaatttacatatattatagatatattatagaagtaacttaaaacaaaagtaaagtaacttgttacggcattaaaagtaaatctattgtgggggtaaaaacatgtctatctagaaattagatttaatcaacatattatagttacccccataacggatttacttctaatgacaagttactttctttttccttttgttttaagttacttctataatatatgcaaattaattttaggctttatttaatttacttttatatgtctaaaatgtaatttagtgaaatcaaaaagtaatttagatataatctaaaagtaatttatattttttaatcaaaatataatcatgtgagatctaaactatagagttataaaatatgagtgagagcaataatcctgaaaatcatctaaaatcaaagttcactcctgtttctacccttaccactctcacccatctagcttacatcgacctaggcctacttggcagccacttgggcttgcccactccctgtccatctcttccaaccgaccagcagagagagagagagagagagatcgagggcgttggcagtgctcgacgcatgggagtgacgtgtcgacgccctcaaaatgccgagctccttctctacttctctcccagacgcatcgccattcttcactttccatcccagtgccgatccaaccgagaaaaaggatgccaccgatcgccaacgagccatctccttccctatctaactcacgttctattatcttctctccatgtcgatcaaaactcgttttgacaacctctcgattcgtgcagccaatcgacgggaatgctgccatgcccaccggagctctggagcgcgctctgtgcaccgccgttcccgcttttgtggaccaagccgggccaagctgtcgtgccaccaccatcgtctcatcaccacgaccaaaacccctcaagaaaccccaagattcatgccccatggacggtgatcggcattgtcttctccggctccggccaattgtcgccatcgccgattccttctccttcggtgagccattgtccgatactttgcacgtgaagcatccttgagacctcgctaacaacgtatgacctcatgcatgccagttagattggtagatcaagccgtcgacgtcatcccagagtgaagcaccgtcgccaagccatctatctagagcacagacgtctcccgtgaattagattaagtacagggattagttaaccaaattattccttttactcaactcaatcaaggagtaacatgttctggtcataaaactctcaagacatacacctgtaaaacactatatgcctacaacatgttataacttgtaaaaatcataagaaaatcattataactccaaaaatcttgaaaccaaatgtgttactcttagaaaacacaccaccacacctctgtaaagtcaaaactaataaaaatttctttgcaaaaatattttataacaccacctaggtaattactgcaatataccgacataacttataaattcataactcactaataaaatataataaaaatagaaattctttcacctaaattcatcttagaccagtgcctattcactgtgcacaaatcatgtattttatagcattttggatttttcgcatatttcggtgtttaattgcataacgtgtactttgtatagatgattgcttaagcggtgaagaagtgatttaggtggtgactttttctagttacaaggctagtcccacctccctctctctttgatcaagttgatcctatattttggaggttattgaggttattgaaaatgtttgcaaatcttgcatgtcgattgtacactattatacattaaaattttgtaaaacttgttagacaaacatctattacttgcattatcaccttaaccccacatatatccatatccctcattcctaaccttaggaacaatatgactataccactttatatatgagttttgatgtcactaggttacttataatgcttagtcatgcttggaatggtcttccttgtcattatgggctcattacaaacatgaaaattgtttttgaaataatctggatagaacttgaatacttgtgattttgacaactcacatcatgtgggtaaagtatacgaactctgaagagtaaaaactaatcgattagccgtgctcgcggtcatgagcagcgtgtggatatgcgttgagtatagacttgtgtttattctcctaaatgatgaattttatcttcaaattatgttgagatttgggaatgatctccttgctaccatggagggcaatgaagtgtatatttatatatgattaatgcctactttgatgccgatatgctaagtactagcttgctgaaatttatctgaaagcaaatctgatttgaaagtgttttatgcaaataaagcttgccttatgctaaaaagaaccatattatgctttctttggatatatgccatgcatgtagcgtgttaggattgcttcttgcttgccagtacattatttctaataatatactgactcttgctattggattaactatttgcttgcaggttgtagacttagtattttgagtgatgtgggtaatcgattgctttttttggacttgaacttaatgggggtatatccctaatcagtgtgcttgtgtttaggtagtcaagcttctgctattctctgatatatctatatttggccagtcggcccttgtaactataaagtaattgtaaattttagatcactttcatcttaaatgtattttgctatttatttccatgcttaagatgaaagtgtgaatctagttcacatcctgggaactagattcacatgagtataagttaagaatatttgagatgttgtagatctttagccattttttcaagtctcctgaatatgtaacacatctggtcaccgccttcgagtggtttgacaggcacatcccaggctaaagttgactgacaagctaaaggctcaacaatggtcttcaatattcttctctctaggagtcggatatttcattatatttgtttgatgacttgaataattcacttcatccttcaaatataatgagaggtccgaagagcctacgacaacgatacatactatttagcagtttgaaaagtgtgctaacgaaaatcgatgtagtatttgtattttaatcgaaaagaatggagccgtgcatgatgatcgaagtgcatgcacgcaaggctcctaacctgggaaatcaattgaagaaaattagaacttgcgagagttccattttgagttaatagaaaaaaaggatatagtatttctgtttaaattgacagtttccaagttgaacctataagctaaatgaggcagtagctaatgtttaacacttgattgaatgaaagatctgaatgacaatatcacacatgtaatgcctgctttaatgtatagttttgattgaatgaacgatctcactgtaaaaaaaaatgcacaacggagacatgaatatttacgtgaaaaactcttacattaaaaactatggatgccaaccagcaatgaccagtatagacgatttggttacaaatgtaagagatacattgggttatcgcacctactagaaaagactagaaggctaatagctaggataaggctagaagtcctactagaatactaatctaaccaattaaaaactaatacaaacatattacatgctgaaattcggataacatgtttgataatcttcatcttgagacgaatttcccttttagcataagcaccttcatcctccaaacaacctcatgcagacaaactattgtgcgccaattagtcacttggactataaaattgtaacacccttgattcagaagaggtagatcatatttcaaatttgccatcggcaataaatcctaaatctatggtatcaattggtgtgtgaaccaaaccgagatgcgaaacctggtgcacaaacttcaaactcgccatgggaataaaatcctgaatcttctatatgaaactcttgtactgaaaacgaaatttttatatctcctgatgaaacctcttggtatgctgggtgtgatgctagcaaaatccaccaaaaatttgattaccttgtaatctagacaggaacaatgctccatatcagcgacttgaatgtgatgcttcttttctgcctatcgggtgcatgacattattagtttctcctcctcagtagatgtgccatctcgtatcttcacttgctataacgataattttgtgtcaatccaatagtggtggatcaaacttcaaactcgccaggagcttcttttccttcatttgaagttgatgctgtcaggacgctcaattccgaatccaaaatgtgcaaaacttttttctcttgccttttatggaccaaaagtgacatagtgatatatgagtagacttgagaaatgttttggtttttgttcccaatcaacttcttagatcatccatgtatttcttacgctcggtctctttcccttcacctaagtaagtacctatgcaaatgagagcacacagaactcatgatgcagtaatgtttgttcaaatatataatatatagcacataatcttacatagaaataatgcatctttggttgattaagtagcggttgcggcggcgatggctcatggtggagatggtagtggcgatttggctagggaaagaggggaaaagatgtgacggtggcatctatttatataggaggcatgagagctatgatgttttttttccattataatgcaccggcacttaactaataacaataaaatagtatatgcattgagccctttggcacctaacgacatagcttaaaagagtggtatgagataaacttttattagacattggttatatagattcatagattaatttattttaaactgccgacccattaattgatgagttgttctattttccgcatagtcataataaatttcgcatagtcacctagctaacatttcttattatggggtaaatataattttttagggtaatggggtaaatataattcttcttaatattcctccttgaaactctagatactcttttatttatctcttatttattgtctaatactccctccattccaaattgatctacatataggttttttgaggttattcctaaatgatctacatatttgtgttcattcattaggtctattcgttatttgtgcattggagtaaatggacattgatgcatgcatccatgcacacaagtatttataacccacatgcaatatcttgatttgctattggctaggagatagtggggatggtgcatgcatctagtttgctgctagagtaaatatagtatgagagagttattagcttttcttggtcttggtgtacctatgaaatatgtagatcaatttggaatggagggagtataacatgtacatattcttttaagacaagtagatctagtcatctagaatccacatataagtagtcggtaaaactaaaatagcatggttagattgtctgtcagtaaaggttgtgtctatcagtatactattatcgatgagtttttctgtgacacaccctttctgtcaagaaagggtttcaatagacagaaagggtttcaatagacaatatgagctttgtcaatatatgcatcgcctgttcatttaggtcatgatgtggggatactttacatatatatatttgtactacaataaatggcttcttgtgattactcactaaaaagaagacataccttgtttgcgatgcaagatcattattttgcttgtttgcatgttttgatatgtagttgaggcactggtagctgaccttctaaatagcccaaaacttccttacttgatggccgcatgtgacgatcgaattggacgcagagaagcccaatgagtataacacgtttcatctgctcctcatcaaagtcaccgtttaggcgtcgatcgactgcatcaagcagtgaattgctgtaatacaatctcctaaacttctcaacgagaccattacccttgagacactgaggtatttcaccggaagcaatctccagaagcaccacaccgaagccgtaaatatcagacgccggactgatacagcctgtgctacaatattgagggtctatatatcttgaagacccaaatatggtcattgggcaagaagttttgtcaatggggacttgcctcaccagcccaaagtcaccaactttagcattgaattcttcatctagcatcacgttgccaggcttaatatccctgtgcaggacgcgcggatgattcccatgcatatagttgagagctgaggccatgccaagtgctatcttatacctacaattaatacatagaaaatcaaagttaattcagctgcaacattaaataatatcagttgacatgtggtcccatcgatcatgttttggggcatatattgcataccttctactccaacttagtattgtatttgcatagtgaagatgataatcaagggtgccattgtgtattagttcgtagacaaggagaagttccccattttcatcacacgaacccacaaagggaacaagattgggatggctcagtttgctgatcactttgatctcattatcataatctcgtgccgctcgttcatgatctgcaaccctcataatccttttcacagccacgggagttgtccaattcattagctgagccttgtagacagcaccaaatgcaccctgaccgatcttacggctgtccgagaagttctcggttgcagctaacaagtgtgcatatgagaatcgtcgtgtgttgtgcactgatacgaatacaattccattgtgagtttgtgacaataaatgatttatttgaatggactaacagtctattcatagtgtaagaacgacgaaatgatagcacctaccttcttcttccataggcatctcgattaatatctctgtttttctattgaggcggtggtggttgaacctggcccgcttacgcataaagcaaaccaataagacaaccacgccagccaccactgctattgctgcagtgatagatccagctactacctttgtactaaaacttttagtattgaagccagaaccttgttggttacccgcaggcacaaaactaaaaaaagttttagtaaattaagagtacgtgcaaaatgaattaaaaataatacaatgttttgttatgagtgggtatctttaccagtataatcattagtagaagtgaactacaccattgatttatgagttctaccgcaagttctatcagtagcagtagctgagatgatagcatatatagatacattccattaaattagaaaaagaaaatttttactcccaggagagaccataatttttactaccaatagagaccataaattaaagttctatttatatgtgattttcatcgaaatcttgtggtaactatacacttcataaatgtcaggaaaataagaaaacacgggtttatacacgtcatcaggactaatttagattttattattttgatataattacatgtataatttttagtgtgtaattagtataggctgggcatatttatatactccttctgtttttttaatatatgacatcattgaccttttaaaatacgtttaaccattcatcttattaaaaaaattatgtaattattatttattttattgtgatttgatttatcttcaaatgttctttaaacatgacttaaaagatcttatatttgcacaaaatttcttgaacaaaataaatagtcaaacgtttgtcaaaaaaatcaataacattaaaaaaacggaggtagtatgtagtttcttgatctagacaagtactccctccatccagttgaactacaaaggtagctatacttagatagatgaagtagtaaataaaaaagacgtgatgaggatgttgaattatagtcgaagaagtgaactacccaccatgaattaatttcgtcctacctattttgaaattttgaatggattttggattatgcatggaacctcatgtgcgtatatgcatgccatgcttacacaatacgagttaaaccaaacttagattgagatcctgatctgcaatcgagtctaccgcgcctttgtcactaacatgtgagctgttgtccacatgtcagtgataaaggcgtggtgcagtcgactgcagaggatcctcatccaactaactctcatttcaatcgaaggtgacactgttttgcaaccaagaagaacaagagtagcagcatctcaaacctataactacaatatactcacggtgcttggttgttcgacctcggcggcgacgaagacggcgaaggcgtttgataaacattattctgagatttccgtcttggatccacagtgaaagtactggagttgttgccagccgtagtcgagcaattcaagactgcatccgatgtcgcaaggaatagagtcagaacagaaagaagaacagctacatactggagatggagtgccattgcctctctcataatacacagctgcttaatttcagttagacacagccaatattaagcactagctagatctcatcaactgatgctgcaaaattggaaggatgcagatggggtttatgtacagctagtgcggttggcaaccaagacatactcactctgttacaaaatatagtaatctagaactggataagacatattctagctagtataacgaatctgaatctggatataccttaatctaaatttgttataatagaatgtgttttatccaattgtatatttctatattttaggatggagagagtacatcttgacgaggacattataattgatgaccaggttcagcgtacgtaattacgtatcataagttgtgtttaataattacaatcgtactagcaaaagatgagttaaaataggttttgttccgcaagtgcatgaattaatatcgattatatatacgcaagtgccaagtgcaactgaatattacattcataatctctctcctagtctcctatatttttttaacaacaaattaaagcaaggtttgacagtaagccacataggcaacgatctacagatcgttgtcacggaaagcctttagttttggaatcaaaccgtttacttttgaaccgtttacttttgtctacagagatcgtaagctttgcactttttttttgcaggtactatttattgggatagtgaaaatacaattggtctattgcagaaaaataaaatcatataggaaaatcatttgactcaacaaacgtgcccatggaaaaatattaccatttgatttgaatcgcaatatcaaatctgctaatctactatatacatctctatctctacttattaaaaatattgaatatgttcccgccgttcttatttgtacgtcacctgtcgagtctgattccttaaggcacgtcgtaacgtgtacgtcacttaatttcctatgtcatcacaccaaagcactctcatcagatagaaaaacatgactcttcccctctcgcaatcttttcatgaccgcttcggccagacacaacaccgagcccacagcgagaaggcgtgccgctgccataggaactatagtagaagctcgttgaacttatcttaactaggtgggttccactccagcaattgagcttatgaatacctttgccgatgtcaaaactatgatttatgatagcctgagggtacaggcaatcaaaacgactaacccgcacacacaactgctagccaaggcggctgttggggcggagaaggccagggtgaagaagctggtggcaccggtcgccagtaagctctactagaaaaaccatttttcttgataatggcattttttttcaggcaggtaggcctctcggagctaaatgactgcttgctaaagtgacaaccgcggggtgagatggttgtccgcatgcaaaaatctattttcgaaggcggacctcttatgtggtccgcctgcgaaaattgacgtggcatataaataggcgacacatcgctaaattttttttctaagtctcatctcctctcttctccctcagctctcctctccctcagcagccctcatctctcctctccctctcccttagtggccgtgggcattcgacggcaggggcggcgggatccggtgatggcgaagcgcagggtccgcgtcggcgaggcatgggaacggccacggcaacacgcggggtcggcgacgcgcacgtgggggcaacggcacctggcacggctcccctcccagatctggccggagggagggagtggggggcgggacggtggctcccccccaccaccagcatcggcggcggccgtgcttcccctcatctcccctttctctccctctccctcccaaaaccctaaccctagatcggccagaggtgggtaggagcacgggtaggggtggtgacaattcttttttgtttgtcaaaaagattttcacaggcgagtgactgggccatgcaggtgtttgtatataggcgcggggacggccacctgaaaaatgattttccctcgtctagaaaaatgatttttgacctcctgagaaaaaaatgatttttctattagtgaagggcgcttggccagatttttctattagtgaagggcgcttggccagccaccaccaagtttccgaccaagcggtgagggaattaagatgcatcagtgtatggtgttcgatttttggtatacgtctgtgatcaaacaaattcccaatgcttgtacgtactgctcggagtatcatgttccgtatgctctttgaattttgtctatccggccgtcaatcactgtgtcagtgctaatcaattaaacaagtaatactgttgcttttgatcagagtccccgcgacatgccagtcgaatttttttatgagagttgcttgttataaagtgtgtttcctactacgtaataggggagagggccgcgtcaccgcaccctcttcagccaccgctgcctcccccctcccctgaggtggacctggtagtgagggagggaagggccgcgctgccgcaacctcttccacggactgccgccacaccatccgggagaatctggccgggagagagagagaaagaggaagtggataggggagggccacgccaccacaccctcttccgccatggtggccacactccctatccacaatggtatctaggagggagaggaagaaaggggaaagggagggccatgccaccacacaccctcttccaccaccgccgcaacacttccccctcttgcgagatctaggggggctgcgccaccacaccctttttcaccatgaccctcccccctccgatgttgctgatgccgccttctgtcataggagaggagagaggctgagggagaaggagtgggggaggatgtggaggtcttgggacttagcggatttaataactatctccatatttcgcagtcggactacttaaggtcccaccagcaaaaaaaatattttttattttcgcaggaggacctcttaaggcttcgtctgaaaaaattcgattctcgcaggtggggctagatctaggggttttagctatttttgcaaatggtatttttgtagtctgcctaaaaaataaaagtcagtgttggtaaaaaataatttttctggtagtgtcagtgcatccaccaagttactcagctgattttttttttgcctcatcttgtttatgcactgttactgaaaattaatatatttggcaattggcaaagaaagtttgcatgaactgttaacgtaaatgtgtttttacaaatacatgtagctgatgaaaatataccacaagtagatttaatttattccataaatattgaacatgtaaactaagagaaccacatgatgatgcaatctagatgtgtaatacggtggacacataccgagggttcttgttcttttgtggatcaggttggcaaggagtagcgcacactacaggaacaacgcgtgatgttgggtgttgtcgtcggcgcgcaactatcgagcgtagaggaagacgagccgtcatgaaagatcagcaagcatacgcgtgaagtgcttcgaaaaatcttattgatgccttcttccggtgcaggacgtcgaaggcgaaggttttcagagacatgctctcctaatcgccggtgcatgcgataattttaataaataagtccacaacacatttatggttcaataaataagttcataacaagatcgccggtgcataaggtaattacataatattcaataaataagtccataacaagaaaatacaggaaatgctaactaatacagttatagggagaatttactatttgccactctctcaaaatgccagtgctcaaatgctactctcccaaattttcattccca

SEQ ID NO: 26313 - DNA, 4490 bp, Oryza sativa
tgggcctcggcccgagcgaggatgggagagggagacctcggctgccacgcagagggggaggaggaggtgggccgaggagaggaggaggcccgggagggagggagagaggaaggaaaaggccaagtgggtcgagggaggaaaaaagtactttggcccatattcggctcaaatagagggagatgattatttttaggttttaaactctgaaattggttgttgttgtattaaaattatttattgtgctctaaaaattcaagtaaaaaaaatgaggcgatatttcggagcatggagaatactccaagtcacaatccaatttttgttgttatttgagatttattttagacttttaattttttttatttcttttagaaaatgatttttttaaatttagaatggatttatcagatgtcacacattcttaccgatggtgtaatttcatttctcactgatacgttggactatttgagtcactggctgtgttccggaggtgatgttggaaactcagatcctgcgcacgtaaaacggagtgacttattttgttatgattaattaagtatttattatattttgaaaaatagattaatatgatttttttaaaagcaactttcgtatagaaatcttttaaaaaatcgcaccgtttagcaatttaaaaagcgtgcgtgcatatagcttcaatgcatttagcaaaaaaattagaccaaattactccatccctccacttcttccttcttccactttcctctaatttgtgtaatctcttccactagatctgacccccattgagcccactggcatcaacgctcccacaattctccgctctcatcggccgccggtcgtcgccccttccctgcccaaactagttgctcaccgaccatccccaacccactgagctaccactgctccatcacttgtcacccccatcgagctcaccagagcttatcgctaatctagccgtcctcttcctaggcaacagcggagctacccattttgttagagatagcataagcaaatatcgggcctagcgaaggtgaggtactggagagcaccagctaggctgcgataatcggtaggatctgccacaggtggtccatcagaagcagatagcttggcgcaagtgtcgaccggcgtggaacatggtttgcagtgtagcataccagctcgctcaaggagttacacactcctccgacacgggccaccttggtttattgtgacaatgttagtgcggtatatctctccaccaaccccgtacaacatcaacgaaccaagcacatcgagattgatttgcactttgttcgggataaggttgccctcggtacagttcgcgtactgcatgtacctacttcgtcacagtacgccgacatcttcaccaagggtcttccaagctcggtgttttctgagttccgttccagtttgaacgttcgctccgtccacgttccaactgcgggggtgttagagatattgtatttgtatccggttcggtttccctcaatcctatcccgattctatttctataagtcgggtatagagataaggatgtaccatccctatatgtactcgtgtccgtgatcaatctaattatcgcgttgactctatacgctttcacatttgagtccccaccaactgcgacgatctcactaaggagtaaggagtgatttgtggtggccccttcattgtggggcaacagcaaagcgcgtgcctccgtgaatcctataccaccaacccccccccccccaccccccggcatcacgctgccgccttgccctgcgcacatgagcatggcggccaagtcctcatcgcagtcatcggataggggcccagcatgggtgctagtgtagcgtcgagattccccatgggatttctgtgcgtatcctaggggatttggaacagaacatagatgggtttggtaactgaagcactgtacctaatttctggagaatactcccgatcgtgcggcgcacagccgctgtatgcttcatgtgatgttgttgccatgaatgttcttcgtggttcgctacaggaattttcgtcatacttcgaaattatgtaatatcaaaattacatttgttttattaaaattttcgctgaatttaaaggataggtgctcctatgccaaaatagaagaccacaaagtggaccatgcccatgggccccattctcttctcgctctcgagacgccaggtggtgggccacctgaattcatcgcgtacgtaccatgtgattcacgaacccatctgtgaattctactccactcctattagaccattcacagtgcacacacatggcgcgtggcaatgtttggccatagacaaatcgcttacgtggaggaaagaaggcagtggggaccgttctttccattgcttcgcgtgatcaagtttggccacgagaacctcctcgcactcggtcagaaaacctggtcatccatgcgagaaagagagagagagagggggggggaagaaaggtgatttgactgaagagaaactcgatctgcgccggtgaagttcgccggagaagggtgcggaggtggtgaagcggcgacggaggagacgaacccaaccccgacgaaggtgccctcgccggggacctcgctggcgcgccgcttcacgacgacgccgacgaaggtgccgcgccgccagatccgtcccgatgaaggcggaggagcagctcgacgccgtacggagcctccacccgagcgacgccgccgtcgaccacgagcacacactcagaagcagttggtaagaggagaggcacaagcacagtcgcccgacgccgtcaccgccgccgccgcgcagctgcccgacgtcgccgcccgccgcctcggatccacgacaccgagatccgagcatcggcgcgccggcttgggaagaatggccgcctctccgcctgagcgacgccgccgcggtggaaggctacggcgccgccgccgctgcgcgccccgacgagccaaagccaccagatctgggagctcggccaacgcctctccgctccaagccaacacccgcctccttgactcctctgcgcgccgtcccccaccaagctcccgagtgccgtccctcgccgagctcccgccgcaccgccagaatcctgtcgagcgtgatgccgaggccgctccggcaccttccactcgtcggagatgaaaaaggcagaagagagagagcgttgagatgaaaaggtgaaaaagtaaagagagagaagagagagtggagtaaagaagacatggtggaccccgttggatgcaacttgagctgtggcttgcactgtggagcatgtagcttatacaattcttggtctacgtggcatgcgaagaacgccaaaacttggtggcgcactgtgaatggccttagatgtcacaccctgaagttcttcccctaagcctaaatggaattaataattggcctcgagaaattacccgtgttaatgctaggggtgaaatcggagcggattcggatggatagtggtcgtaccatatcctaaaccatatttttaagcggattcggagcgggtgcggatagtatacggatgcggatgcagagcggattgtttcggatgtcggaaatggtgcggagtcggtgcggaatcggttcggaaacgtattaaatttatcggatgttacgtgtatatgcaatcaatgcaacatcgagttagcaatctaaggaacaataatacaataatcaataaatgacccgtcgtaataattatatgattaagtgctaaacaatatgaacacatgatgtccataatataaaaaatatagctatgtgagtgtgacatgatacgataaaagccttagactaaaaaatctttgttaattgatgaattagggcattggatgtaccaacttatgttatatgcaatagatagagtggttatatatgttgataatttcggattatccggcaaacggcttatcggataatccgacaaaattatcggataatctgcatccgctggattttagagataccatatccgcatccgcatccgcctcatactatccgcatccgcatccgtatctaccggatttctaaaaacccataccatatcctcgttttggacggattcggagcggatcggatcggatattatccgatccgttttcacccctagttaatgcaagagagaaaccctaagtgaattaatgcaagtaataatcggaagtggcatttggaatttttcttgagttctacatgtcaaaatatgctaacaagatttttagtggaatttttagagctctagaaataattttaaccaattaaaaataagcataagcattatttaaatccctggaaattcctttttcccttttttttctttttctttttccctccctcctcctaatgggccgccggcccatttcctcctccctcccgcgccttgctgggccggccaaaggccacagcccagctgagcccgcaccccttctctctctcccggggtcgccgacaggtggggcccacctgtcgggcccgtccccaacctctagccggaggagg

SEQ ID NO: 26314 - DNA, 3670 bp, Oryza sativa
ctttttcgctttgcaatcacccgctcccgtgccctctttcgctctcgcaccgtgcgcccgccaccgccgccgcttttccgctctccggccgccgctagccgccgcgccgagccgcgccgtcgacgtcgtcgcgttcgccgtcgtgcgggccacctcgtctacccctcctccgtcggaatccgccgccggaacccctccttcatcactcgccgatgagcatcgccatggccgccgccttcggccggcgtcctcgccctctcccaatttcctctctccctctaaccccctctcctcttgttcactaggtgattccggagaccgtccattgttcgccgtcgtctctcggccggtcctcgtcgcccctccgtgccggccgaacccccggtgagaaacccccgcaatctcctcccctctccctcctagcgccgacgccccttgccgctcggggtcgcgccgtcgtcactcgccgtgcggcgccactcgccgtcagtcgccgctgtttgccgccgccgcctcacggtagtgccgctgtgcgccatggccgccgggtcggcttgagccgtgcccgcgcgcgcccggccgcgagccgcctccgccgtccgatctaccgggcggtagatcggagccgcccgtcccgtcgcccgcgtggtcacccgcgtggctgccacgtcggtgccgcgtcggcaccacgtgtgcaccacgtggtgtgccgcctccttcccggtccgtggaccttgtccaccgcggactgccaccccgagccaatgacatgtggggtccgcatgtcggctccgccccctctctctccagggttttaattattgcgcaataaatcctttaaggattttctgtttattgtaaaaacacagtgaatcttctaaaattcatagaaaattcatccgtgctccgtttaaacccattcaagtctcagtaaatcaagaaaaatacaaagaatccattaaaaatggttttattctctgtttcagtagtcttatggcctatttgtcttgtttgctttgtatgttgcttagattccggttctcccgacgctccggtgtactttaaaatagtcgccgaggttcgtccagcagcagagcaaggcaagtcatgcttgtcacttgaacatattgaacctatattgcaaatgctctatcgtttccctaaaatactgcattgttttacaatgttaccatgggatggttacctactgtttgagccatgccatttgtaccatggtcctttgttagcttgggatataacatgactagatattggactaaggattgcttagccatgcttagttcaactagcacacaatgggggaatcacattaatgcatagacttcaggttctagtgttgatgttgaattagtgtcaccgtcctggtgttggtcaattaaaatgtactatatggtgggctgtgggtgtatggttttgatggtcgcgcccatggtacttaaggaccggtttgcgagatgccctggaagaacttatcgtacttaccacaaaccagcatgggcaacggctgggcttgtagtgtagctttcctctagctgacgcatccaggtaagggtgagcgtgatggagttcggatgggccccgcgacggcttatgcggctttcggattcacctaggcacgagaggggactgcccgctgccttgcgaggagtgggggtaaaacctgaggtgtggtgtacttggttagagggggttatgcgaagggtcctatcacggcctctttccgttatgtcgtggtggcatgttggcgcacggaaacgtgtcatggggctatgtcttgtgggtacagtggtacacctctgatcagaataaaactattcaaatagtcgtgcccgtggttatgggcggtcaaccagattcaccatgattagtctcaccctagtctagtctaatggaattgattagttcaggtgggtggttgggcctgttgcaacgtggtatagcgttggacagtggatggttaatattgattaattattacaactgttttactgctttcaactactgtctataaatgctcgctttatacaaatgatccgctctagctatcctttggttatatcctgcatcataccccctatttcggtatgacttgctgagtacagtgggtagtactcagtcttgctctattttccccaaatccccagagtttgagtatgcgtcagatggtggcttttccgaggagtaggcttcgtccgtgccgtcgaggatgcctgtggagtggtgttcccgctgcagtccaagtcaaggcttagctccagttatcttttattttccgctgcatttgtgtaagacttttataatgtttgtaagacatggatctatatgtcaactttgtcgtttgtgtaccccggccggtcttggacgggggttttaatacacattctgcttggaattctattcgggaatttctgggcgtgacattagagcaggtacaatagtaaactattatccagttataaatatattttagagagataaaggatgagagagaagagcagcgaactatagatctatagccagctgtagcacagactccaagacgcaacgtgtgtatgacaggtaggaccatatattaatagtatagtaagcaactattgtataaattagctattaaattgtctatagatgatttggagctagtagtctgctatactattaagggcatgtttggcacagctctagctccagctccagctccactttttccggagctggagctcagccaaacagttttagctccacctaaaatagaagcggagttgagtggagctgggtttaggcaactccataactccactccaaacctaactcctgaagctaaatttaggagttgaaactctaccaaacagaccctaaacttgctcttagtgtccagtccaacgctagatgggccggtaaaaggcctatgcctagtacaccaaacagctctttcatggccgacacacaaacaggcacgggattcgacatgaaccgtgtccatgcacaatgcacacacacacacgacattatctcgatcttatccggccccaattaacgtgcgctactgagcgtcccccaccaaagccgtcgtcaagtgaggctaaattagtggggtttggcagggttagcgtctggtcggccagagaccgctgcaacgctgctagatttgtgcttgctgttgctgctgctgactgctgttggttagccggttgccatccaagtggagcaagcaagtacgtcgtcgtggcagtggagggacgtactacagtacggatcaagcccttcctcgggaccacaatctaggacgacacatggatcgatctcctaccatccatcatacacgaccgtccacctaagcgtacacgcactgaagactggttttttttgccatattataatcattggaagattctttacaattaatgtcggctttgatttgcttgtgtttgtgaacaattgagatcactcctcactgatatatgggtatgagggtacatgagattcacgtgtctacgtgtaatgctgtgacatcctgacccagggctcaataggataaatagaatacccaaggctcgataagattaataggatactcatatctataagtgacgaggactctctctctcgttcataaatgctacttcctccgtttaacaatgtaagtcattct

SEQ ID NO: 26315 - DNA, 16600 bp, Oryza sativa
  unsure (1)..(16600): unsure at all n locations
tacattgttaaacggagggagtactctagatttgcatcaaccaagtttgactagtaattcgattgcaatataggtccatccaataactatatactactaagagtactaatagggatggtaatagtgacatgaaccccgacagagaattactcgattagggtacgtaaatgggctaaaattatcacccatgaggctgaaatcttgaaaatattgccccgtcgggtaatattaagttagtgacctgaccccgttcaacagcccccggccccgagtattaagttagtgacctgaccttgtacggtttttctatttgattttaacttcatcgttatcaccatccaaacggcattacaagttgtcctttttatccccataccaaaacgtcgatcggtggtgtagttggcttccgggctaaccgagcaatcgtccaggctctgtcatccggtgttgttattgtctcaatgaaaattaatgactgtagaagtttttttttaataatagaatagaatattatctcggtctttgataaatgagctacataaaattattacaccaattcgtttaaagcgagcgcagttcaaagaaaatttataaaaacactcccaaacatgaagcaagcacaaaactaataaagagtaagacacaagataaagagtacacaattatttaatcctatttgtgaacttccattcgaagttgataaaaggttgcatgagaattgtctcaagattacaatatgcaaactttaaaagcttgttgttttcatcacacttttgtgagccaatgactgtagaagtttgtcaaggttacggataaggcatatctcctatcttacaatttactgaatatgcaagattggtataccatcttctatacgatatatttccatatgcgataaggaagtatataagatattatggaaaatatcctcacggtctggcgattaacaaagtcctacttgaatatgataggattagtctatatcatgtagggttcattgtctccgagttttactcgaagactaaggcaactcatggtataaaaggcacacccctagagaggttcaggatcatcgaatcatagtgccaaccctcccacctcagtttacaaagtcgaaagacacaagccgaagctgccgggagatctcgtcgaacgatctcgacaaggacctcgtcggtatcgtcggattcatccgttctctatactatgcggttttccatatcaatctcatataaactggattagagctattaccttacaaggggcctgaaccagtataatccttgtcttttatccgttttgatgtcgtatcgtgtagatcctcgtaccaacgtatcccaatatcctatttatccggtctacgggtatcccccgtgacaaagttagccgacgactagaaaatacttttgttttcatctgggcttaagaacaagccacctttgcttaggaagaagctatggtggaggcagattgctatgctaccgctcatatggttttgtgagaggagttgagctcgctggaggtgaaaaacaagctccgttaagttccaattgagggcttgttatatctaccctaaaattttacatcttgtcatattgaacgtttgaaacttgcgtgaagtattaaatataggctaaaaaaataactaattgcacagattgcgactactttgcgagacaaatcttttaagcctaattgctccatgatttgacaatgtggttctatagtaaacatgtgatattgatggattaattaggcttaataaattcgtctcgcggtttactgacggatactgtaattagtttttttttattagtgcctgaacacccccatgcgacaccctatataatacccgatgtgacacgccaaaactctacacccctggatctaaacacccctgaaactattttaagccagctgactaagggcctgttcagatcccatgacaaaatttttcatcctgtcacgtcgaatgtttatacacatgcaaggagtattaaatataaacgaaaaaaattacacagtttgcgtgtaaattgcgagacgaatcttttaatatttgctaatgatggattaattaggcttaataaattcgtctcgcagtttacagacggaatctgtaatttgttttgttattagtccacgtttaatactttaaatgtgtgcccgtatatctgatatgacccactaaaacttttcacccctggatgtaagcacaatctgactccattgccagctagcaaatctgtacttcatgatttttttaatatgtcttccatacaaggttgcccggggggaggggaggacaaaacgtgaaaagcagcccctaattaaataaccgtggaaaattcaagagaaatagtcaaagctgagaccgtacaaaatcatctcatcacccatccatgtatccaactaggagtaaatatgaagtgtaaaccacatatatattctagaaacttaaaaatcatcgtacgacaaaaaaaatgtactttcgatatgtatccatattattataagtaaaacatttacttttggatttaactgttagtagaagttttaagagaaataaaagatttactcgtggtgacgtgaataaatattatacattcattttaatatcctagggtttccaccacatatttttccttacatcatgatcggttaatccccatgagaccttgttcgatttgaagggggaataagggaaaataatttcatattataataggtgttgaataaatccctccaatctccctctcttgaggattaaccgataagatctaagggagagattagagggaatttacttcgcatctattacgatgtgaaattattttctcattctatctaatccatttcaatcccctcttaatcgaacaaaggcattaaccggaaccatcctcctacctagcctgttttccctattctggcctctcatagtcataggtgagcacttgcctgccgccgcctccctgaacgacgaccatcatcaggtccgatgctctctcgggacgccaccggtggatctggccctcatcggcatgacaaccattaagccgccaagaactaggccaccatcccactgcacgcaagtaggaggcgtagctagcgactggtggccggcgcagccaacgcacctccccactaccaattgtcactgcatctccctgaacggctgccgttagatccggagttatccgggggtgccacagttgaattgggcccttgccggcctggcaactaccaagctgccaagaaaacttccaaaacaccaagaaaacgaaactggagtagaaagagagaggaaaaaaggaaaggatttcacaaattgacttcaataattgttttctccttgtgtgttggtttattatttatgttcttattgttgcctgggcatttgctttcttcgagagaattttgtaataagttgatgtatcttctttgaagcaaagactggaatttttattccattataagaaaatggaaaaggaatggaaaaaggaatgagatggggaggaaggtggtgggtggagcggctgcccagtctcaccgccggaggcgatgcggtggccatggattggccctttggggtgtcgggaatggcatcccaggccgctcgaacaagcgacggccgaaagtttatttttacaattaatttttaaccgagtccgatctttaaataagtgttctaataaaagagtaaattagacaaaaaaaaaattttgttctcactcactcccctgatgaagactcaacactcaacagtagtcaagtcgccgtggcggcctgcgccacgtggtgaatattcttggtggtcgctccacccattcggctcgcggtcgcgggttctgcacccaaccaaacgtctaaacccagaagtcgtggaccatgccaatggccccccgttctctctgctcgccagtttgctagctaggtgcgctgggctgcctggccctggggatgcatcgcgtacgtacatctgcaccatgtgattcatcacgaacccatctgccaattttactcactcactagtaggagtacttctactccagtgtccagtcgtccatcacgaaagggaaacgcttgtcctaataccaaacgctcctttcatcgcccacacacacacacaggcatatggaaccgaggaatcgtacgtgttcatgcacacacgagacgggacatgatttcttcggtcttatcgccaacgttcgctactgagggtgtgtttagannnnnnnnnnnnnnnnnnnnnnnnnnnnctgggtactatataggtgtcgtatggggtgtttgaccactaataaaaaaactaattatagaatctattagcaaactgcgagacaaatttattaagcctaattaatccatcattagcaaatatttattgtagcaccacgttatcaaatcatgtaccaattaggcttaaaagattcgtctcgtaaattagtcacaatctgtacaattagttattttttagcctatatttaatactttatgtaaatattcaaacgttcgatgtgacagggtaaaaaattttggagtgggcctgtttagaagagctttagattctgacaagcagctgtctggtagccagcttctgagaatctggaaaagctctgagacccagcttctccagcttctggtttcagaatctataactacagattctcagaaactgtggactgtttggggcaacttctagccgaagcggtttttgagaaaagctatagctggggcaagcttcccaaacaggacctaaccttgaccagccccaaccccaagccgttacaaagtgaggctaaaatagcgtctggtcggccagagaccgctgcacgctactagattgtggtcttgctgttagccggttgccatccaagtgttgcaagtgcgtcgtcgtgggagaagaggggacctactactactactgtacggatcagcccttcctcgggagcacaatcgaggacgacatggatctctctgtcctaccatccacaccctacacgaccgtccacctatgattgggctgtgtttagatcagggcgaaaagttttagcgtgtcacatcggagtattaaacgtatactaataacaaaacaaattacagattctacatataaactgcgagacgaatttattaagcctaactaatctatcttagcaaatatttactgtagcaccacattagcaaatcatggagcaattaggcttaaaagattcgtctcgcaattacacgcaatctgtgtaattagtttttctttttgtctatatttaatactctatgcatgtgtctaaacatttaatgtgacatgctggaaaatttttgcggaactaaatatagccttggtttttgccgtattttaatcatttggaagattctttagctttaattattttccatgtgttttgtggatgcctactgtagctttgcatcaaccaaatttgactaataattcgatttcgagtgcaatataggtccaatcactatataagtcacttacctgatctattttaaggtttttctagtggattttaacttcaccgtctaatcaccatccaacggtatatatacaagttagtcttttttttctttttcttttctttttcagtggtggagttggctccctggctgaccgagcaatcgtccagctctatcccgggagttgctattgtttatcagtgaaaataactataaaaattaatcgacgatcagaaaacattttttgtcacccaggttctagaagaagccaccttgcttaggaagaagccatggtggagcgcagattgctatgctagcactcacatggttttgtgagagggggcatgagctcgctggaggtggaaaaacaagctctgttaaattccaatcgaaattccaatatttgtactttcacgataattttttgttaacatgttgtcttccacaggaggttgccgcgggcgcgttagcgggaggagggggggggggggggagacaaacgtgaaaaactactgcctaataactgtgaaaaatacaagacaaaacatctctcacccattaatcctgagaaagctaaatatgtagttgtaaacttaaaaactaccgtaaaatagaaaatgaacgttcgagatttgttcacatcgccatgattaaaactttactcttgttagattaatgggctacacccaattaaatcctaataaattccattagcccacattaagtgctatgggtaataataccactgtagaaatctaagtgaagaggtctcaacttaaatatggagctagttgagagtctctgttgaccggttgagatggtgcgtggacagccagccggggcgggacggggcgaggcgaggcaggctacttctctctctcgttttgtaacggacggtaataacgtcgtgaattgattccgtcttgtaacgggcggtaataaaacgccgtgaattgattccgtcggttatagaattaaacgtcgtagaattgattctgtattaacaagtgtgtcggttacggaattaaacgtcgtgaattgattccgtcagttacgggattaaacgtcgtgaactgattccgtatcaacgagcgcgtcggttacgggattaaatgccgtgaattgattccgtcggttacggaattaaacattgtgaattaattcaatattaacgagcacatcggttacgaatttaaacatcgtgattgatgatcccaaacgttactctcgcgctcacatatatatactccgcagcgactagaaggaagaagataagttcttcccgacgtctcttgcacttcaccggttcctcctcctctgttcctccttctctgttcctgcgctgtagaatccttcaccggttatgttcacctgcacgcaaggaactccgtccgtttgagaacctgcacgggtaggcgggcaatcatgtttttgggtaacgcttcaagcgcgactgctctggttcttcgacgacaacattgcatcttcctctacttgctttaccatggtttctactagagagaacggaggaaacaacatcaacggagccaatacgaatgcttcaacatcttctgcaccgttctctgggtataaaattgaactttatttgattttcttcttgttatttacatgttaacaatgttatccataggatttcaatcctatgtgaatataaacgatgtctatgcttattttaccttaagtatgctcatgtttacgtttagtctcatcgctagatcgcttctaattatgtatgttatgattattctcttaatattttagattaaaatatgctgagttatgattaaattttcaacaactcttaaatttaaccatcaataaaagttttaatagaagttaaagatttactcgtagtaacgtgacaaatttcaaatgtccatgttaaaattctacggtagtttttatgtttccggcatatatttttcttttaacgggagccatcctcctatcctacctagcatgttttccctttcctagcctctcatagtcataggtgggcactggtagctaggcagcgacgccgacctgtcgccgccggggaccatagtcatcactgtagtgacattgttggacctcttcaagctttgccttctcccctcctccagtcctcttctcagatattttcagattttttttttgttgacctactagtgtgtaaatgtttttgggatagtactccattttcgaagaggagaactgaacatgtcactagactcactactccgtagcaatctacggagaagtaacaatgagggcacgtttggtacagctccaactcctaaatttaactccaggagttgggtctggagtggagttgtggagctgcctaaacccagcttcacaactccagttcattttatgagagagctccacccaactccactcccagttttggtggagctgaaactgtttggctgagctccagctctaggaggggtgaagctggagctggagctgtgccaaacaggccctgattgatgattagtcaaacaaggcggcagatactttgagatgttttgtgcgacacacagcaacagcagctggaaatatctcttgaacttatcgataaatgtatggtagtaataagttgctaactatctaccctttcctgtctaaaatatgacaaaccagtactgtattaaacataatttagtattacaaatcaagatttaagtattagtgttgtttaatcaagtacaatattttataacgaaatgagtaattcgacaaaaaattactttatccgttccgttctttaatataagggacttccgtcatataggtgatagcagaattaacaacatgtgtactatccacaattctttcctaaatacacgttgctttaagagatggagaagcattaatttccccctcactaaataaccgatgtcatttttactagtactattagataatttattgtatttcacagtacggtacaaattgagggcaatagaaacaaaaaagacaactacgattctttctctgcacaaaccaaaaatgaactcctgctacgacctcacaatcgatcggctcatcaatagatcgagatagctaggttggccatgaacccgttctgtccccagacgatttcccagtcgacacagatcgaatcatcttcaaacaagatttagatttgaacaaatcattatccccaatgcaaaccccattcattcattcatgcattgccgacgaccaatcaaaaatgccaagttgagcctcaactttggcccggtctaactacttgttggcctcatatcacgcatgcatatgagactggctaccacatcgatcggtaaccaccaaaccagatattttgttgctacacatctgcactgcatgctctgctctgcaccctacgtacacatccccttcctgatcgatcactcattagcacaaccagctgcttcatcaacttgcaggtaatcaatagtgacatgcaactgcaaaatggtcctgcagagtacgcttgtatctgcaccatgacaattatattgtaacacacacttgacactttcattgatccattcgttttaagttgtttgtcgtttcggctttgttctaaatcaaatatactacttcctccgtttcacaatgtaagtcattctaacatttttcacattcatattgatgttaatgaatctaaacttatatatatgtctagatggaaaatactagaatgacttacattgtgaaatagagagagtacatatgtctattcgtgacaatcaacttctaaaagaaattgtagtttaacaataggtaaattatatattatgaaagtatttctcaagataaatataaaaatataaatcttacaatgttagaaattgatatcgaagatacaaatgtttgtcttaggacgaagttagaacaagtaatttaaaacagttagggtattaagtatgttgacatatactccctcaatttcaaaatgtttgacaccgttgactttttagcacatgtttgaccgttcgtcttattcaaaaaattttatgaaatatgtaaaactatatgtgtacgtgaaagtatatttaataatgaatcaaatgatatgaaaagaataaataattacttaaaatttttgaataagacgaatggtcaaacacgtacttaaaaagtcaactgtgtcaaacattttgaaacggagggagtatatgttttgtacttttgtaagtaagagtacttttgatttgttaatgcaactagcattagaggggtgatgcatccagatcaacaaagtgacaccaaactattgttgtataggagtaagagtttgactaggtacacttgaatttgacagaaccctggccggcaaaaactatggaagcatatgcgaattgcgcaattggataactccagataagaaagcgaccataataagtttaacaacgccactgttgaattagtttttgtcaaaaagcacatcactgctcacttgtcaagtcgacaagtcatcacttcatttctaatttttcctttttctttttgtttcttttctagtattttgaaatgaattgtggatggtgacgtggaacagaaaagtcacgcgctgaaaccgacgtgtaccaacgggaggagctcgacgtgtaggccatctggaatgatggaagaagaagaagtgacttctggttgggtaggcaaaggagttgctgctaagtaatggaaggggtgtttttgtaattttacaaggcggttaggacaagcaagatttggacacctgtcgtgtcctatgctcatatggtattaaaatatgttagttgaaaatcataatctaatgaagaaaggattagtttatggagtactagggctcttggttgccatgtggagtatttcagtgagtagcaagtgtccagtttccagtgagatggcacccatggatttctgtctcataaaaatgcaattaaaatttttgtactgcctcattcaatacttttatcctttttagctaatctaaacacaaactaaagcgtgacaaaagtagaattctctcttattgaaaaatgtgagtaaactttgtgattggaaagaagtcgtacaaaattggactgaattcatatgccatctgtatcaatacataaaccggttatcaagacacatttgtaacgataaaaacaatgtacagtacgtactagaaacatttcttggatcccatttcaataatcattctgacaaggaaaacaaccaaatgggcacaaacagtttcgctttcttgatagccatgtcgcagccacagctttgtttgctagaatgagacacccctgattcctcagccacatacttagattaagaaactaatcaccttcctcaatcttggttcctaatccgctataaaaagcagaggaaagcagaggagacaggcagagcagaggagagaaccccaccttggcaaaaagaaaagaaaaataatatcatcgcactttttgctgcccttttcatcccctcggatattcacgaagcaaatctctctgcaattcttttcttttttttttttgatcttgcggatcttctccattgaggaaaggcgagagctttgggatcgattccgggccatggcgaaggaggtggatccgtgcgaccacggcgaggtcgtcgacgccgggtgcgtccgcgccgtgctggccgagctcgtcctcaccttcgtcttcgtcttcaccggcgtcgccgccaccatggccgcaggtaagccccgccgctcgccgccgctcccttctccggtcgattaaatattttcgttttttttttggttaaaaaatggagtttaattttgggttggggttaggggtgccggaggtggcgggggcggcgatgccgatggcggcgctggcgggggtggcgatcgcgacggcgctggcggcgggggtgctggtgacggcggggttccacgtgtccggcgggcacctgaacccggcggtgacggtggcgctgctggcgcgggggcacatcacggcgttcaggtcggcgctctacgtcgccgcccagctgctggcttcctccctcgcctgcatcctcctccgctacctcaccggcggcatggtaagcacccaacccgtcaccgccgttaattctttctttctttctttgcctgtcaaaattaggatccgtgaaaagaggaggaaattttttttatttgggggtggaatcatgtcgttctctcgatttgtccgtggccatcaacttctaaatttgtttttgttagctttttttgggaccagatgagatgctgggttaatttactaataattcacctgataaacttctgtgggtttaaggttttatagtagtaattgttgaggaacttcaaagattgtcaggtttttaatcctgtgattcagttggttcagtttaccaaaaaaaaaaagactttgctgaaaaccattagttacaagcctttttaaatcagttttgtgattcagaactgtgagaattctagttcaatctatagttttgttttcttatttggataacaactgccgattgcttcaaccaaagtcaaccaaagtcgtataagatatgaatcattatgctgttagtgactctgatgaacttccaggtttgtattctgctttagtgcctgaagtctcaaaaaccctctagagtcttggtttgtaaagcatatgtatcacaaagttagtacaagttagccaagttaaacacgctgttagcaacactgacccttgggaattggaatagctggtttaaaaatacaagttgaagactaacataggcgagaccaagtcacttgatcgtactttccggttagtccacatagatacataagcaaattcatcactcctaagtataacaagttcacacctgtgctaaataagtataaattaaaggccacatcaccatctggttttctgttcttttcaagcatcttgtattcatgtgtaagctgaacacgataggtatcttcctcacaatctaaccaaactgtcgtaatgtgcaatgcaggcgaccccggtgcacactctgggctcagggatagggcccatgcagggcctggtcatggagatcatcctaaccttctccctcctcttcgtcgtctacgcgaccatccttgacccgcggagctcggtcccgggcttcggcccgctgctcacgggcctcatcgtcggtgccaacaccatcgctggtggcaacttctccggcgcgtcaatgaacccggcccggtcatttgggccggcgctggccactggagtgtggacccaccactggatctactggctcgggccgctgattggcgggcctctcgctgggctggtctatgagtcattgttcttggtcaagaggacccatgagcctctgctagataattccttttagtagtctggtctctttagatggtttcatttgcagaatgcatatattgccaggtagtaataagatgcttgtgcagcttgtaggcctgtaagggctgtataattattattttctttttgccctcgaggattttatcaacgttgataatcagccatgtaaaaagattgtttgggatatgatttttttgttagtataaaatgtagtccggtagttggtctgttgtaaatcggcgaatgccatgtggttttgaaattagaatctatgtaaacattttcaaatgaattcagtaaaattcatttcaaatgggtatcaacttgacctcaagctcttcatatatcatctaaacaaaatgctaactgttatggctatgtacacctagcagcatagaaacacaaggagatccaagaactgaaaaaatcaatggctcattgcagctattatctgtgctgccagtgcaatatgcatacctgcttgcttggcccatcaatttggcccaaaactgttatgatcataatgaactcaccacattcatggagttgactgtctatgcgccagtttcaactgctatcttacttcaattttaattttggtatcgggtatcgccaaaaattcgtaaggtataaaatgctatttttccaaacaagtttgtaatggagctgaagaagtggaacgactacgtgccgaacgtagaacaatgtcggctgacttatggaagaaccgtgtcaaaacagcagatcgagcgcaaattcaaggctggataacaaaactgaactagatgatcacagcgctgctcacccagaatattcagacatttctattcatacgctctactctttctttcttcttctttctttactttttacctctgtattattttatctcctccttcccttttttaaatggccacttggccttgtaaaccaccgatcaccattaatacaatggttataaggtagagcctctctaccttttacctaaaaaaaaatatggtgtgcagcaaatcctcgctagctcaacgctcccaccatcctcaccttcattggcaagctcagggctatctctgtcaacggtgcctcaagctccaccccccacatgccactggcttgtggtcccactgccgccgccgagctcaggaccccaaatggcgttggccacatgttctcgcgggtgtcgccgccaccggcgggaagctcgaagtcttctctgacgactagcggttgcttcgacgacggcgtcatttgctcccctagcgacaacgtcttccttccacctaagttcatccgtgacacgtgatggagagttcttccaacgtaggtataaaatggataaagagatcaccacatacgcgtcttggaaagcgtaagaagtatcgacgcacgtcacagtgtccgcctaatagacggggcatgttggcatccctaagagcaagtttaatagtataggcaactactagctacaagttatctatagccaatttattagggttatggataccacatacctaatagtagttgactaaatcttggcaggacccaccacttaccatgtcctatacggaaacaacctgcggatataggaggagttccggataagagaagacaaccagagttctatatggaaatgacaagtactactcggattgtatccatattggtttccctagttctacttagacaaggggacacctatgggtataaatacaagaccccctatgaggagaggggacaatcaacacccaccactatcaactaacaatagatcaatatacaagccaacatacgccaagataagacgccgaatatcgacttcagagataggcacggctagtcccctacggtgtctccggatactgataggagagacattgcgctgtctctgatctcgccgggcacggattcgaggaggaagactaccctgttgtcgactacgagtcagacctacagaccgccaagtcgacaacagttagataggctaccccaaatattgtattggtgtgattatggtgaataaaagcaataccggcttcgcccaacaggatgtagggttattacctgacaattcaggggcccgaacctgtataaaaatccctatctctgtctcttttacctcagtctcgcgtatatcctaataccgacgatccccataccatgcaaataccggaatcgtgacatcaaacgtcgacacaatttaatagccaattcatacaacagttgcttataatactattaatatttggtcccatgtttcatccacacattacgtcttagagtccgtgctgcaactggttacagatctatataccgctgctcttctatctgctcttttatctctttaaaatatgtttatagttggtttatagtcagctattgtacctgctcaaagccgttcgacacgagttgcaggatcggacattcagaacaaagcattttcatgaagaagtgggtttgtgttgacaaatttatttatcatatttttatcttgatctgacgacaaataaattccattattaaaaaagaagagagaatcccttatatgccactgaaaattagtctgatcccttatatgccattgaaaattggctcttcccttatatgccattgatccaaatttgcacaccctctcatgccactcccattagttgaccgtgtgttgaccaataaaaatcaaggaaaaaagatgtatttacccttataagtatagggcatgcccaacaactcagggagagcatatatgtcttttttactttagagttaacggtcaacaacggacaactgactattgtggcatgaaagggtgtacaaatttgcaccaatggcatataagggaagagccaattttcagtgtcatataaaggatcagaccaattttcagtgtcatataagggattatctcaacaaagaaatacgtagtacattactattccgtttcattttatttctgcagactctagtcaacaaacttatggtcgtaatttgcttttagagcgattttaccggtaggtagtattacattttgtaacgtaaaatttggtactagtacgatacatcgaggtatcacctcaattacagtaaaatttctcacatttttaagatcacaatcttcaatttcaatttcaagtcagctcggagcaatccgatcaatggttgacgacgtcgcagcgcctcctgatctccccttcgtctccggtgagcaccccgctcatggcgagcttcacgaacgccgacgagaaggcccggaagaagcggcgcccgtccgccgcgaaccgccgcacgtgccccgccgtgcgcgcgtcggcggcctcctcggcgtcgacggcgaagatgccgcgcccggacgccgcattccagtagtagaggttgtcgaaccagctcggcgtcgcgtcgctgaggacgggcacggccgccgccaccgcccgcggcgcggcggcggggcacgccagccggagcgccgcctcgaacgcggcgtcggagcgcccgcgcccgcgccgcgccgtgtcgacggttgcgcagtggccgccgccgagcgtgtggccgccgaggatggcgacggtctcctcgacggtcatgcccttgctctggaacatggcgagcgcgccgtcgatgccgaggaagctgtccgggagcatggcgtcggcgcgctccgcgctcgccgccgtggcgtccctccggccgaggggcacgccgcggatgcgcggcccgccggcgtgcgccacgggcgaccacgccgcgaggacgacgatgtcggcgcacgacacctggccggggcacgcgcgctcgac

SEQ ID NO: 26316 - DNA, 14700 bp, Oryza sativa
tcaaaatcaatttattttcctgaaatttcctcaaaatgtttatgcattttgagatagtaaaccatgcctcgaacatatgatcgactttataattatgattttacgtaggtagattttgatgatcactaatagaattcaataatttttatgatctttttatgctgtgtgagtttttattagttcatatgtgcttttgtttattcaggtgtgagtttttgttgagttagtgtaattattggctgtagcctctttgagtaaaggccaggattatattccattatcttaaaaaaaaatcaacagtgtgtattggagacaaatatattgtcagtacgtacctgaacttggcagtcgtggaagaagaggcggaggagcgccgccggcgaggtctggtcgacagcaaacaccggcgcgagggccatgtcgacgacgagctccagctgggggcacgaccgccggtagtagtcgccggagaggccgccggcgccggcgccggccgccatgcctgcgccacctggtcctggtgctatcagtacaagtagcgttgcaagcgcaagaaccgagccagttgcaacgctaaccattgcactaatactagtacccaatgtcttagcttcttaagccttcactaattaattaacttcgatatcaagtagaggagttgtgtagtttcgttcgtgtgatctacttttcttatttatatatttgtctctggagtgataggagtaatttataggtcaaataggatggtgatgggcatggaaaaataattcaggtcatgtcttgcatatgatttaattgagtcagatcagtggatgaattttgatcgaagtgatgctaggggacttgtgtcgcaatgggagatttttctattatcaagaggttgctgcctgttttgcacaagaaatgtgactgtgttttgcggatagtgctaaatcaagatcgttaaacattttggtttaatttgttagctagtattaattgaaacgccgagcaagaagctacccactttaattgctccagaaatgggggatttagacccagaaaattcaaaacccggtggtgcgaggaattggatttttacaactccactgccctatactcgtttacttcgtcactactcagttatcaacaacaaaagctattaaaaaaatcctgagaagaattaacgtacaacattatatagtgtaacgtcccgcctcccctaggccggaccaacatatatcttttctgcacactttgtcctcactcatgtgcacccgggttcccggtcggtcacccatcccaaattgctccaggccaagcacgcttaaccctggagttctttggagattggcttccggaaaagaagttgcaacttattgatatgagtattctattaatcctattaagccctaggccgggatgttacaccctcacccccttaagagagatcgacgcccgtcgatctaccctaggctaggaacgtcctctcttggccacgtccatgtgtccagtgccagcgcatgtgccatgctgtgtaaccactcccggtctacaccagccatgcgcaccatgcctgcgcaactgcgacacacgcgcccgtgaaaccgcgagagtcggctctgataccattttgtaacgtcccgcctcccccaggccgggcccacatacatctgatagctttcataggtcatagactgccctccaccctcacccccttaagagagatcgacgcccgtcgatctaccctaggctaggaacgtcctctcttggccacgtccatgtgtccagtgccagcgcatgtgccatgctgtgtaaccactcccggtctacaccagccatgcgcaccatgcctgcgcaactgcgacacacgcgcccgtgaaaccgcgagagtcggctctgataccattttgtaacgtcccgcctcccccaggccgggcccacatacatctgatagctttcataggtcatagactgccctcatatcttttctgcacactttgacctcactcatgtgcacccgggttcccggtcggtcacccatcccaaattgctccaggccaagcacgcttaaccctggagttctttggagattggcttccggaaaagaagttgcaacttgttgatatgagtattctattaatcctattaagccctaggccgggatgttacatatagcaggtgtctaccatgatgcaaaatttgaagttaaaaagtcgatctacacaaggagaagcaaaataaatatatattttttcaaaatacattacagacagaggcattcatataaattaacatatatatatatatgcacagattatccctttaagtacctcacaataccgagccggtatatgttgagattcacgaatttatcatagcatctatgagcacttctgaagactaatccggtatctcagattcatgagtcaccatagtatcgacatctatcgctgaaaaaattccttttctcctatgtacccttctttttctttatgtaaattcttctgtaaatgtttttctcaataaaatcaccgtaggaggctaggagcctctcctgctgtttttccctaaaaaatcgctgaaaaaaataattaaacgtaaatacaattacatgtgccaagtcttgctaggacttgaacctggataggtaagttccaccaccatgtgaaaaataaccaattgaactacgcaaacttcatcaaaataaataatttgagttatgttttttttatgttgaggtgtgaaaattgaatttagtgttgcatacataacaatgtaatctatgctatgaaattttttatgaccattcagatgacatataagagataagttatttgtgttgcataaacaacaaatgcacttaagtactggctggttttaatgtttgacattattgacttttgattgaatatatgttttaccattcatcttatataaaatatatgtaattgttgtttattttgttgtgatttttttataattaaaggtattttaatcatgtttttttatatttgcatatttttaataagacgattagtcaaacgtatatctcaaagtcaacgacgtcaaacattaaaaatggaagggagtatatttttagaatttaagccactgctatttaataggagcatttttactgtttttattgcttttaataatgtttgcactgcattgttgttatttttgcaaatttgcatacaacattggtactacccccatgtatttaaacagacaaaaggctacccttggacccttggtccaaattcaccgaaacaattttaaagaaggaaaatccttttttgcggagaaaagaagtgatatctgaatgttcagtattaaaatatggttaaattcgctagaaagaaaacgaacaacccgctctgttgtaattccaacagcatctctacaaatagcattcaagatatatacacgcaaagtagttctgcaatgtgtgctggggcccaattgctatatgttgttatcctctgataattagctgagttcggatgggggagatgggagcctaactcctgtgcacggaaaacggagtggtccattaacacgtgattaattaagtattagctaatttttttttcaaaaatggattaatttgatttttttaagcaactttcgtatagaaactttttgcaaaaaacacaccgtttagtagtttgaaaagcgtgcgcgcggaaaacgaaggagaggggatgggaaaaggtgcatgcgaacacagccagaatgttgttgcaaactgcaaccagtcatatgatgatttataccaacacttgatgaaaccaatttgtgtagcgtattgcgtatgctagagtttatataactgaacctaacactattgtcagtttgccttttcagctcttcagtaaagtcagtttgcctcacatcatacatgcagaatggattggttttgtataggttattaatttctcattccagttatgaatgcagcatgttctatgggcatgttatacaaagctctaacttcaaagtttaactccaggagtttagaacttgagtggagttttgaagcttctaactcttttattttatgagagcactttagtatattccactttattttttgggtggagctgaaaggtttggctcagtttcaacttcgggtttcaacctcagaagagatggagttggagccgaagttctgtcaaacacatcctatatacatattgcacatatatatactactgtcaagtagttcctccaaccatatctacggcaccaatttttgcggtggttgccatatcgatcatgtacatggaatgaccaaaacaaattctttagacgacgctgcatgttagctagctcgttcagtcgttctagacttgaagtttccagttcaaacagactaccaactagtgttgcatggctttcacttagctagaaaaagatcgatccggccgtcccaatccaatcctggctgctgataattaaattaagtaggcgataggcagatggattatggataccacatgcaaaattgtgatacttgtgagtgtcgatatgtgactactagcctgcgagcaactattcagctgaactataatatcttcttcttacacccgactggataacctgaagtgtgtcactagtacaataacgattttttcgtgtggtcgaaagcagttttcgcatatggatcttccacccgtcttgaactaagtgtctgtgaaaatccgattttttttttcgggtgacgcacccgcacgcgaaaatcgcaatttttatatgcgggcgctttagcagccctggaaccccaatctagccgccgccggcctgcctgaggcccgccgccgtcgtctcagcggttgtcggtgacgaatccagacgcctgaggctgggataccactgccgccactgccgtcgtcgtcgccacggtggctgacgacggatccgctctgtcgccaccaccctagctgatgccaccgatgccgctgctgccatcgatgccgccgtcactctcaccaatgccactgccaccgtcgccgggagtgggtagagggggagggggaggggggagagggagagggagaggaaacgggagtggccgagcgggaggatgggaggagatcgagtggcgccgggagctaaaagggtgggtgggctattttcgcgtgcggatctattaagaggcccgcttgcaaaaattgattttttccgtgtggtcattttaaagagccgcacgtgaaaatggagcacgatttttacggacgcgaccacttatggtccgtctgtgatctaaagtgagtcttgtacaggaaaatcatttctgtactagtgtgtgctccccgcgtctctccactcaaggggcgacatgtgttaaatatgtgatctgaattttaggcctgcaatatattcggataagtttcctaatattttaggcttgcaatatattcagattagtttcctagtatgactcttgagttttttcccattaggacttctagatttctcctatatataggaaacggatcctctattgtagagctaatactgcattggtgcttgtagcgatcaaatcaagccatccgattagattaagcagctctgattccgtccctatatatatcccttggaagctgtatagggagggtgcgacagcccgatgtatcacctgtgtttgtattcaactcctctatagtgatcattgtcggtcggcacccatggttttttccggcaagggttttccacgtaaaattcatgtctccattgtgcatctattttcctaacaacatgggcgccacccaagcagacaccggcccagctaggtggatgcaaggacggtggtggcaaggctctctcccctcgctcgtagagtcgtggtcaatgaggctgagtcgctgacgagactggactctggagcctgagggcaagatgccagtgtccagatccggtgtcgtggagtccggacacgatccccccatggccgaatctagtgctcccacggcggatcgagctagatcaacggcgcaacggcaacaacaacttggagttgaggcggagctaggacatgcagggacggcggtggcaaacatggatctggtgagggggatggctacatctgtcgtcctagcgactggcagtgatggcgacaatgatgaggtggcggcgtgcggccatggagaagacgatgcatggaacggggtggaggagggacatggctgccaaggcgagccgaggtggtggagtgcggccatggaaaaggtggtgcattccctagccggcggccatgggaagccggcatgggtggcgccgggaggttggtgcgggcggcggcaaagaggtcggcccggccgatggcgcaaaaaaattgaacatgatgtagaaaaatcgtcgaaaaaagtatatcagttcatccatagagcatttaaaatcactcaacaaaaaatggtgcaactaaaaccgagatattttttctaaagcaacataaatataatttcctgccaaaagataatacataaatctaaataagatcatattttaagagaaaattaaactttgtttcacaatttagtatgcaagttctgtttgtacaatttgtcactagtacttatttaagatttttaattccgttatcatttttttaaaattcaagtacataacccatgcatgaaattgcatttcatttttcaaaatgtcatttaacataaaaaaaatatagagaaactttcagttgcacattcgtgtatgttaaacctaaatagattgggcctgttaaaaaagtcaaggctagtctggcacaaaattttattttatacatattataaaactgtttttttttctgtggaccatttaagctgcgttcgaacttattagcatatgattaattaagcattagtttttttttgaaaattagattaatatgattttttaaagtaactttcatatagaaaatttttgtaagaaaacataccgtttagtagtttgaaaaacgtgcgtgtggaaaaagagggaagtgagttgggaaactatactgccgaacacagccttattctgcttatatcccacaaaagtaatctagattgtatatactatatagaataagtggtaaatttgaagcattttttattcatttaggattttttttaaaaaaaagatcaacagaattttcatccttaaaacacaatgatatgtcatcaaaaactaatttgaatctggtgaaaggataaaaagtaaatggtatggaaagttcagggctgagcaatatccaattttaaagtttatggatgaaatttagacctttgtgaaagctcagaaatgtaaaatagacctttttttttaaaaaaaagctacagagtatatgacttgtgcatgttataacaaacctataattttcttctcacaaaaaaagatctatagatttgctatgatctgggcatgccataacaaaaatgctatgaataaggcatgttataacaaaattcatgagaaatactggccacaatacagtctcagtggtgatggggaatgctatgaggactaggtgacaaacatagactcttccaatggccccagcctcccatcagaacctgtggttacagatagccagaaataatatccaccagctgctgctcttctctatgctctgaaagattagaactgggaggcttctaagcagcaccaagcaggaactatgcctggcagcatccatgtctcaggttttttttttctctgatgatttttccattcacatgagtatctgaagaaagcacagaatgactttgttcagtatcttacttctcagctgctcaatcatcagctgccacagctccactgttcttgcaaggttaggtctcctcaaatcaccatttttttctcacttacattactacgattttgtatataaacaacacgatggatgcagttgtattgggcaagagagagtacaacggaagcataggacaaggggaattctcattgtgagttctgcatttctgcttattttcatcaagttgcattcaaatcccccttgttttatgcaaagaaaattttcagcatgtctcacactaattaacggagtatatctgtatatgtaatatgtgcgtagcccagttacgtcacttcgtgagagcatggtgatgctgctgtacaatgcagatagatcattaatatcacaagcaggtgtttttcagttagttcattgttcattttttctacttagccagcacaaatatgaactgctgcctgttttaactaataacccacaaatcaccacagaactgaagatgaaagcagttgttgagtcaggaactatggatgttgattttagtcttgacaatggaggaagcattattctaaggctgcagttcctactcagtgatgaagatcgcagacgggtccaagaaatggtaatgtggttctttttagggtattttcatgttagttcaaaccacaagtcctttttaattcattattataattccatcttaatttgaattatctagcttgtgtttatactgttttccctttattcagaggaactctgcagtgaaaagaaagcagcaagagctgctttctgatggttatgtactttctcaaggtaacctgtcaaactgtgttcaaattatgtctcatttttttgttgcaaacacgattttagggatctactgaacagactatatgcttcagatgtgccaatgttaagcagttaatgtcttagctaataagaacataatatttaatccacatatattagtatttaaatatatgtgagatgttgtataagttcccaaatatctgacctttgctgtgtgtagtgtacaattcatcaaactcgtatttaggctgtgtaactggaatgctaatgtctgaaatttaatcactgataaaatgtacaatttgtatggataactttcttttcttataggtgattttgaaaattttcagacagcttgttgtctaaacaagtcgaaaatatctccaacatttcgagagaaggagatgaatcttcagttaggaagagcatgtcactggatgatttgcaggagaaggctgttttctctgcaattattgtagatccccagatgaaagacacaaaagaatcaccggagcaaagtggatcaaatagtgcagtgcagaaaatgataagtgcctttcaaagcagctctccacaggtataatacttgtatcaatagatcaataatgcagggcaaaaccactcctaatatactccgtccgttcataaatatttgacgtttaggatattttgttaaatttttgaagctttgatcaacaatagtttctcaaatgcttggtttattttattgttctaaaaaaaatgatatgcacatttttgacttgagtactatcatagtatcacaaattcattagattttatgaacttattttaatacaaaatggattgacaaagtttcaaaagtttgaccaaatcttatcctgaacatcaaataattatgaatagaggaagtactagtacaatttatctacatagtcttccatggtcttgcaggatctgacgcggatcaaatcagaaagctcactaaaagggctgtctgcttcttcagagaatttcacccagtcttcttcagacaagtcatctagttcactagcaacccaggatgtttcaggccacacagaggcaggtcttgtggctgggacatcaggcaaaatgcagcttcctcctggtgacaaaagcttcagtaacaaaagatcaaatgcaaccgagcaacaggccgttctgtcaaccacatctgaaggcagaatccgtaggctattcagagagaaggacctcgataattcagagatggtgatcacagtccaaaaccggagcaagaagcggtcgatgccgaagcgtcgtcgcgccgccattggcccttactctcttgaacacatgcatccccatgtctgcatcaccactgcaagcaggcagctgagagagcttgttgagcttgagccacccttggattcgtttgtgtttgtaggacaagttgatatcaagagaccaaatgtgaggggaggagctagcatgcaagatcaggtatgattatgagagaaattttatgaatctagagaaagtatctgttggtactaaaattttaatgttatgagtctacagaaagtatctgtcggtactaaaattttaactaaaaaatttgatgcctcgagacactagtatctggagatatcaagttttacattagaaaatatagtacctctcgatgtcttctccaaaatgataaaattatccttaaactgatagtttcagcttagcctgctgatccctgaacttatgcactcccatgccaaacttgtgaaatgtgaagcagggcacaagcgacagtaaaacgaaaaatgagatggtttctgctcgaggtgatgatcatggttttccaatattggatgggcggttgattaatcaggcaagtcagttgtcgatgtgtgctgacattttctcctctttttctttcccctctctgactatctgaatttatgttgtgcagggagtgcgtgttgtcattgtgatcatagcttgcggagcaatatttctgaacaacagataagggtagcaggacatgtacatttagattgtgtgtgtgtgtttttctttttcaagtttcagtaagtaatgcaactgctatacacctccatccctaaaaaaattaacttccgagaatgaatctaaacaacaaagtgaacaaacgtgtgtccgagtttatcttagaagttgcctttttttttttaaggacagatgagtaattcttgtgcttgcggtggtgtgccgtatgcattgcagcagttgcgttttatcaggtttggtgttttttttttttatctcaaaccgtgctctttattgatatgttggttcagtgtaatcacgaaccaccaaagaccttacaaaacacgggagggggtcagtccaaatggacatctgacccgggtcccaattagcccctcgacgagccagttcatgagcacaactattacaagatcgataggcgaaagacacatcaacctttacaaagtacaccaaagacatcaatctgatttgcttgaagatgacaccagccgtagcttgatcataatcagctgatttgagagcttgcactaggacagagcaatcagtttctactgagacatgagaaattccgttgtttgctgcggcgcgcagagcataaagacatgccgtagcctctgcacacaaagcatcatgcaccagctcaattctcccagctccagctagtggtcccgtactacaaatccccatccaccggtcttgccttcatcaaagaaagccccatcaaaattcagcttcagttcgcccaggatagggggatgccatttcctctgcgcttgaacgtttggtcgagatttggccgggctcaacagggaagtttcagaaaccatcctcatgactctgtcatacacttgctcagctgatctgcgatcttccccagcgtttactttattccttgcatcccaccagttccaaagaaacagcacagtggtcagcattttatcctccttcatattcagaatatgtttgcacacatccaaagcagaactgtactgcatcagctctaacctgatatgcttcaaattcatcactctccagccagctttaacatatttgcatttgaagaagcagtggccaccatcctcattcagacgatggcagacagggcatcgtgtgtcaatctccatgcctcttctgtcaatgttcatgcgcagtggcagggtattgtgggcaaaacgccagaggaagtgcttcaccttcgggaaataatgtagacgccatagcttcccccaatccaggctcgccgtgcgagcaacacccgacgaggattctcccgtttgtcgagacgctagatgctctcgctgatcctctagagtatgatatgccgatttaaccgtgaagatacctgccatgctgcaaaatcttctgaccccatattcagcggtatagctaggatattcctcacatcctcctcccagaaaatatcctggatcaattctttgtcccattctccaagtctgctacccggttcagtattgtgcctcctcttggagtaattggccgtcgggttatacctgatggaatccaaggatccttccatatatcaatttcagaaccatcgccaacccgccatatcagaccagacttcagcgcctgtacaccacgcacgatactcctccatgaataggaaatacctgggccttccttcacctccaaatctggaaaatacttagcttttaaaactcttgcacatagagagtctgggttggacagaagccgccaagcctggcgagattaaacggatgcaggtctctgtaacccagcccccccttctccttccgactgcacaacctatcccaggctatccagtgcatcttattttcccgatcgtgttgcgcccaaaagaagcggcaaatgagactgctaatttcatcacacaaagtttttgtcagatcgaaacaagacatcgcgaaggagggaatcgcctgtgcaaccgccttgattaaaatgtccttcccagcccgtgacaaaagtttttccttccaaccttgaattttcctccacaccctctccttcagataactgaaggtttttgattttgatctccccatatacaccggcaaacctagatacttttcattccatgcttcaactccaatatccagtgcccctctgaacttctccctgtcattttccttggtgttcatgctgaacattactgaagatttctctttattaatggtttgccccgagcatcgttcatacaaggaaagaacattctgcagacactcagcactccgttcatctgcctttaggagtaacaacgagtcatccgcaaacagtaaatgcttgttgacaaaccttcaccccggatagatcacccctttcttctgccgcattcagcagggacgagaacacctctgcacatagcaggaataaatatggcgagatgggatccccttgacgcaggcctcttataggaatgatctgctcagtataggtttggtgttttttttgtcaggaataaaggacagggacttagattgcctgcatcgttgatgttttgtagtttctcatgtctgtcatactactactactagtacactctttttgttatatagagaggtcaatcgcacaaatatatatgtacatgtctgattgtttaggtgatgtttggatccatggacttaactttaatctctgtatttagacactaatttagagtattaaatatagactatttacaaaactaattacataaatgaaagctaatttgcgagacaaattttttaagcctaactaatttataattagagaatgtttactgtagcaccacatagactaattatggattaattaggctcaatagattcgtctcgcgaattagtccaagattacggatgggttttattaatagtctacgtttaatatttataattagtgtccaaacatccgatgtgatagggacttaaaagttttaatcctatctaaacagggtcttaaacaactgaacctgaacacatctgaacctgaacacatggcaactacgacaaatatcccgctttgcaacaaaagcatacgaatagcgcaacaattaaagaacggaatttactagatttcacgcgtctcaaaatttctaagttttcatctacataaaattgcacatagcttaaattaaaatcgcagtgatatgtaatgtacaactttagatcattactcgttgtatgtagtttgaatactttttcatttatttcatagatactagcagagggcccatgcgttgcaacgggatttgagaaaaaaaatatagtaacggtttcacctcgtgatcaagtatatttgataggtacaatggtatcatcttaaggatgtccgaccgtgttacagcgtgggcacagctaacagctaacaggcgcacactaaaattcatcatatagcctgaatcatctatcgtgtgtgaggctttcatcgttgcttcggtagtacactggagccagacaatagcgtcgtacgtatattatttttgattggaaactcatcttctaaagtaacaactcgtatgtatgtatattgtgctggtactcatggtgatggtggtcagtcctagatgaaaccaaaaattagatgattagcagaaacactaccagaaaaaccattttcccaccagaaaaaccattttcccagatgatgacatttttttctaagtaggtaggcctctcggagctaaatggccacctgcaaaaataacaaccgtgggcgatatcgttgtccgcatgcaaaaatacctcttaagagatccacctgcaaaatagcttaggcatcataaaaatcgtcgcaacagtcaaaaaaaaaaaaaactaagtcctctccctcacctcccacctctccctcaactcctccctctctcccctgcgtcccgtacctcccacgtccctctctccccccacctctctctctctatcggcggtagcggctaccacaagtggcggtggcggctccacccggacgcgactctcgtcccctccctcccagatctggccgaagcggggaggcgggagggcagcggcggcagcagatccggccggagggagggggagggcggtggcgacggcggctccaagcgactacccgtgcagctcccctcccctcctcctagatctggcggagggaggtggcgactgctgctcctagcggcggcggcagcggctttccct

SEQ ID NO: 26317 - DNA, 28708 bp, Oryza sativa
ttttcgcaaacttatgcgtacatgtggaccttcccccgccagggaaaatgctttttggccccatggaaaaacacattttctagtagtgaaacgtaatttaatcgaactcttcgatagtattgccaatgtatataattattgcatggacaacgatgctcgacggagacacatacgtggataaagcggagccacggatggactcgcgacataccaatcggactaaacggaaacaacttcaatcgtgctgttgctagtcaaaatttggaaaatccaattatataccaatgtataccaacgcaaaaaccaattcaaacacggacaatgtaccaaagtagtggtagaaacatcttcaatttctataatatagaaaaatgcccgtgcgttgcaatgggtgaatgttattttaatcttattattgttatacggttttagctaggataaaatttacggtgggaattcgcttagatttttttttataaaatcatgagctgcaattaggaatctgacttccatatcaagttagcatgcatgtttttttaaaaaatttcttatctgacttcttttgtattttcaaaagcaaacgaacttaaaatctgactcgtacactgatctgtattttcaaaagcggaggaacttaaaaaccaactcaaatacaaatgacgtatcaaaataccagcaaaaacatcttcaatttttataatagtagagatttcaatcgggtgtagtgtaacaattaatggcacaatgtgggatgacacgagatgatgagagtcgagtagcagacgaaaattccatcagaagtcttatgaatttttttttaattaagtatagatagatggatactgaatgcaaatttgatacatgaaatttagctccgaggaagtggaaaatatagatttgggagtaataaccgaaatatttcttctttaatttaatttgggatgtgtaactcatttgcataaactatagttccatactaatggctataactttagtgcacgctgcatgcacgcatacatgaaactctcatctgacaaatcaattcttggcagtcagcagcaatgccgcatgatcatcagtgacgccatgcttttctccattgcatgcaagacgatgcaaactgcaaacatgatcggtaatgatcgtgaaaggcacggtccggtgggccatgcgacacacgagccggagacagaacacagagcggacgaaaaaaaaaagatggtgacgctgagacgtgagatatcgggagtcaagacatgacgcaaaatctgccttccatctccatcgcgcgtctggattctgcgtgccacggacaagtcaagcccaagccgaatagaaatcaaacacaaattttcacgatgtacgaaaaaactctgataaaaacatcttaaacttttataaaaacttttataatagtaaagatagtgttatataatagtagagaaagatataaaagtagagatagggatatataatagtagagaaagataaaagttaacataaaagttcgaagaaaaaggctacgatataaacatgtccaggaatatcacgaagcatgcattgagcatgttgtcacatatgcatcagccaacaaagcatatatgaatcgtggatggcacccaacccaatggcatctctactggtactaatataatatataagtaaattaataagtacggagtatataagtagataagagacaaatcaataaaaaaatctatgttacgcaactgcgctgttattaagcttgcaaattctgagaggaagaagcttaagcaatcaagggcttatacactgtggtttgcgcctggttggtcgatggtgtccatcagtgtagatcatcgagaggtctcgacgctggtagggtagcgtaacgtgcttcgtcgatatacgtaagtagtgagggcacacgaggtgcgagcgcgattgtccgtccggcggcggcgttcatggaaggtattatgtcagcggaagggtgtccgagcatgaccgagtcgaagagaggcttggacggactacgacactgaaaggatcttgatgtcacctagaggggggtgaataggcgttctcaaattttttcacaacttaatagcatattagagtgatgagaactttcaattcaaatcggaacttccggtatggtaacactaaaagagatcttatgataggtggcgtttcatttacgtcataaacattaaatttacgtcatgttgtgtaatctttgacgctcgcgtgacgaattttcattcattacctatcatgcgtctctaatggcgtttgtcagaggggtgaccctctctagcgggaggctgtgaggccccctttgtgagttcggccgggggcagcgggtgagattcgaggattcggtgagcgaagccgtgtgatattgagggggtcgagcccacaaagacgatgagaccaaaagggtttatataggttcggccgctaacaagcgtaataccctactcctgtgctatgctccttgagtgaaggattacaagctctccttgttggagtaaaatgtggtgttgatcatcagggctagagactgctctggagcgtccaatggatcgtctcgtatccgtccctcccccttttactaggcctggacttccttttatacctcaaggggttaccacatgggcccaaaaacctagctccggtggagaagtgctttgtattaaatgcctgtcttgtctcttgacttgggaagcaagcgcacgtcatctttatgatggggcctatcaaatcttgctgcctgacacgaagggcgcccatgtcagctgctattaataggagaagacttccgggtccctatttgcaccgggaaacgggaaccccaattgaccagggcggatggaccgactctggccgggatgagaggttaagacctctcgtcatcatgactgatgggacaagacagggagctcgccccctgacccatgcaatagtacgcctgacaccccgtgtcccattagtcattcaaccggtcacaaaccaatttagcgcgtgctgcacgccccattaaatgcggcgtggcgcgcctgctcaggtcgtcattaatgcgggtaggtgagcgctcgaaggtggccacctaacccaccgcacgtggcaacccgctgaaggggtcgggggagcccgacccctagtcacatgagggagtggcgtccgccccgcctagtctagagacccccaggcccatatcaccgacagtattctatgacgaaaccttttttttttgtcattaatctagtgacgatccttctgtcgtcgtagagttatgacgcccattttcgtcactatcaagcctaaaaatcgtcataagattctatgtggcctgttaaggcccatgtagtgagcaacctgtttatgggctaggtctattgtaaatccaattagatttttaataaattcagcccaattatacaatatccatctatattaagtgagctatacatattcaaaaggcccaatagacccaagcattgcaatgaaattgaatttgggccatgcatactcaagaagcccatatatcaaacagaacgagctcagttaaaatccaatacaaaacccaattaacattcacatatctgacatcttatagcccaattaacaacattcagctcacattaatacaaattcacaaaacaggctatcacaaattcagaaaaaaaaacaaagatcgcaggttatcctcaagtcagttacatgacaagtcagttaattacatccacaaatcactatccaaaacatgttcaattacatcacaggttcattgaccataccggaagttttggtctcaaccgaaaagttcggcggataacggaataaacactaactataaacttgtagctcgaacaaacaaaatgtatattaatcaaaaggtgacaaacaaggtatctaaacaagatataaaatcaccaactatattaattaagcatgcaaatagatcgggtaaaaacaagctcaagcacaatatgagagatggtaagaacgagcaaacctaagagaggagacacattgatttgtttcccgaagttcggatccacggatcctatgtctccgttgaggggccacaaggccgggtctattttaaccctttcctcacgaggttgcacaaatgcactcctcggtttcactcttgattttttcccttgcggaggtgaaatcgaagcctttacaaactttatgtggcacaccacaaccttgggtgctcaccggcgacgcctagccgtctaggagaccttagtctcaagagtaacaaatacaatcgaagatttgcttgctatgaacttgagtgctcaaagtatggagtgaagctcactagctctcaacttctcaatctctcaatccaactctctccccttctcaaatccctctcacaaagaggcaccacaaaggatggagtgaagctcactagctctcaacttctcaatctctcaatccaactctctccccttctcaaatccctctcacaaagaggcactacaaaggtagggaaatgaggatagctatttggctttggatgtatctaatgttgtccaagaacagcagccactcaaaggaggggtggaggagtttatatacccgagcctcccaaaaattagccgttggaggccaagactgtaattttcggaatttccgaaaagcattttcagaaaaaactgaaaatttatataagcaaatctcagtttcgtagccatttttggaattttcgataatttttcggaatttccggaaagcacagagtaaaacgtccataacttttttgctcgggagtccgttttttatgatcttggattctatggaaagctcactcagaggactaaccaactcaaccaaaaacaaagtctaaaaccacttaaaggatatgttaaatcttgggtttctcttaaggtagcattatgataggtcactttgagcaccgagacatacacaaacacctcaacattgcatccctcttaatagtacggcattcctaaactcaaatgtaaataggaagagaattataccaataggaatgccttcttcccatctttctttcatgggacaatttcgtttttgcccccactttcatcttcaatattgattttgcccctactttttagggttttcgtttttgcccccacctttttgaactggaagaggcgtttacccctgctttggatggaagttagtgggaccgggtatatggcagtaaaaaaatagagaaataaatgaaataaatttttttcgaatttgtgttttacttttttacccctggcactagtctaatggagaatcgattctttcccccaacctcgctgcttctctcgattgtacaggcagcggcggcgacctggcagcggcggcggctagggcgcagctcctcccgtcagcggcagcgagcagcggccaagcggctacgagcggcggggagagggtaggtggcggcggtgggtgcacgggagaaacgaagctctcctggtagacatgttgcgtcgcgaggagacatcgtcaccatcgtcgtcgtcaccgccgaactccctgtcggcggccaccacctcgcccctcttgagtcttttgaggttgtaaaccccataccgatgcccctgacttgaccggagcagtgcgtccccaccaccgctgtcgtcgctcatgtgggcgacgaagaaccccatcatcctggccacgtcgccgaggaacccggcggcgacgcggtacacgcattcccatgcctcctcgtcgtagtcccggagcagccacagcgccaacactccgtcgccgtctgcgtcgtacgacgaagcggccatggtgccctgtactccgttgagctggctggtccagtcggcatcttgggagtagtcgcacggcctgcgcatcgtgcggaactcctctgccgccgtatcgaacaccagcacagtgcggaacacctcccccgtcaggacgttctagtggaggcagccgcacagggtcatcggcgtccggacgttctagtggacctcagccgtgcagggtcaccggtaggtgatgccacgatgtgttcgaggtaaggtacatgtcgccgtttggcggccccagcagcctcgccattttcttgcccctggcaatagtctaacagataataattttccaaagccatgtataatggaagcaaaaacaacatcaatgaatagagatggaagagggtataaatgtcctacttaacaccgttaactcctccatccaaaacaggggcaaaagcctcttccggttcaaaaaaaactgggggcaaaaatgaaaaccctaaaaagtaggggcaaaatcaatattggagatgaaagtgggggcaaaaacgaaattgtcccttctttcatcgtcttaagggacgccaatgctaaaaccgtttcaccatatctttttcaaatgattgatgcggttacttgtagcttcaaatggcctcgcacggtccatcatgacaaagccgtcacttgcccttcatcactggatttggttcttgtcacgccttgaagttcttctccctagccaaaattcaattaataaattgttgcaagaaattatttgtttaaaggcaagagagaaaccctaaatcaaaaaaatgcaaataataatcagaatcaacatgtggaatttttcttgagttctaaatgtcaaaatatgctaacaggatttttagtggaattttcagagccatggaaataattttaaccaattaaaaatgagcatgtgcattatttaatcccaagaaaatcccccttttcattttctcttctttttcctccctttttcctttttcttgggccgtaaacccactcccttgcgcgcccgattgctcgctgggccggcccactccctccctcctctctccaagtcaccgacaggtggggcccacctgtcggccccgtcttcctcttccaaccggcagcaactgccgcccacgccgccgcttcctccgcatccacgcccccactccgcgcccacacgcccccccacgtcgccgcccccacgccccgccttctcccgccacgcgcacgcgcccgcaaaggcgggattcaattcgaatccccccgctctctctccacctcccacgtcgccggcgaaatcgggagcctccccggccacgtctgcctccccggccacgtccgcctccccctccgcctataaaacgctccccgtgtccccctctctcttttttcgctttcgccgagcttccccgtgccctcctttgctcccgagccgcttcactcatcgacgccgccctccggccgtgctccggccgtcgctagccgtcactagccgccgcgtgaagcctcaccgcgtccgccatccgcccagccaaatccaccgtcagggcctgcttcaccccgcacgccggtgagtaccaccattgccgccgccttcggccatgggtttcggtcgctgtggactccctctctttccctctaacctctctcttttcctctcttagggtgtcccgtagctcggccgccgttcgtcgtcgccctccggtcgctcgccgtcgccgttagtcgtcgcctcctcccgcgccggccgaaccccggtgaggcaccccctcccctttttcccccttcctctccctcctagcgccgagccgcgccgtcgtcgtcgtccggcgcttcaccgtcgtgccgccgcgtcgccgcgtgccgccgcttgtcgccggtcatgccggctgccgccgccacttccgcgcgcaccgttgccccatggccggccggccgacttggagccgtgccgagccaggcaccacgtcccctcccttggagccgcttctagtagggcctgcctgccagccgccccctctccgcttaaaaatggttttgtttcctgtttcagtagtcttatagcatgttttgcttgtgtgctttgtttgtcgcatagatttcggccgtttcgtcgatccgcggtttcttgaagacgttgctgtggtctcatcagtgcgagagcaaggcaagtcatgcattataattgatcatattgtacccaatttacaaatgtcccgcatttctattaaaggttgcattatttcataatatcatgtgggatgggtcctactactcagccatatatattgtttaccttataccattgataacttgggtatcaaaatgattagatgttggattagggattgcttagccatgcttagttcaagtagtacacaaagggggaattacattaatgcatagacattattggtatagctttggattagtgccaccgtaatggtgttagttaattaaaatacactacgtggtgggctgtgggtgcatggtttttctagtcgtgcccatggcgattaaggaccggttcgcgggatgccctggaagaacttatcgtacttaccacaagccagcgtgggcaacggctgggcttgtagtgtagctttcctctagccgacgtacccgggcgagagtgggcgtgatggagttgggtcggccgaggtgtctggttgatcggcttccggattcaccgcggcacgagaggggggctgcccgttgcctgctggggacaggggcgaaccctgaggtgtggtgcgatcggttagagggggctatgcgaagggtcctgtcatggtctctttctggtatgtcgtggtggcatgtcggcgcacggaaacatgtcgtggggctgtgtcttgtgggtacagttgtacacctctgatcagagtaaaactattcgaatagccatgcccgcggttatgggcggtcgaccagattcaccgtgattagtctcaccctagttagctattgaattggtgtagttcaggtggttggttgggcctgttgcaacgtggtgtagcgttgagcagtgattggttaatatggattaattactacaactgttttactgctttcaactactgcttttaaatgcctgctttgtgcaaatgaacctttagcctcccttggatatatcctgcatcataccttctcttccggtatgacttgctgggtacagtgggtagtactcagtcttactctcttttcccccacaccagagttgaagttcttctcagttggagatgtctcgaagaagttggtttcgtcgctgctgtcaaggatgcctatggaatggaattgcccgctgcaggagtcaagtcttcagacttagctcgcttttatcttttccgctgcatttgtaatcttttatatttttgtaagacgtggatctgtatgtcaacaattgtcatttgtgtaccctagctggtcctggacagggggtttaatgcacattcagcttagaaattctggttcgtgaatttctgggcgtgacagttcttcggcgccaagccccttgcttgcccttcaccgccgcatggtccatcgtgactgagcttcacatggccttcaccgtcttgccatggtagccacttcgtatcccacatcttcaatatcttcactttgtcattcttggtattgttaggtgtaattatatcacttgagcatcaacatatttgcaatccttgggacctatttctttcattcaactaaataaaattattagtcccaatgatccggttggcaacctccacatgttgaccaacccatcacatgtataaaaaaatatgaataaatgatgagtattaatcaataccacaagtgtcatatactcaaatatatgctcaaatgtaaagatcccaattaaatgaaagtgaataacttggatcgattacatgcataactaaaatatatgatttgctcctcctaaatgtatgcatacaaaatgtttgtatgaagcaagagtatgcataaaagaatgaaacattaggagcttaccctatacaagaatagaatgcatttatcaaatataagcactaaaataaatgtataccttcatcatcttcatgttctgaatgtaaagagactaaacaagagaaaagactcaaacaaaacattagtctcacatgtatattgttattcacatggaaatattatatatgaacgtatcaatatgtacatgaagagaaagagtgatacatatagcttgatctccatgcatttcatcattgtgatttaggtccaccatcaatgaatatttctatctcaactcataagaagttcgggaatcacctctcacacactctactttcatatccacatgagactaggcaaagaaatgcttataaaaacatcagtatcacataattggatttgtcattaatcaccaaaacctaattaatggcacttgaactttcagacacatattagtattgcacggttgatgggcctcccgagagctactccattaggtctcccctaatccaatcctatctgccgacccatatatgtgatatatatgatagggctagcgtgaaagatggatggcgaatacgtatgaaagacggacaacgtaccaagcacccaacaaaaacattttttatttttataatagtagaaatagagaggtggaacggtagaaacacctctaattttttataatactccctcaatcccaaaaaaaaaaggccaatcctagcatcccaatgtaaaattagtggggagtaaaaatgcccaaaatagccctcattattggaaaaagtaataatggtgataggtaggcaatgatatttaagagataaaacttctcgttttatgtgctgagagtaggtaggatggtagaagttagttttttttggataaaatttaaactgtagaagttgagttttttttgggacgaaagggtaatagatatagaggggtgggactgtagaaatactacgaatcttttaagtaggtaaaaattatgaattgtaactttattccctatttagcttgtattaattaattgtccaatcttttatctaagaaaataatagaattttgtttataaatatgtaataggaggttgtcatagaggatgagaaaagttataaaaatgattcagttggctaaaattttgacatccccttaaagaaaacttctgaaataacaacgaaaaaaaattgtacaacaaaaccttaatggagaaaggtagagaaaacgtgcattatgcagtaaaaccatacactttaacgtttgtgaacacttgtactcctagacctgttacacctgtacatgtaggagatgccatgcttctacggctttaccccataatttctcatagatagtccttacaatctgtgcataatacctcctctaacattgactccttgcatgaaaaaaatatgatgaacatttaacctacggttacacagatgcatgatattcataagtttcctttttaacataaatgaaaatcaacacaaggaacttattggatatattaatatagcacagtagacttaatttctactgttttttttataaaaaagaacactagcaccctagagcagtctcatcggtgatgatgtagaaagatatgggtcttttcgtcggccaccacactaaaccatcaagaaaatattaggatatatataatggacaagatcgtagatagagatagatcaagatgtttcttgccatttgcatattttgtcgttgtgttggaggtatgttgtaggtcggtggaatagagtgcccgtggaccgctggattctcaaatgacaaaaaaataacaggtaagacgcgtgacataaatcattattatattaaaaagtcaaaaaaaaaggaaacaatgttgatagaccattgtttcgttagaggttggggagttgaaaaagaagggaacttatacactaagacgattggatttaaattagatggaaggttgagaattaagctgatcctaaacgattttgttatacatttgttgataaattttctttcaaaaattacagtgtaattacatcataacttacgtgtaattacaaattgtaacttttacataattttgaatcgttaaatttgtttcaaggattcgtgcgagcgaggatggaaaaaatcacaacgtgcgtacgagtgaggggatttcataaaaaaaacatccgctctgcgtaaatagcgtgttaccatgagatttatgaaactttcatataatttataagggacataatgtaatcaccctataattaaactactatatttacatccgttatattttgtagagagaatttagcaacaaacgttttgatagtctcgatgccaaccaacacggcttgaactaccgggggttgttgggcctatttcccatctggacgcagtactttgtcccaaaatcggaaacccgtactatctccgtcacacccctctccacccactgtcatgtgggtcccacgggacccgcgtcgtcggtgggccccacatggcagcggccgcgcggctccccgcggtgggacttgggagagtgtgtgtgtgggccccgccgcatataaaaatcgctacgcgcacacgcgacgaaatcctcctctcgttcgcctcgtcttctcttctccccccacttcctccgcctcctccgccgccgcgcttttcgccgccgcggcgagccatggacgccgcagggtagggttcctctcgccccttctacgtcgtggaggaaccgcgtgggccgattctgggtgggggggttttgggatgattttttgattatttttttatctctctttttttggttttcctcgcagttacccgaagatgcaaggaggaggggcgtcctcctcgtcgtcgtcctcggcttcctgccgcgccgccgacgcagccgtgtgggacgcggtgcagcagcagaagcggcagcgctgccaggtaccccccgtcgcgttcttgcgcccccgccccccgaaagttctgggcctgaaatcgcaggaagttataagtttttttctttttgcgccgttggttgggtgtaatctgagcgggtttttgtgcaatccgggatgcgatcgttgtgttttgtttgatctactaggccgtcgatccgatcgatcatggtacgaggggttttggtttttctgtgttgctatgtttgagagattcgttcttggcgagattgttaaatctaggtttttcttttctcctgggatttagtttctgttggatcaaaccggtgggattgtggtgtcgtggttttcattgaggtggaatcatcgtgttggtggtagggttttgggttttgggggtgatttgatcttgggttgggatctgtttattttttatattttcgatcacacggaagacgtacatgcaccaaatgcacatttatgattaaaggagaagattgtttcttttttaccaaacatatgcggatcaaatcacttcttacaacaagaagaaatctttctcggtatcaatccccttgcccctcattctttgagaattagaaggatccttttcgagtttctatttcttcatttggaatctgggctcttctatcttcaacttatttttttttcgctttattctttaatagaaaaatgtccgtgcgaggcaacgggtgaagactattttaatcttattattgttatatatggtttagttaaggtgaaattaaatgtgttaaattcgcttggatacatattttgttagaaaatcatgagctgcaattaagagtccaatcgtctcaagttagcatgtaagtttttttaaagagatttcttatatgattccttctgtattttcaaaagcgaacgaacttaaaaaccgagtcaaatacggatttgtatttccaaaagcgaacaaactcaaaaactgactcatacacggatgacgtaccaaagtattggcaaaaacatcttcaatttttgtaatagtagagatttatttcacacgagtgtgccaccaaacgtttatgattaaagagattgagactagagaccagcggcaaatcagttttgtttaggtttattatatggtagaatggaggttttgtttattcttttaactcctagctagcattacttgtagattgggttagtgatttggggtgtttggcactattctcatgtgctaattctgtactaattctgagcagtagtgacatttgcctttgtctgaatttatacaaaccattgaagtgccctagtgttgtgatggaaatccatattatgtaacaaatatcatccttgttagatcatatggaagctatattagtagagattcttcgtgatttgtgaggtttttatgcagtgtaggcttagtcatcagctgtaatatcatatatggttggacttgcacgatttggtagatattgcgacatgtgttgctttcaataaggaaattttatttttttcagcttgtagattcaaggatgattacatttatgatatgcaaaaactacataagatgttcttacatgctagtctattgtgtatgtgtaggatccatagacttgaagttgaagctgcatagattatttgcttcgctcctattattactaaccaaagatcaattctatattgatccaaatcaatacgtatgctcccatctttaataggattcctgctaaactcatacatgtactgtaatgtgcttcgctatgggtatttggttactacatatcacgtatgtaggcgtataatcgtcaatttgacagcataagcaacaaggaagccaaaataaaattgtatttccaacgtagcagggtatgaatcatctgtatgattgagtaattagacttgtacagaaatagggcagtgaatctgaaaacaacagttttactttggggtgtgtgtagagaccatctgatcactggaaattaaaaggaaaaagtctgtgccttgttttccacttgacttcctgaaccttttttgcgtccattttagctccctaagtcgctatgctgggttatgttacctcatgctggtttcaacatataaggggggcatattcatcattgcataagtgtttcacattatattcatcattgcaaactatgatgttgaaacccttatatgtcgaattcgccccttatgctggtttcacatattcatgattggttgaatggttggcaataatcccttattgcttcagtttttgtaatgtaaatatattgctcctccaacatcgtagtttgtgttatctacattatattctcatgtaatcaagtaatatgcttaatgtcatcggttgtcatgcaagatctgatcctagatgttaatgatgaatatcaataaaatcataatatgcgaaactaaatttacaaaagtaataacggtgactgaaatcctgtcttttttgtgcaagctgtctaagatctttttatttcttacaataaccatgacatactttgtagggttcttcatccaatgatcaagttggactcagtactgaaaataattccttccaagcacctgaacctgagctgcagaattctgactgtgtggaagatgaggaagaagattactatttgtatgatgaggatgatgtctgctatgatgatgatggagactatgaatttgatgaaactgacttcaatcagcagctagctgataagtttgatggtttggatttgcctccgggagtggaggctaccgttccatggctgcaaaaaaaggatattgctgatggacctagcactttcaagtcaatggcagaactagatgctgatattactaagaaatatgaattctttaagcagtttgatgttgttgagaatttttcggaccatcattatgctgataagcctgttgggaaggtaagagatcatatgcatatttgtatcattttatactcctttcttcagatcaaaactaactttttttaaataaaaatatcagacagggaaagactggacaaaaaggattcagtatgactggaaacttctggagaaagatttaccaggtcaacttcggaaagaacagttgtatcattgttgttataaatgttgcatctgcatatttattgaaatttcttttagttctttaatcaacattgagcattctgctttgtactcgtaaaaaactgttctgtaaaagcttgaggtatcttttgtagagatgcaaatgttgatgatgaaatgctcatattgttagtcctatcgattcataacttcactactttaaaatacttctatttacacagttttagaataccctgtggctcacagatataggagctccagaggtttacaaactacatccatgacttgcaatacatatgtacactgttgtagatgaagttagagatatgcttgctctgtcttgatatgttttattccataaatacataattcttgtaattctgattctttttcttctgtgcagcatccatatatgtccgtgtgtctgaaaatcgaatggaccttctgagggctgtaataattggacctcaaggaacaccttaccatgatggccttttcttctttgatgctcaatttactagtacttatccatctactcctccagtacgtgttcaaaaattgttcttgtcattttttatttaatttatttatgttttgattgaaatatctaagctgatatttttttcccaggtggtatattatcattctggagggcttcggctcaatccaaatttatatgcttgtggaaaagtctgtcttagcctgctaggcacctggtctggtagtggttgtgagaagtggaactcagctcactcaactatgctacaggttttagtctccattcaagctctcgtattgaatgagaacccatacttcaatgagccaggatatgagacctatgccaacagtgctactggacagaagagtgccatggactataatgataccacatttcagtactcatgcaggacgatgttatactcactccgtagatctccacaggtaatgttgtgctgcttatcaagctcttttgtactacctccgtcccaaaatgtaagcatttttagctatgaatctagacaactatgtgttcaggttcatagctaaaagttgctatattttgggacggagggagtagcatagaaataatcatccattaggcatttgaataacatttcttttacaattattattgtggcatgcttatctgtttctttgattatgagcatggcactcttttgcctgtaactgatgcgattccatagcttacacacaagaccatctaataacatcccttgtcatttattatttgtttcagcactttgatgcccttgtagctggccacttccgccaccgtggtcatgccattctggctgcatgcaaatattacatggaaggtcataaggttgggtccgtagtccctaacgaggacgaggaggatgcgaagcagcaggacgacactgatgcaggaggatccggcagcagcagcggagcaaagccgcagcctgaaaagccagacctgtgcaagggccgtgctgcatccttcaaaaccaacatggccgttctgtttgaggagctcttgatggaattcaacgtcaagggtgctgacaccaagaagttctgcgatgagaagttgaagaagaaccagcaggctgctgctgctgctcgctgaagaggccccccagctgcagctacaaaacgcacagatcttctctagttctgagggtttcataatgaagcgaaaaccgtagaaaggggttttgcttgcctaactatagaagtgctgtgtagatagtccattctcgtttttctccttttgttgtacaggttgagtgtgtggacttaaaaaatttaaatgatcatgttagatgctaactgaagtatcatcaacccacccctcgttgtggtgcgatcatgaaatagacacctgcataagtaagcaaggtggcggttccatatgatttatgttggcttgcatttaggttacaccgtgttacttgcaagagtttctccatcggctagcgtggtggctttgatcatatggttagatttgccctttttcttgtgagttcactttttttgcagctaacattgcgttagtttcaaactgctttactaatagatttaattcaaccttgagttgacatttatcttctcggaaacatatgaataattctttactgacggatgtaattcgaccttgagataaccattatcttgtatgaaacatttgaacaatttgtgcgatttatcgtggctagactttttttttatcatctgttctgatagtatcttttacttgtgacagtagtagagtagcagaatttaatctaaccattgaattgctataggtatttaaaacattttatttaaaaatttgacaagtacaactttaataattcatctatggcaacatttcataattttacccctcaaaagtatttgttattcacataaccagataagattcatatatattggtttacttaaacgccgtaggagcggtgaaaatttagagcgctacgtcagcattttttacaaaaacccccctgcgctttcggttaattatgtgccggtttccgctgctgtccactgtcagatctcaccatagggtcgatctggccgtctacgtgtcccgctgtgtcggccctttctcagccgtgggatagtcaaatcgcgaatgaatggcgtagattttgtccagccggaccaaaccctagcccctgcgcccgtctcgcccgcagcctgccgcagcaacgccgccacctcgcccttctacgcagccacgccgctgccaccgtcgcctttctcctttgcgcgagccgtcgccgacgcatcctcgccctcctccaaccatcatcgccgtgccgctcataaaccctagccgcactaccaggctcgcacacacgtgatctcgcctgccgccgccgccactgctcgcctgtcgccgccgccgccgttgctcgcctgctgtcgtgccgctcccctcgctccgcacaccagacgcggcctcttcctcgctgtctcacggtctctgcccaggcaccggcctcgcgctcctcgcctttctctcgcgtgaggcagagacggcggcggaggcgcgtcgcctcacctgctcgcccgcccgccctctcgcctacattgcctccttctctgccctcccatcctccctctcgctccctaattccgtcggcccctctctactatgaccaatcgatgcctccaatccccagcctcacctcccaaaccctaggttggcctaaagcatcatcgaagatggcattgctggagcagggggtgggggtttcgtctacgatgcgctgccatggatttgaggctcctgacccaaacctctaaggtcgtttcaatctccagcgatcaaggtatcgtggccaaccaagaacgctgctccgatgtgcatatctgcctccgttcccctctcaaattgcatgctatgtaccgtcagaggagctcttattgataatgtatagacgatatgtgttttgaagctcttagtatttcaagcatcaggtaggctttcagtcacttactgattaacattttttttctttgtgtatttgctctcactgcccacttggttcttcatgtaatttctagatgaattagacttggcgctaatagaactagattttaagttaaatagatgatttatatgcaggaagatccgatttacttcaatactctactatctacatgccattttcagtatttttgttgtatgactattatacctatcctagcaatgttacatacatatcattggaccaaatggatttgatccttctttacatttttaattctcttagctggtagatcattgaatggttaatatggtcaattatgggttgtatgctaatatggtgtatatttgtctacaggattttttcccttccctttccctatcatccttctctattgtgaggtattactttttatttttattttactcatccaggccttctgcaatagttattttgatggaattgttgtagttttcataattatattcagttatcggtcttttaaaactgaattactagctatgagctcataatagtagcagagcatttgtcgttgtaaacagagatgatttcctacagcccactaaggagtgatggcaggatagatgtggctcttatgtatcctggtgattcaccttgaactattaaaaagaatctttgtccaatcaagtaatgcctcctatttgcataaatgaatattcagtttaaatgcattgggtctactcagcccatttcagtgtattgccagctctttctgaatgctacttaattagttttctcaaatatgtagaataaatgactccatagttaaagttttccaatccaaccataagctcattcattttcttccctttaatgcaggaaacacttttactagcactagcacctcaaaatttgagcaagaaaagttattttagcatcggaactgcatggttaatggtgattagtaagttcctttcaccgtactttgataacttgatatgacaaagagataacagaattccccaaaaggtgttataattttaactggatgtacgataactgtagtatactttcctatgggattgtaaaattcattgtttattttgtcaaccttcaaaatcattgtcatcggcaagcatagactaatcttcttttcttttaccgttgcatgtcttctagagagggagttttcagtcgtaatatatgcaacacagagcatatccgatatactttccatccgtgggggaaagtagtttagatgttgggtgagtgcatttcattgctggagtgtaccagtgtaaaatgtgctgaaattatttcgtaactaataaagcaaatttacaaccttctgttttgtatacaggttaatggtgattagtaagtctctctgacgtgttgtgcctgttatgcttaattcaatattgagtttgtagttctcttggaccttagatatattaattattcagtgacatcatcgaccggcgcagcctttgcccccggcatggagttggatctcgctgccgccgcaagttgccaggattgattcattgccgttgcggcctgatagacctgcgctgcgggcctgcggctaggagcaatacgctgcttcatcgtcatcgtccagaacaccaaccgtgtccaggtaggatgcctaaattcctcctgttcaatttgttctctttggctaatcggatcctgtgcatctgggataaggaggaggataaataattggggtgatgccaataaatttttctctttaacagatgccttctagatgcttggtaaaattcctagaagaagatctaagtttactctcaaaatatatttgtttctgcagctttcttaattataatgtcttataattttgtatcagttaacttctacacaaataacttctcactaataatgataaaatattgaagatgggccatacaccatctatgtcatttatcagagatgtacaggttcaagcaaggttgtcagtatcccgatacgtagtatcttacgatattacgatcctaccaagccgaaacgataccgatcccacctagtatcctaattttcatagtatctcaatcctactattcattagtacacgatcctatgaaatcttaggtggtatcccgattctacgatccctacgatactacgaaatattatttaaaataacatggtatgaaaataatgtaaataaatatgctcaaatttatataaaaatcagttaaatatatcaaaaccaacgtggtttctcttaataaatgcctctatttgcatgacatatatcattactatattttttatatagaatggctacatataattaatataaatattaattaaactttaaaaaagaaaatctcatagtatcccgatactacgatacgatcctacgatacgatattactttgagcaaaacgatactacctagtatcccgatcctaacaaccttgggttcaagattcatacatggtccttcataatgtaatcctgatgtacgtaggtacatatacaggccaattgtttctggaatcttaaataaatttggtctaaaagaatatatgctttgaaaaaaattctgatttttattattctcagttacactgattcaagaatgtagatatgagtatatggcatggtactacatggaagttgtgattttatttgccaagatatatacttgaaaatatactaagttagtttggagggtacgagttttgatgttcttggcttagcttcccttttcctatagatgttaatgagttaattctgaagtaatgtcaatattccttcattgtataccagtctttttgcagccaccttttctgtgcttttatcaatggcatcttcctgcagcaacctttatgtgcttatgcttggaggtatatatgttttcttactgtcttatctgggtgatatatgtggccttcagatctcttataaaattatttaggtttagtgtcatgatagcataatgtttattgtacaagtaggtttttcctcaatttccttccctatgcaacaaatcatattttatttgttaatctgttgtgctctatatttgtacacagagtgaaaatacatatgcattgataatatcctttgtggacaattttatattcgtaatagtgatgcatacatcataaaaaaattatctgtcaacctgacaacttggcatatgaccccaaaatttggatcatgtagttcattttctgagacacaacggtctttagggcttagtatagaccgccacaggtcttttagcctcatatttggagactacattattttacgaatcatattataacgactaaagttggttagcgctgggtctataagtcaagacagtaattgatcacaaagtatgttgcacacctagcaaaaaagaaatctaattggctcaattgaagatttcaatattgacaagaaatttagtaaaccacaattacgataggttcaggcactttgtataagaggctaacattttttcttccgctataaccatttataagctattaatatttaatatttaatataacattgattccataggttagtgttgtttgcagggcgaactattgcttacccgaaaggattaaagccacaggtataagttctaaactatatagtaccatcctcagttgatatgtgtagtccatataggatgacagtacatatatgtgccaccccaaatgacccaggcctccatatctctggctatactgtgtggttcccgcgttgatcataaaattttatttcagttcattggtgtgtgacaaagctacatgcacttcaaacaattttagatgagacatgccatatgttccaatagggacacactgggatattatttttcttctatacaagcgttattcctgcttttgtttttcccatctcgacatagtttttgaattttctaatgacccatccttccgaatttatattatttgctttgtaaatatgcttacagagttttcattatcaaccaacttcaagatatgattttattaatttgttttctgtttaatttattattgttctgtttgccccttcttggaagacatagatgtttcaacacagtttatttgaaaagagttttgtcctacctgtcatatatactcatcacatggcaatatatgaatgatatccaaacatgcccttagacataattatgtatgggatacctcagtactcagtggcgctatgcaaaggaggtaccagttcatctactaaactgttgcaagtacataatgtgatgtggtgttgtttttattgggagctaaagcactaaattttctttgcggcgcagttctatatgtgaatatattcaattagttcatgatgaagatgtctgagaaaatgttgcaattctttgatcacttaatgattgaacactgctacttttctaatctatactcccacatcacgtaagcaccattgtcctctatggttgttgcttttctgtaaatgtgcatgattgtaaaaataattatatgagcaaatggattatattcgcctttaatcttgtgatgtatagttgtaatgtgtttgcatatgtgagtatgcttctgatataatgattttttttagataatgtttggatataatgcttaaaagttacactatatcttgtgctattttgattatgatatcccagcttcaaacattaattcccacgcacgtggcgtagctcgtgactcttgctagttagataccaaacgagatggctattagggtgaaaatcaggtgggtacagtcacatcacggtacgtatcctaacatatatttttcttcaaaattaaaaccggatacagtatattaccagataacatatcactcatcttttagctatataccatatatttttccttcaaatcgtagttgcaacgggtgaagattattttaatcttattattgttatacggtttacttaaggtgaaatttactgtagaaattcgcttggaaatatatatcttttttttagaaaatcatgtaaaaattcgcttggaaatatatatcttttttagaaaatcatgagctgcagttagaagtctgatcgtcttaagttagcatgtgagttgttttaatgagatttcttatacgacaacttgtattttcaaaagcgaacgaacttaaaaattaactcaaatacgtatatgtatttccaaaaataaacaaacttaaaaatcgactcatacacagacgacgtaccaaagtaccggcaaaaacattcaatttttataatagtagagatttgtatctcttgatcatggatattaatctagggagacacttggtgtgctaaaaagatatacatcatgaaaaaaaattatgtaataatacttgcgagctggtaaaatcttttagcactcataatagattttcatgtatatatttgataacatgggacatacagtcatgcggacatgtacaacttttcttgtatcctaacctgcatttttctatggattcagattcgaactaaaatatcaccgggtatttgttttctcttggggtgtgtttgacaaatggaatatgggaggtgagattggaaaggaaaatggatgaatggctaggattaaatgagatgtgaagaatgaatggttaggatgcaatattaccctttaaagggtggatattattttccaatccttgtgtttagttaacgtcaaaattagaagtttgattgaaattgaaatgatgtgacgaaaaagttgaaagtttgtgtgtaggaaagttttgatgtaatggaaaagttagaagtttgaaaaaaaattttggatctaaactcggcctatttgccaaacaaagtaaatgcttgggcgggtcagtgtgcgaagaaaaatcctcgacaccatttcagcccaaaactttagggcttagcaggccggcctggtgcggagtgtcaagtccacggcggcggcggcggcggcggcgcgacacgagtgcatgacgacatgctccggcgggcgaccacctcgctgagccgccgcgccgcctgcgccaccctgctccgccgcctccctccccggccggcgacgacgcttgagcgccacccgccggtccaccccggcctccgccccgcggcggcggcggcggtgcagcttcggcgcctcagcgacttcggcgtgtcggtcccccggcgcatggcgcggcggagtcctcccaccaggcccgagggttactccacctccgacagcgaggcggacgggtggtccgttagcgaggatgacgaggaggaggtggaggaggttcagttggagcccatgtccgtcgatgacgtcgcggcggggaaggagtgggaggggttcacattggagtacgaccacgagcacgacctcgacgccgatgatgaggatgccgcggagtaggagaagaagaagtagcggcgctggaggtgggattctcttcctttttctgcgttgcacgccaggtgcttgcggaaaagcctgtgaggctttacgcgtgcttcaataaactctttagctgttgatcactgatcatggatgcccatttgggtcgaacctgattaccattgtcctaaacaattttagtcaaaacctaattctactgcagcatcgtgggcatgcattgttggtttattggaatggcgtttccacattttaactgcacaaatgtttgcttgtcatgtttgctgtgcagtattgcagtgtgctcatgcttatcacaattttacagtgcttagtttttgtgtggacaactgagttggaaccttgaagggttagaactagggtatgtttggttcgtaaacaatgtttttaccccccataaaagaaacacattgtcattttgatcttgggcttaagtgcagcaaagttagttgttttgtcgcagaatacattggtctctactcattagagagatacacactaggccctgctctgaatgcgaaaaatccccccttcgctacaagaattgatcccttggttcttaaggtatatgccattgatcaaattacaaatggaaaggatagtatcttgatcatcgagcctgcataattcttttttttttggcatttgttatgcttgtggacatgtttgtgacctgtgtcactacttattgccaaatactttggtggtcttcatttgtcacctgggaaagtccctttgacagctaatccccatgaaattcatttgtttcatcagtcccttagtcgagttacacctataatgatatcacaatatactaaagcacagtatcctagctagttctcatgtttcactcacgaaaatttatactgaaatagtctgtgatacatcaatggcagattcagagatttttgttatattagttgagttcaaatataatacgagaatgttttactaattatttggatgcacaaatatgacatgctgtcttgaatatcatgtgaagaattaggagctctgcccctgaaaatcttcaatgtaatacatgcagctcccgttgatcacactctcactacctttgacattcatatttgctccagcaagcagcatgcgcttctttgttgttgcacttcccataaatgcttagtgcagcttgcattgttctctagcaaaaaaaaaaaaaaacataatactattatgctttgcgtgggcatgcacatttagtatgatattttctctcattgacaatctcttaacccaattttgcatttgatactttcttaatgatttcaagtctgaaaatgttgagggctttgtggaacttgaattttctgcaatgtatgtctgatcaaccttggagaacgcatatgtgctactatatattagtgtgttcaccactttatctgaacagcaaagcatctcctccggtgacaatggcgaaaagatgtctgggttcagtctggggagggagatgaggtaggagaccgaggttgcattggtgagataagcagaggcatcaaggttgtatcgagtgaggtgcttggttgacagctgctgtggctacgctgagaatttgagagccaaactggaagtatttgttatgcttgaacttttgtccatggtaagggggaataaaaaagaaaggggatgtgggcatacggatatggcttcttgtcgttggtaaagagggaaatttaattatttgtcactattaggtttgacagttatccaaatacacctattagatttgttcttatttttttgccgctctaagaagatggcctcataactatttgctacattacccatgcggcatgccagcgtggcaatccaagggtgaaaaacattgtgagacccactagtcagtctctccactctccttatcttccttagttgactaggcgacgacaccagacggagaggcctaggtggtggttaaagtggaggtcaatagccgcggcaaacctctctacggcggcaatggagataagtgccccttggagtgccggtacggcaacgggcacgcggcggtcccaaatcggtggcatggtgaagaggcggtaggaccacaccttcgacgacatcatggaggtagattagctagtgtgtcgcttcctcgccctccagtccctcctcctctacacagtgacccccattgcactcgccagtggtggggacggggttgtgttcgtgcctttctcccacctcggcgcactcgtgtagtgccagctccgcctcacgcccctcgacgttggccgcttcctcctacgccggtctgggattgtcgtgagcccgttgcccccacaccaatgcttcgagggcacctgtctcgacaaccgcccgggagagggccgccatagcctcctccactctggccgccgcctggtcaactgggatgaggaagagataaggggattagaaatattgactagtgggttccactccgttttttacatgtgggtaaaagtgtcaaaaagccattttcttagagagaaaaaagagcaaatctaataggggtatttagataattattaaatctaatagtgactgatagttaaatatccttgggaaagaggtaactgtcgagatttcacgaggggtaatatggactgggtctgtagggtaaatcatgtagggtttggtttgagaatgataaagaaatggaggattaaagcttagagttcctatggattcattcactgtagcagcctttgatttgtaggaattggtcataggaaaactgaaggaaatattccttcgttgctgattctatgggagaaacacaggaaacttcctatctagtctgagctcatttttcacttgctttgcgtaggatcgaggcaatcaagctcctaatctctttcttcagagcaggagaacaagcaatgaatggataaaatttgtgttggatgcagtgtatttattagaaatggaaaatgggcctaagttcttaagtaaatatttctgtgtttttcctatacccaattcaaacgcattgtttacattcctctattttacacgtgaattcctattctatttttgtgttttttctattcctgtattttttcaatccaatgtttcaaagagaccctaaattaattaacagatggattctccagactaatt

SEQ ID NO: 26318 - DNA, 10961 bp, Oryza sativa
ttgaacttctacggtctttctcttctccatttgaaccccaattctatcgcctttcttagcatcttttttcatctttgtgaggcctacattggggtagagccctttcttgacctctttcgcttctactacgagttgcgttggatggagtccaacagggtgtctggttgcatcgggttctgacttcgggatggcctgaagtcgcgttatatccccttccagtgcccttcttctcgcagcaaatggaggacgaggtggttctaccttcagatcaaagattcggaccctgtcttcgttgttcccgaggaacaaccggacaagatttcgtcttggaccgcaaagccccctttgaccccctctctccagtcatttatcgacattatcaacgatctctgagtacaaggcttgtcagggtatgaagtcgctgcagacttcattggtaggcggatccagccgctccaggctcgaacccatccagcctttgactattccggaccggaggacgcgacccgggtttctcctcggggtatctttctcgcatttatcctgacatgctcatgttcgcgttcctcttgatttatcgaaatttggttctcgattctcaggtctgaacagcgaagccgtggaacgtcgtgttggccaggtgatgatcagtggtccgacaacggcgagtgccatccccgttcccctttgtgagaaaggggcggccgaacatgatgttgccatcaatgtaagtgtgctcgataggcattctacgttttccttccgagatcacattgtgacttgattacgcataggctcttcctctgactgacatcatcgggctgctcgcggaccatcaggtggtggcgtctttgaaagagaaggtcgccaatgaggcgtctgatgctgctgctgctactactacaagtggtggcaatgttccgacaaaggggaggaagttctcctctgtaagcggacatcgtcgcaaggcatcgacccccttggtaagctatcatgtcgtcagatcgtacagccagaagaatttcgccttacttcgcatcgaccgtttttcaggcctcggacgcgtctcccccgtctccacgacgacaacgccttgtgacggttggtgagaagtaagtagacgaacttaagtttccgtgattttattcgagtgttgtctgaaccatggccgtctcacagggcggcgcgggcgaaggctgcgcaagacgagtccggagggacctccggcgcatcgcccgctgcggcctcgatggatgtcatgctcgcactcgggagccacgaggcgacaccaagcggcccagtcagcgatcccgcggctagccgtggtccaccggctaccgtcctcacctgggagaagctccaggttgagatggggcgcctccttgaggctggtgctcgcggcatcggtcgcgagattgcggaggcgaggtcggcggcgtcgtcggcaaacgagcgggctgatcggctggcacacgagttgtcggaggctcgtgaggacctcaagaagatgagggagttggtggccggcaacgagcgacaatggcaggggctcgagcaccgcatgtcggagctcgggaacaatctgtcagaaatccgtggctcgttgcgggtcgcctatactggtcagcaccagttcgccggggagtgcagtattaagtctactatcccggcgaatcccgacgagttctcgctgacatcttctcttgcggagctggcggcggcgatggaggaaatcccctccaagcatgcggccaggatcggggaggagacatcaaacgggatctacaccggggcgtgccacgtccttgcgtgtgtaaagctggcgcatcctgaactcgatctgcgcgagatcttggatcagggggtggctagcaacacgcataaggaggtgatggaagaagtcggtgatctgggggaatctgttctccccctttttgaagagtagggcctcttgtactcgctagatatgctgtataaaactggatcttaaccgcctttgtgcgagcagttattgttccagcttactcttgtatgttgatcttgaaagcttttttgtcccttgtagagatgttgatgacgaggatatccagcagcgcgggcaacccgagtcaccggcgattattccggccctcacgtttgaaccacatgcgtcgcccgacaatgtagaccagaccattgctacggggacggagatggcgaccacttccttaggttagcggtccattcatcccttttgctcctccgattagatcacctatgttctcagaagaggcgtgtagcctgacttagtcgttcccacactgagcagatctcgagagtgctctcgctggccaagatcgtcgtatccaatattggaagacaaaatttgaagtagcaaaactcgagaggactatgcttgtagtgaagaaagagcaggctgtggaaacgctccgaggtcgtgaggtgtggttcaactcatacttgaagagttgctgcacatccatggacaaggtttgtagagagctccgagtacctcgtggggatcccgaggagtccgtggtcgggtatatctcgtggctgaatggggcctgtgcttaacttgatgacgtcggcaaacgtatcgacgaggccttgaagcaggagtgttgtcgatcaagccgatatgctggggggcacgtgttggcttgcctacgggatcatcgcccgcgcctggacctcgattttctctgtgagggttttgctcgttctcggaggactccggcggagatagaccacctggcgaggttgatggcgccgttggcggagaagatcctccagtctatggattggcgttggccttcttggtagtcttcgtatcctgtgatagatatctcaggaaaaaggtgtaatatagctttggatttgtgtaaaaactgtaagaagtattttgtgaaatagaaaagaaatctatctttaacaaatctttcttacttcggatgtcgtgtgtaagagtgtgttctcagttcgcgactttagtcagtcgtttgagtcgtacactctccctagcccccagccttgtcgtcggaggaattttctcggaggataaggctcttggacctttgacctgccttggttgaataagctctgatcctagcccccagccatgaaattggaaacttaatttccgatttcgcggcttggttaatacgcacggcgagaactcttacatgaccagatcttacatggtctttcgtctctatcgtctctacaggatctgacaaggccttatcggctctgggcgtccccagccgaagatcccttaggttcctcggaggccttgtcgagacggcgtaaagggacatgaggataggtttcaactctaggtgtcatcagggtaagggatcatcgggcggaaacactttgattgtaatatgggcctaagaataggctttattgatactgtaaggtgccttacaggtacggatggtattgactcatacatagaatttatgtagttggtcaatgttccaagaatctgttaactcgcgaccctcgccgtctgcaattttgaatgcgcctggccgcaagacttatgtgatcgtgtatggtccttcccatttgggtgagagcttgtttcgccctgcttggctttgaacccgtcggaggacgtagtcgccgatcgaaagtatgcgtgctcggatgcgcttctcgtggtaacggcggagggcctgttgatagctagttgctcggacggcaactcgttcacgatgttcctcgagtagatttacatcgatgtctcgctgctccacctggtcctcgtcggagtgcttctgtactcgtgtactctgatgtcgtagctcgctggggagcatggcctcggagccgtacacgaggaagaagggtgtttccttattagacgttgtcggtgtggtgcatacggcccatagtactgatgggagttcttcgacccattttttgtcatgtgacatgagcttgtcgtagacacgggttttgatcccttgtagtactatgccattcgccctttcgacttgtccgttgctttgaggatgagagaccgaggcgaagcatatcttgactcctagcccgatgcagtaatcctggaaatcggcgctgatgaactgggagccgttgtcggttatgatgcggtgcggtagtccgtatctacagaatatccccttgatgaatttgatggcgttgtcggcctggatttcccccgtgggtactgcttcgatccacttagtgaatttgtcgatcgccacgaataggaacttgtagccgccctgtcctcgtgggaatggcccgagtatgtctagcccacagcacgagaaaggccaagtaagagggatagtctgaagcgcttgcgcgggtagctttgtgtgtttactgtggaattgacaggcttcacatcgctggaccatgtcgcatgcatctttgagggcggtaggctagaaaaacccttgtcaaaaagcttttccgaccaatgtctgaccggcggcgtgtgacccacaaatgccttcatgtatatcaaggaggaggtgtctgccgtcgtcggacgagacgtatttgagaagtaccccgtttggcgctttcttgtatagatcgttgccgaccatacaatagatttttgctttacgggttattttcttagcctctgtatcgtcctcgggcaactcctcgcttgtgatgaacttgattagtgggatgcgccagtcatctgtggtctcgatatcggcaacggcgtgttctgcctttgtggcctctgagctaatgtcgggggcgttcgggctaactttgccgctaacctcttttactgatggctttatcaggatgtccagaaaagtgccgggctcgagcggttttcgtctggacgcacgtcgtgctaggtcatctggctcgatgttgtctttgcggtagacatgtcggacctcgatcccatcgaaccttttctctagcttcctgacttttgcgagatacttggataactcggggttagaacatttataatctttgtgcacctggtttgcaactagctcggagtcccttttcacgattagtcgcttgaccccaagtgtggctgcagctcttatcccggcgagtagtccctcgtattcggttgtgttattggtcgccctgaagttgaggtggattgcgtgcttgaattgatctccggagggagacgtcaagataaatcctgcccctgctccttggctgttgagtgtgccatcgaacgccattgtccatgttacgttgtcgacttggttgtctgatttgttatcaggcgtagtccaatcggctacgaaatcggcgagtacctgggacttgatggctgttcgtggcacaaagtggacatcaaatttgctcagctcgactacccatttcgcaatgcggccgacaacgtctttgtttctcacaacttcaccgagagaaaaagacgagacaactgtgactctgtgggcttgaaagtagtggcgtagtgtcacgccctgataaattcatcccgaaataaaaatcattttctaaaaggaataatagaattaattaaaattcgaaaagaaattggcaaacactaaaatgcgtacaagaaaaattcgaatgtggcccggagaatttttgttaaattctccttggtctaaaaggagccctcaaattttacttgaattttcagagcaccggaaatgattattaagcaacaaaaacaattatcagagtttattaaaaagaaaaagctaaaaataatcctccttttcctttgggccaagtttggcccaaagtcctccctctctctctctcagcccgcggccaaagtctccctctcctccctctctttccctcctctcccgggcctctcctcctcctcccggcccacctcttccctccccctcccggcccactccctcctcctccttcctcccggcctgcctcggcccagcagcccggcccaagccgcagcgccctcctgccctagtcgcgcgcgcacgtgcgccgcacgcgcgttgagcgcgcctcccgcgtgggtcccgcctgtcaggcgcgcccccaacctccagccgccggcctccttcctctctctcccgtgaaccctagcgccatttcctcctccaaatccgtcctgaatccaaccgttctttccaaattgattggggggaattaatccccattccttcctctttgatttcccccgttttcccccttgaatggctcccccaatcgccgggaacggacgcgccaactccggccaccttccatggccgccggccgtgtttcccgtcgccgttccgccctctcccatgcccggctccctcccctccgctataaaacggaatcccctcgctccgttctatcgttttatccccctcccgcgatctcccgtggtctctagccacctccccgccgtcgtcccctctctcccgtgccgccggccgtcttcagccgcccctgccgccgcgtcagcacgccggccggccgtgccgtcgcctcctccagcgtcgcagccgcctcctcttcgccggcctaccatctgtttcccgcgaagacctccggaagtgcatccccaccggcaacagtggcgttgccgccactgttccgcctccggccgcctctgccgcgtcccttgtgcgccggccgacgtcgccaccacctctcccggcaccggaacgccatcctcttccccggccaagccacggcgtcgcccgtatttcgccggaacgccgtcgcgcgcgccgcctctccctcggtctcgtcggcagcccctttcgccgtgccagtgcgccggccgacgtcgccgtctccacctccggcatcacagcggcaaggtcgccctcggcctcgcctccccttcgaccgaaccgctccgcggtccatcgtcgtcgtctccgttcgttctcctcgtcgacgtcccgtcggtctcccggctcgtcgtctcgctgcgcctccaccgtcatcgtcatcgcagcggcgtgttccacgccgtcctcgtctccgtgcagctgctgctagctgtccctcgtcgcctcctcgccggccccggtcgtcggcgtcgtcgtcctcccgtcgttcccggtcgtcgtggcgttcgtccctccgtcgagccgttctcgtccgtcctcggtgtttcgtcaaggtcgctgcagccccgtcatcgtcttcgtcctcgcctccgcgtcgtcaagcctcgtgccggccgtgtctcgccttcgttcaaggatcgccgccgaagtcgttccctcgccgtccgtctccgccgcgtccgttcgtcgttgtctttcccacgcctcgtcgcgtggtggtaaggatctctcctctcgctgccccgtcctcgtcctttcagtgtcgccccgtacccgttgtgcggttgtcaaccccggtacccgtgtaccggtgtcggtagtcgttcacgtgtgcgggtggtgactgtgtagtgtccgtgttagtgtgcccactcggtagccgcgtggtttccacgtgtgcaggccgtgtggtgtctagtggagtccgtttgtcggccactcgcctcggttgacacacggggtccgcttccgtcgacccgtggaccgtctctatgtactcggtctaccgtggtcctttaggttgacatgtggggtccgcatgtcaacagcgcagccttcctgtcttttccaggctagtgcttccacatgttttatagttgaaaaacctaattataataatccgcaaatctccatataacagcactaaacttcggatgatcatatcttggtcatacgaactctgaatcgacccgttcaagtctcctaatgtttgttataacctaaagaaccgtgtgctttctttttatgtattgttattgcttctttataggcttgtagctttgcttgtgtgcttcgcgtagcttctgtcgttccggaggttctcgaagcgtggtttgcggtcgtcgccgaaggttcggaaggccgttctctttgagcaaggcaagtcacatcatccttgagcatattgaatcccagtttataaaattattttgatttaaattaatgcattaacgctttatttaaattcccgcgttatcactgttttatttagccatgcctatttacctttgttaagacattattattgctattgttattattaccttgttcaccctagaataaacaaaaccccaactagtgggtactctattcatggttccactagtatgaatttaggtagatgcttcgctgattaataggacaacattaggtggtttttataactttagactttgggaatattcatatctcttggatactatggaatggttggcttatggtggaattggacatacccctctcttcctctttcaaagcccctaaaacctgtttttcggtggggtttgggtgcatgccagttgtgggaagtagcaccccggccaatataaggattaagctcgggcctctgttgcaaagcactaccgtacttccacatgtctagtgggtaaggcttagtttgtggctcagtctggttataaacaaaagtacacggatggagatggacgaagtcgggggtcgatggacatctctaggacaaatgaaggctacacgagctgcggctcggtagtcgagatgtcatggcacagggctggtgtcctgctgctaggggctcaatcctgcctgcctgtcccgggggttccggctataggtggggttgggtcggtactcttgtttatggctaggatgggttgggaactatgtcacgtcttccgtccgtataccgtggtggtatgtggcatgtggttacacgtgaggaagatgtgtcttgtgggtaaagatgtacacctctgatcagagtataatctattcgaatagccgcgccctcggttatgggcaagccgagcaatgtacccaagttagtgttttaattcttaaaatttgcttaacaactaaaatgtggaatggttggcctgggttggcttgggacgagctgggacccagggtcgggttgccagttcggtctgaatcatcgtaggccttgggttaaggcaggttcgtgagggttcacggccttgattaataatattgtgtagctctaggatcgtctttataaaatggctttgggcaactaagtgacttttaaatgctgttttctgcaaaacttaacccctatattattaccccttgtacccccttgcattaatcatgcatctgccggtgtggcttgctgagtactgtggttgtactcattcttgctcaatcttcccccccccttcagtaagagaagctttggagaaaaagtcttaggtggaatcctagcttataccccagttgagcgcctgtgaagatggagccgtaggcctgctagtccgctgctgtttatttttgattgtcaggccttaagtgcctttgtaataatgtaaatattatcgatataataaagatgtgccttttgtaccatgtttgtgtggtgtaccccggcttttcctgggacggggattaatacactagcgttcgggaaaatgtatttttctcggtcgcgacacgtagcttccttgatgtcatgatgaccacgtaaagcagcttttggatctgtggatatcttgtctttgcgtcgtggagagcttcgctgacgtaatagactggtcgttgtactttctccctctcgacaacaatgacggtgctaacggaatatggtgtggcggtaatatagaggaataattcttcattaggttggggagcaacaagtacaggggggtttgataggtagcgcttgagtgcaacgaatgcctcttcggcttcctgtgtccatacacatttgtcttgtttcttcagcagagcgaagaaaggttgtcctcgttctcccatcctagcgacgaacctgctcaatgctgccatgcatccggttagcctttgtacttccttgagtcttgtgggcgacttcatgttttcgattgtcttgatcttcttgggatttgcttctattcctctgccagagacgaggaaaccaagcagcttgcccgacggtactccgaacgtgcacttctctggattgagcatgaggcgatatcgtcggaggttgtcgaacgtttcccgcagatcgtcgatcaatgagtcgcctgccttggtcttgacaacgatgtcgtcgacgtatgcctcgacattgttgccgagctggttgctaagtgcgccctggaccgtgcgctggaaggtattccctgcggttatcagtccgaacggcatcttaacatagcaaaataccccgaacggcgtgatgaatgctgtcttctcttcatcctcttttgccatactgatttggtggtagccagagtaagcgtcgagaaaactcaacagctcacagccggctgttgagtccaccagttgatctattcgaggaagagggaagtgatccttggggcatgccttgttgaggtcggtgaagtcgacgcatattctccattttccgttggccttccgcactatgactggattggctagccactctggataaagtatttctctgatgaagccagctttgagaagtttgtcgagctcttctcgtatggcttgttttcggtctggtgcaaatctccgcagtttttgctttactggcttggcatcgggtcgcaccatgagtttgtgctcaatcacctccctggggacccccagcatgtcggatggctgccaagcgaacacgtcagcattgtcgcggaggaaggtgatgagcgcgagctcctatttctcgcttagtgtcgcaccgatcttgacggtcttgttggggttggcactggagagtggaacgatcttgattgcgccgtccggtttcggcgtcttgttcgtcttgctcacttacttgggtggcttagtcgttgcgggtgggctgggtgtttgctcgatcatgtcgaggctccgtttgtcgcactgcaccgccaactttgcgtttcattgaataataattgtgcctttccgccccggcatcttgagcacttgatacgcgtactgagatgcggccataaacttcgcaagtgcagttct

SEQ ID NO: 26319 - DNA, 6276 bp, Oryza sativa
ttcgtcttgctcacttacttgggtggcttagtcgttgcgggtgggctgggtgtttgctcgatcatgtcgaggctccgtttgtcgcactgcaccgccaactttgcgtttccttgaatagtgattgtgcccttcggtcccggcatcttgagcacttgatacgcgtagtgagatgcggccataaacttcgcaagtgcagttctcccgatgatggcgttgtaagctgtatcgaaatcagcgacatcaaaggtgatctcctccgttcggaagttgttggcttggccgaaagtcacaggcaacgtaatcttgcccaatgatctggacgaggattggggagtaattctatgaaaaggttgatcggttggtgtcagcgagttcccatcgcgtccagggtgctgatgaaaagaaggttgattgagctgccaccgtcgatgaggacccgtgcgaccttgatgttccgaatagtgggttcaaccacgatcggatatcgtcctaggatgacggcggtcttggggtggtcttcttccgagattctatcttctgttcagaccacttcatcttgggtgtagccccctgccatgtctaacagacttcgcgttccactttcttgtactctcgtttcgaggagtatgttgtggaacccccgaagatgtgtgaaacgtggaggtcagagtctggatatgctgagtataattcctggggagccgcctccgcgtcctttttaaccacgcgtactcgtttgcctttttcagatgcaatgtgcttctcgagcgattttttgaaaacaaggcaatcttccaaggaaagtttgtccgtcttgtgcatggggcaccatgctttttttgtgtcgctactttgtgggtctgggcgcttgggaggattcacgtattttgctgcgaggacttccgcttgagctttccttttcccatttttgcgatttttcttcttgcttgactcaggtgcgtccgtggccgatttcttctctcccccgatcttcggcttatcgttcttgcgtcttagcgcatcatctgcgtgggcgcatcgctcaacaatctcgaacaatctccgagtggttgtgatgtgtcttgttgctaactcctaggtagtatagcgatctctgacaccggatttgaaggcgcgaattacagaagcgtcggtgattttggagattgtatttctgcactcgttgaagcaccgaacatattccctcaaggattcacccgagttctgtgtcaacgcgtgtaggtcgtctttgatcgcgtggcgcttgtaagttccttggaagttggcgacgagctgttgccacaggtctgcccacgaagagattgagtagggcagaagatgcatcagccacgaacgtgcagagccttttaatgcagttggcaaataattcgccaacgcattgtcgtctgctccggcggcgtagagtactgtggagtagacttgaaggaactcctctgggtcagtgctcccatcgtacttttctattgctccaggtcggaatctctcaggccatcggacatcacgcagggaacgactgaaagccctacacccagcgcggggggcggtgggttgtcggcgatcatgtgtccttcgtggatgtctgtctgatgatgaggaagacgaggatgatgacgatgatgatgggtcgcttggttccggcgtccgattacgaggatatcggcctggatctcgagaatcctgtcgtcgtcccccgctattgtcttggcgccggtctccatcatcgtcgtcgttatggcgacgtcctcgaccagtatcgtctggcacccgccgttcgcgatcgttgtgatcgtggtggttgtggcggttatcacggcctcggtcttcgtttaaacggtcccctcgatcttcgttatcagggcgccgtgaagagacatgacgtcgggaatgattctcgttgtctcgtgtgcgtcgtgcctctcggcggccgttgatgtgatctcggagatcgctagtgccgcgaggtggaagggtagctcgctgaggcgattccctccgttcagggttttcaccattggcatcgccagttggtggctgctctgggtgcgctgcggcagcgacctcttcgaacacgttgctgaggttggtcactgattcccgtagtcgctctgtccaacgcgcgagatcgtcgttcagaatgagattgtagggggtttccctcagtatagagttgacgactctgatgtgctgggctggagtggtcaattgattctccacttctgcattggtgcgtgctgatgtgccgacatcatcgatagccaatacctcccgcggcgcgctcattgtcgatgatccatagtcttcgagaaggtgcaagactgatggttcgtgaggatcgatattgattaccccaacaaatcgatctgaagttggcgtcgctcctcggtccttgtccttattcctgatggggatgtgtgactattggaccttaggggatggcgctttcatggcgctgagaaagaccttgcagtctgagaggtcgtgattctttgtcttgtgaataggacaatagacatcacgagttggagaaatacgctgaattccacgctctttgcaggcgcgaatttcagcgcggacgttgaggaaaacccagcaggcttgcaaagtgtgtttcctggttttgtggataggacaccaggaccttgttgcttcggaagtcatcttcctcggctcgcggttcatgtcggaacgacaaggtttggccgcatcagaacccttctcgagctgggatgtcgtcgatgctccgttctccgcctcggcgggaggatctttcgacatggagtcgccttggtttgtagccactgcattcttgtttccggtcattggcggaccggttgagatcggcatcgtggtgcaaaccgggaagacgatttcgccgacttgagtccataccagcatcgttgaagcagggaatacttggctgaggttggcgttgacgctgttatcgactaggctggatgacatagtagtagaaccttgagtaccaagtccccctacctggcgcgccactgtcgacgggtgatacccgtagaccggatatagagggtattggggtacattggtacaaggatctacgtaatacgacatgaagtagacaaaagacgaggattatactggttcaggccccttggtaggtaatagccctaatctagttgatgtgggattatatggtggaaaacacaggttacaaagggaacaatggaactttagggatccgacgagatcgtggtcgagttggttcgactagatccttggcgatttggctccttgcaggctccgatttcgtaggctgtgagggttgtgttggctccgagattcgatgccccaggttcccctcggggggtcccttttatatcgcaagtcaggcggtgttcaagtagaactcggagataacagaccctatacaatacattgacaacccagtcttgtcgagtaggactctttccatccgtagactccgtgaaggattttcttagtgtacacaggaagtatccgtatgcgcgtaggtataccctaccaatatgtaacatatatcgaaaggtaaagggtatgcctaacccggaacctgcaagaactcgagttacttctgtactccctccgtcccacaatataagggattttgagtttttgattgtaatgtttgatcactcgtcttatttaattttttttttgcaaatataaaaaacgaaaagttgtgcttaaagtactgtagataataaagtaagtcacaaataaaataaataataattttaaaaaaatttgaataagacgagtggtcaaacattacaagtaaaaactcaaaatatcttatattatgggacggatggagtattttcttttggttttttccgagtgaatttgtgggactgtggagtactgtactgagcacttgtatttttgttggttttaaattagtcttttgcccttcggtccgattgaccaaagctgacttgacccagcggtcgtctcctcttcgacctctctctcattctagagtcattgcatagtgacgaaactgcgattcccctgattctttttcattaacagttcaagcacactagtaaaaagccgttcctttggcaatacggcacactcgaatgagtttgatcttgcggtgtttcttcggagttgaaaaaaaaaggtactcctacctcgctaacgttaggcccgagcacgaaagctaaagataaaagcggcgcattggtggtgcttgaattatagtttcttgatataagatgctcctacaaagaaaagaggttgccatggggtctgtgcaatgggccaaaacacaagcaacacatgagcagcatttgtaactgctgctgagttatgcaggcacggtgtgacaaatcagctttgcatgcttattagtcttggtcattagcaaaagtttgatttgatgcttacttaccaggctaccagctagtagattgatatatctagtgatggcgctggcgcaccacggttggcatgcatgacgtagtcatgataccactctccgtttccctctccacatgttcccctttggcggtaatcaccattgtaaaggcaatcattaggaggcaaccccgctgtctttgcttggtgaccgaggtgattaaaaggaagcaaaggcgccacagcgaagaaataatctattccaaacaatacacttgtagtagtagcagcagtagcagtactgttggatcaagccatgcaggtatatcgagcaagtggcaccattgttctgtgtggcaaccgcctggcagcgaacccccaactgctaggtttctgatcccgagacgaatcacatcctcatctctctctctctctctctcgaattttctggcgcgcgaattttaatgcaggggccagagggggcgcaacggcacacagtaacacagtaagagcaagtttaatagtatagctaactactagctttaattcatctatagccaatctaatagctcatctatacaatagttacatactacactattaatatctggtcccacctgtcatacacactgcgtcttggagtccgtgatatagttggctataaatctatagcccgctgctcttctctctctttatttatctttttaaaatatgtttatagctggcttatagcatactattgtacatgctctaatcacgtcgttttaaacccgtgtgcctctgttgttgccacacgcatccccacggagcgcggtcaaagtggcacatcgaacgcgtcagtgtgttgtacggcgcgtgcagccttaaaccgcttggtctcttggctggctgcttttggttgccttgatcgagcagtgcttgcagtagtacagcaagttcacttgtacactacggagtacgcttgggttgctcgagcagcaacgcaccgctgggctggagccggcgaaagtgaccgggcgaaccacaggctcttgcagcggacagatcgatgtgttcctgagaaagcagcagcaaatctttcacgaaaggaggagaaaggcaaagcgcggccggctaggtcggcacagtttaaagccgcgcgcgccacctaaagccatccccagttggcatgggatggcacggcagcgtgtctggagtgggaatatggttcagccgaagaatttgttttcagtttttggtatttaggttatccaaaactgaagatcaaatcatgctatgaaactattaatatttttttggggccagcggcagatgcctcaagtagattttatgtcaagatagaagaagttcagtacatagaactaacaatcattatctgttatgattcaaacgcgtcccaatcgataccaacccattagagtgaattactacatctctctaaaagttatttttagtgaacatcaagtgacatcttagatagcggactagccaacctagccgcagaccatgcccaccattctccatgaattccccgggctattttccacagccgaaaagttgccaatactaattaatttggttttgtagcttggcttggtattttggttgtcatgtaaatgtttgatagctttaggcagggcgaggagggcgtagacattgggggtacggcgggtggcagcttggctcggcctgtggcaggcgacaccgtgggtgattcatgtgggtgtgggtggtcagtgggatatatgggaggactagtcgactatgaatttaggtttattgtatagggtctattgggctaaaggcttgtttagattattgccaaaatcaaccataccaatatttgggggaaaatatgtagtgcaaaccacatatgtagtg

SEQ ID NO: 26320 - DNA, 7027 bp, Oryza sativa
ctatatatgtggtttgcaccgtatattttcccaatatttggcaatgccaaattttaatgtatttggacctaccaaaattcataggagttagatgtattttgtttgaagccttaccaaaactcggttgtatttttagtagtggaagtaatattgatagggtaatattagctaaagtatgatagggcttgcagtagcaacattgtaaacatgccataaatttcggtcaattcagttaatctggttaactgaggtttttttttcaatgcggagaggtatataatcaagttgatcgacctaatttggttagccgaggatacaactgaatttatgaccaagttcttcatcttggtctcagtgtttcggtttggtcaatcagttggctagtggcactggcttgcacatagcttttgtccacccaatgtgtgagcaagccagtgccgctagtgaatcgcgcatagatttccagtgaaaatgtccctccggccaagttctcgccaatgttgtgtgaggagagtatttctaatttatctcgagcgagttgagcttgagactagggttttcaatttcggtaaccatcgaaattttgagaatatcatgaattttggtgtttttccatgaaattatttgaaaatttaacatagtttggctgaattcaaacaaattttgataaactgaaaagtatttgaaaaaaatctgaaacttttggacgtgacatgtgcttgctggtggggtaaaactttttaaaaatttcgaaccgaaatttcaagggaaaattgtaaccatgccattataattttgcaaaatttgagatatgacatcctgacccacatgtcattgactcatgtgggttctacatgtctttaagataccgatggtatatctcaaactttgcaaaattataatcgcatgattccaaattacccaaatttgaaaccctgctcgagatcagtaaggcagtaaagcaccactggcaatggggccgtgctgtccgacggaaagcctagcccatctcaagcccatgaaagcataacaaagccccaaatgatttgacaaacgacaatctcgtcgacaaacgataagaagtcgagccgaaagcaatacaactctgcttcagcctcgtctttaccataccagtttcctatacacaattaactctgcaaccgcgacaggttgactgcctctgtagctgtcctcggctgtctttgggtgaccagaagtctagtttgctttcgcgtgtcaaatcggcatttctgagggattagcacgcggccatgcattgcctttgatcggtcgcctagaatgcaggtgcacatacgcgcacatggacgaggatccactaatgtctaatgatccagcaacgggcagaggcatttggtgttttttgctttatctctcgctccgaatcagagccttcgcacgcgtccatgcatcaaaagaaaagactgcgacgcctactcttagcactgcacaagtgtggaccttagtcggtcgccaacgtaccaggctgccagctagtcactgttacaaggttttgatcacgcacaaagtaatggaaacggtattcaaatgtagacacggactttgtcatctcgccaaacaacattccctgtgcatttttattgttgttgctgctgctaaaggattgaccacattcaaaaataaataaacagccagattctgacaaatgataaccgttaacactggtcaggagtatagtatgtggcgacgtggcgtgcgctctcaggtcattcacagtgcatctagatggcattcagctccaacctcccacatccaagattccataccacacatgcatctcccgtgaccaaatgaaaaatgggaagctaaaatgggtcactcgttcctcgtcagtttttgttaggaggggagaagaaatcttcgctcggaggggagagacagcgaccgagttgggaggggcatgccgggatcgtcgtcgccgacctccgccgctgtcgctcagaccctcgccaaccatcgctgtcggcatattcgttggggagagggagggggagaggtgccgctgccatcgacctgtagctgcctcccgtcttctcccaccagatccatgccggtgagttccatgccgccaagctttgtgccgttccgctccacgccggccggaggttgggggagacgcggtggtcggaggagaagggggagactcgatccgcagtcggatccgttgctgcccgggccacccagcgccgtcgcttatcggggaggtgtggtggccggaggaggaagggggaggtgcggcggcagccagaggaagggggaggctcagcggttggaggaggaagggggtggcgtggcagtcggaggagggggaggcgtggcagcggagatgaggaggggaggcgcgcagagcgagtagtgagggggaggcgcggcactgagaggagagggagagagaaagttttttttgtgtggaccccactcaaggctacatagcactgtgaaatttgtggcaaatattattcttaggtgttcttggggctacgtggcagatgaggttcggcaaaatgtgttgccgcattgctaatgccctcaccatttttgagcttgaatgatgggagcttgaataaagtagacacacctgggagtatgtcacgtctgctagtgttttcaggagaagtacatctaccctaaaaaaaacgagaagtactcctacatctacacggctgacgtggtacaaagtggtgccgatctgacagtaatattgtaacgaggccgaaacagaaaacacctgctataaaagggacttctatgtgacttctggcctggtgtattggctttactgggctgtaatgccgtttgctgggtttctaattcatacaagtacttaagtccaagagggcatggtctgtatatgggctgagcaattcctttccaaaggaataagttcactatagatgtctcaatttgtcacctagcgtgaggctagcatgaaattcgttcgtaaaccaaaatacaagatataacgagttcctcaatttacaaaactgtagcatccgaggtcctagataatattatgcctagttttaactgacatggtatgctaagccagcgtgggatccacgtgggcagcgtgggatccacgtgggccacacatgtcagtgcctagcactttctttctcctcctctcccctccttggagcaagaacatgcccaacccaagacccagaactcatctcctgcctatgcccatgcccactattctcattggatataaaaaaaaaacatacccgttgagtatcggatacccatagattttaaaccacataatgtaatatattaatttatatatatggataatcggaaaaagatcctctgacttaattgtttttttagagaatctgacttaattgttgtacagttgagccactgacatgtgaaccataataaagtgggacccatatgtcagtgactcaactgtatgtgtagttaagtcagaggatctgcttccatttacaatcacatttagatatgtatgtttagccaataagtataaaaccacaaacaatcaataccacaagtcataatcattcacatagtattaaatgcgggtaaaaatccgtaaattccacaattacaaattatttcatcacatagaaagaaagcagttgattaagccattaatagtattggtcatgtcttgatatataagaagtacatcatttgacacaaactcctacaaataacaaaaattaataacatatactatcatgtcatcacaaataatttcacgtattccctcactttggcctccttattttctagctagcaaacaataaatatccattaaacatagtgtatattagtatattatgcattaaacattttttaccgtgctcctaacccaccgcatgatacatctaataaacttgaaaattgtaccaggaatctatctatctatctatctattatattattaaaacaaccttgaaaggtggcaccacgttcgctgtgggggctagaaattcccacattaatcggagaaaaagaaaagaagagtccaaatagaaatacaatcttaaaaaaagctgaaattcggaattaaaagtaagaaatattgaaagaggagtccgtataggaacctaatacgagattaatcaaattcggaagaaaaataaaataaaatccgaaattagcaaaaaaaaaaggagaagagttcgagtaggaatacaattttaaaataactgaaattcggaattaaaaataagaaatattgaaagaagagtacatacaggaatccaatacgagattaattaaaattcaggataaaaaataaaaaaatcaaaattagaaaaaggaaaagaaaagaagagttcaagtaggaatacaatttaaaattaattaaaactaggaattaaatataagcaatattgaaataagagtaaatataagaaccaatagtagattaattaaattcggaataaaaaataaaataaaatctgaaattagaaaaagaaaagtaaaatttcaactaggaatataatctataaataactaaaattgttgataaaaataaagactattgaaagaaaataccatctaaaacacatgacgagattaattaagtaacagatctatataggagcagagtggtggaggttcataggacatctaaaaactattaataaaacgccaaacaaaatactaatgacgattaaaacgaaggacgacgggcaggtcgtgaatcatcggtcaaggcggttggcggggcttctagaaagtaaaaaaataaaacccaatgataatcatatttgatttttaaaatctcaattacaataaaaataagaggcagctggcgggtcgtataggagtacaatggcatagccaccgatggttgtgggtcttctagaaagtaaaaaatgaattccaacgatagttatgtttgagttttacaatcccaatggcaataaggagtatgcggcggatgggtcgtagaggagtatattggcagcgtttgataggatttctattatgaaaaaaaatgaaacccaacgggacaatatactctaaaaactataaggtccaatttttaaaggttcgggcgtctaaaaataaaaaataaaccccaatgataatcatgtttgattttaaaatctcaatgacaataaagaagggcggcagcggacgaaccgcagaggagtacagtgacaaagtcgatgatgttttggcggaacttctataatataaaaaaatgatcctaaacaaaaactatgatatatttttaaataataatgacaataaaaagaagatgcaatggacggtcgtagaggagtataataacagcgtttgtcgagacttctagaaattataaaaaagaagaccaacaggacaataaagtctaaaaagtttttagatccaatttttaaaggttattaggagaatgaatagaaacagtggtagattgagctatataataacgaataatatgatagaagtaaagggtgctgatgtgattttcaaaaactatgaaatttgaaacacaaagataataaggtttggcctttcaaaatcttaagacatcgagataactatttaataatttttaagtaaaatcatattaaaacatatataattttatatgggtgctagccgcgcaattgcgcgggccacccagctagttctgagaacaacgatgaaaaacaacttaccatactatcacctaaatcgatggactcattacttttaatcattagaactatatgtagaaaacttaaaaaataaaaaaccacttactacccctgcccactcgcatgctcatgaggtgcacattgccctgctcctcccctctctagctcatgctctcccctccttccttaggcagagttctttccccaacttttccaacatacttccctcgttttccacgtgcatgcttttcaaactgctaaacagtgcgtttttttgcaaaaacaaatttctatacgaaagttgctttaaaaatcatattaatccattttcaaaaaaagtaaatacttaattaatcatgagaaaatacatcgctctattttgtatgcgcggcaggtgagttcccaacctcacctcccgaacacaaccttaatttagatactaaattaatagagaacaatttccaagctacatatctcattctgtcagggttatggataccacatacccagtagtaaccgactaagcttggcaggacccaccatataccaagtcttatacggaatcatacctcatatatagaaggagtttcggataaggaaggacaagaagagttctatatgaaaactataagggctactcggattgtatccatattggtttccttagttctacttagacaaggggatatctatgtgtataaatataagaccccctaggaggagggggcagaccaacaagacacatcaacatcagagataagcctagatagaccctatccagtgcttgcggaggccaacaacagggatctagcgccatctctaatcttgacgagttcatattcgaggaggaagactaccctgtcgtcaactatgtgttggtgatccatgccgccaagttgacgacagctagataggttatcccaattattatacttgtgtgattctaatgaatatagagcaacaccggcttcggccaacaggagtagggttgttaccttcctatgaaggggtccgaacctgtttaaaatccttgtatccatcctttttatctcaatctcgcatatatcctggtaccaatgatctccataccttgcaaataccgtagtcgatacctaaaacgtcgacacatccctaatctatcgataaaataatgtgaaattttgacagcgtatattgagtcatatatcattctacaaacatacacatctaaattaactagcatggcggcccgcgcagattgcgcggctagcatcattatattttctctcatataatagcatatctgttttctcattatattattaaaatatattacaatgacaacatagttttaaattttgcaataaccttacgaaactactaat

SEQ ID NO: 26321 - DNA, 10327 bp, Oryza sativa
ttagatgccgaatttctattttttttccttaattgtatatctatatggatcccatactctacttctaatattccttatttttaattccgaatttctattatttcctaattttatttctatatggaccgtatactctatttctaatattccttatttttaattccgaatttcaattatttcctaattgtatttctatatggactctagtctcctcttctaatattccttatttttttaatttcgaatttcaacaatttctgaattgtatttctatatggactctagtctcctctaatattctttattttttaattccaaatttcagctatttctaaattgtatttctatatggactctgccttttctttttctctaattaatgtgagaatttctaggtcatgagagcgaacatggaggttcctttttttttccgaattttagttagttttaaattcctatatagactctatactctacttctaatattccttattttttaatttcgaatttctatttttttcttaattgtatttctatatggactctatactctacttctagtattccttatttttaattccgaatttctattatttcctaattgtatttctatctagactctttactctacttataatattccttatttttaattccgaatttcagttatttcctaattttatttctatatggactctggtctcttcttctaatattccttatttttaattccgaatttcagctatttctaaattgtgtttctatatggactctgtattttctttttctccgattaatgtgagaatttctaggccatgatagcgaacgtggaggctcttttttctattcctttaattatataatagattctacaatatcccaacaaaaattacaaattcaaatatgaaataatattttatcgaaggacaacatccctaccctttcatatgatgtgaatcaacataaaagtatgaaacaattcaataacgcatgttaccgcatcatacatagtttttcaaacatttacagctaattagatatagaattaattcaagcatgattagtccaagtcacgacatagaaaatttggtgcctttagttcaaggaaagatccaatcactctatgaattttttgaaatttgctcgagtaatcaagcaagcctaatagtccttatgtcccaaaataagaccaatacagaacatgaaaagactaaaatacccttactacatcaaatcctaatgcaattatgcctctatttttatctatccccaacatatttatcctctagttcaccaacttcgatgtaatgattactaaaattaaacttatttggaaacaaaccggatggcccaaaataaagttattatagaacagagggagtaatcttttacgtaagtcctctaaaatatgttctatgttccaatctttttttttgagaattacacagtacaacacagatactcacaacgcaaacacactcacctctatgaacgcacgcacgcacgcaaaccctacccatatgagcatcttcgaagactaggccggtaaatccttgagattgacgaagtcatcataggcgcttcgctgtcgacgagtacgtctcctactactaaaagcacaactccgttaaatcctggaaaattcgctcgcttctaaataattatctaaacaatgttgttgagcattatttaaaaaaaatcatactttttaataatggcataaataattcggttgattttctacccttataaacgcaggtaaaatacatgcccgagtatttatacgggttacctttatagttaattttaaaaagtaactatcattacagacacatgattatatattataggatttttacataaaactgtgtatttccttaagaaaacgtacaatctaaaatccgtttattccggaagtggcctaaacatatcaggtgcccacctggaagccaccgacgtgacataagtataggaggcagcggcactttccgtcttccctttaccttgcaccttaagtaccagccagatcgaactccaatgcttgatccatgatatggtaaaggcaagcacaccaccactaacacatgacatgatacggattagcttgcaagctacccatcgcgcacgttgcccagacacgacggattcgttctatccaccacactccaaaaccccagacacggaccgagaactcaaaggccaacccaatccaaaccaaccgcggtgcccccactccacccccgcacactgaacacggtacagctgttgccgcaacacgcacggacgctcggtcatgctcaccatcaaattttgccggaagatgcgaaaccaccgagccgacgccgagccctttccgcttaaaagcggcctcgtccttccgccccgaaacaatccgcggtcacatgcaccgcccaactccccaccccacatgccccgcgcccgcgcccgcccgcgcatcgccacggacgcgcaaagcggccgcatgcgcaagcctcacctcgccggcaggtacgccgcgaatgcgcttcgaatcctttagccccattttgattcaaaggaaatttacaggaattttaaaggatttcattcttataggatttttctatatatccctttgaatcaaaggaataaatcccatataatcctatgaaattcttatagaatgcctctttctatgtaagaatcctttgtgtttttcatgcggctcaatcaaacggtcattcctatgtttttcctgtgttttgtatttccctgttttacacttatatttctgtcaaaatcctatgtttttcttattactttggttttttttcattcctactattcaaaaggcacccttagtgtgcatcatggccacgtcgccgtcgtcggttagtagtactacgtaccatcaacactactactatctcgcaatgataaaaagggagggcgggtgtgcgagggggtggagcccatgtcatgcaggggccgtggggagctggggcaacgaacattacttgtcacgggctccagttgacaaaaggcaaacggatcctgctgcccgatcgtgtttttggcgaaaaggagccatgggggccatctcgtccgttttgcgcgctgctcgctcgtcggctcgttcaagagatgaaacctgtctatctatctatcggccatcgcaagcaaagcctctccacttgcaaaaggaactggttagtaggacactgtcatcatcgggaaaatgaccttaaaaagcatgagcctcacgttgctgcactgatgttgacggcactgttgagtcgacaaacaggagagcatagcaagcagaggctgatcagcatttgggaagtaataagatgttactagcagtaaacatcaaggaaaacgttgacatctcccttcgtccaaaggagaccacggagtttgatcgatttcacacgcaaatctgacaggggaacactggtaaattacagaagcatagaatgttttgctactatcgtacggtgggcgcgagcaggcagaaaatcgcagagcaagacagcaacaaggccagtatgagttcactgggcagcaggatcatcatccacgcagcattcagtcacctgcacacagaccagatgacgttttcagtaagaaatcttcagacattgcaggatacagacataaacacgcacgaagtaattggggggagatcaagtagtcgtaccattagttgatcgagaactggccgccgagaagtcagaggatgccattggtatggagatcgacagttgggtgcctgagaatgacgaaagattagcattctcatcagcgaggtctgaccatgaatcccttccctttggccactcatcaaagaagggacgcagcgtctggttctcttgcttcacagaatcgacagccgcatagtcgttcccaaagaacgaaagtggctgcctctgaacctttgaaagtgagctgggggtgttctgaccaaggtcacttagtgcccccagctgagaatagcttgaaaggggaaatggcgagttctgagatggcagcagccgccatggattttcaatagatgtgttgatagcttcagtaatgagttgactctgctcatccgccaaagatcttgtgccataagcagtatacctgaatttgagaagatacagtgattgggaattagtaggaaacacgaatgcaagtgctaggcatgtacctatcgaaaatatgtcaattctaactttttagaacagaattaggaagaaaatattcataagggctcaattgtaagaatgaaataaatccatgtaccggaggaaatgtagttaacctaagtccgacagataaactagaaagaatccaaagcattattatcatacaaaaaaaataaaattaccttttccaaaagttagtattcttgtcatgaattcatataagaaaacatagaaccatggtttaactaatcatatatagcagcagatcatggcccaagaaacattctattttgcagtaaaaccagaagacagtttagttgcagcagcaagtcagctgaaccctaaacagttgatgacaagagcagaaagaaaaaaacaatcaaagactaaggtgaccgaataattcaataactaaactaaaccaaatcaacacgaacaagcactgtagagttatacatttggtgaagtaaataatgaggctaggtactaaggtcagactgagattcaccgaagataaatcaaagagttcctttttttttgtagggaagataaatcaaagagttgcattgttaaaatctaatcatcaacattggatgagtatagagttgacttggagcatcatgcagctcacgctggccactggaaaatgtttcaggtatagtggtgatcggtgagacatcttcagagacagtattttgcaagggccaaataattgactgcccctgaagagcagagacagaaacaactggattctgtggaggaataaagaagtggagtaaatgccaagggaagccatgatcagctaccagcaggcacaagcactgcgagggcagacacaaatatgtagtagtatcatctttatggacagtacatgtttcaaactactgggccaaagccatgttaagaccctgcaccccagtttcacctgagcagaaatctcttatggagactgtccccggcttctggggctgaaaactgataccagaaagtatgggaagggcaaagaggcagcactctggaaacctaaacataacacaaatttttgcagtgcagagagtaaagtttcagactttcagtgattgcagcaccaaatcgaagtagtactactgagcatggacagctgattcgattgccaccaatgcaaacaaatgggacacagttattaaccgatcacaatgaaaaatacagattcataactgcatccacctgacaccaatcagttagagcatggcaccttttttttagacaacggaaggatacatatcatgattcaagacagtgctaaacaagtaaatatggcgtttgattaaaaaaaaagaaatgaacaatcacctgagatctttgcctgttccaccaccaacagctgcataaggggcagcattatccatgtgcagctgagaacccaacgccgagccaaatgagctgggcatgttcctccccccgcccccgccattgctgccggcaatagcagggtaaagagagtggttttggaagctgctgccattggaggcagcagcaaggggcgccgccgcagaaccgacaacagatgagggcggttgggactgggcgaccagctgcgtttccacaggctttcttgaacggttgcggccgcggtgcatgtggcgctcgcagtacttggaatccggcgcggcctccttcgagcaccgccatttcttgccgtccgtacgccggcaccgccctggctctgggtccagcttcttgccgaagtacggaccatatccaactgtacaaaaacaggcacatcgtagcaaccgtgttacacacaagaatgcatttgttggtaatgcattttgagttcctaatagaatggcatttgaatatttgagaagtccatatccgatccatatgcagggcatagttatctgttcttagcaatcgctcaaaaatggcgagcaaaaaaacagtttgccagggtgttggttcacagagaaaatggcttatcccatgggcatactgataaacaaaagattttatttcagacaagagcgtgtgcacgtcctctatcagatcaaacagagacagaatgatgggcaaacttccccccccccccccccaaaaaaaaaaaatgatgcgctaatcgtgaagcgagcacgagttttggatttaaaaacaagcctttttattaccaaatccggaggatagcataaaaacacacacgcatgtttcttgaatcgcgtaacccggattaacaaatgacccggagccaattaacaaatggaagcaaagtacgcctgatcggaataaacaaagaagccgacactaaacaagcatccaaaagcaatgcagcgatggtagaggagaggcaagaaataggaacacgacgtacgggcgggatggttgtagaagcgggcggcgagggagtcgagtccgcggcggatggggagcacgagatccggcgggacgggcacgcctgccaccaggtacttgtatatgagcgcctgctgctccagctcctcgtactgcgccgcggtgaacggcggcagcctcgccgccgccgccggcggccacctcgcggtcatcggcgcgtcctcccccatcgcgacgccaccaccgcccctgcacccacccacccacacacaacgtctcaccgtgttgtcacatgcaccactggagccaagaaaatgggttgtagccgcgggttcgcgttgcttacgcggagagcggggtggagcggcagaaggggaggagggaggcggtcgcggctgccggggacgagcggtggtcggccaccgccggagacagggaggcatacggcatcgccatcccttccctctctctctctcaatctctctctcgctctcgctcgctcgcaacgcaagcacacgccgcggtctttagtaatggtgctttgcttcgctcgctcgcgcgcgcgcctttattgcgcggcttgtctctctctctctctctctctctctctctcccgctgcgcctgcgagctctcgaccaggggcgaggagtcgcggacgtcgagcccgacacgagaaggcgcgctccgacccgagctagacgacaaacacctgcctccccccgggcctgtcgacctagcggacgtagcggcgtggtacgagcagtagcatttccattttctcctctctctctctctctctctctctcgttatctcgtggcgtagtacgtacagcaccgatttttcttcgagtacagtgcgaggctgcgtttgtgtttggtttgctgtatttttatttggaaaatgggggaatggatggatagatggatatacatgcagagacgctgtagtgggcagcgcgagtagtgacaagtattgcgtggggggagagaggatgggggaggggggtggaggggactgtcgatttgggctgttccattgttgcggttcccaacgccggagcaataaaaaggcgatgagaggatgacggagcaaccgtcgcagttgcttttcgacctgccatttttttgctactgttagtctgctgctccaacatcttcttgcgtctacatagagcgtgtgcatcggacatcttgaaggaaaataaaaagagttttgaattcagggtgtgtttagttcacgctaaaattagaagtttggttgaaattgaaagatgtgatggaaaagttaaaagtttatatgtaggaaagttttaatgtgataaaaaagctgtaagtttgaaggaaaagtttgaaactaaacttagcctcggtactactccatagagatcgaagacatgcaaccgtaggtcaatgaaataaatatatgctcatgcactgttgccatcgataatttagttgtatgcatagaaattacattttatccatggcaattttggaacaaagtatttttaactaaaattttataggatcgaaattctataggatttttttttctgttgagtcctttcctccactttttagagaattcaaacctaacctcaaacctcatgatttaatttcctttgaagggcttatttggtttataggattttcaaattataagaataaaaattgcaaggagttaggtggtcacatgcactctagttcttataatttttttcaagtatgtcttacctcgtactaaaaatcctacaaaataagaaacttagaatgctaaaaaaagtgcttaaccatctcaagtgcttgtatatacgtatacagactcaatttatatgtatagatttaatagtattgtatgtcaaacgatgcagtcaagattacaagatataatttggaaattctgattttgggttatacgatgaacaatataaaacgggagagcagtagtaatagtagtttgtttcagtttgcttgccatgaggcaattaatcactaccaggtttcgagttcacaataatggtgtggtacttctctgttttattcgacgttggaatacctcaaaacagtgtactaatatactattactacctctgtcccatattacttgtcttcttgagtttttgtttataatttttgatcattcgtcttatttaaaaaattttggaattattaattattttgtttgtcaattgctttattatcaaaatactttccatatgacttatctttttttatatttgcactaatttttcaaataaaacgaatggaaacgtccactatactaggacggagggagtactattactactacagtaccacaagatcagtaacatgtggagctggattgacgtactataatgcagatgcagattttttattaatattatttggtgtgggttatctgggttttagttcttccagtaacattttccaaagactaatcggataaactgcggttgataaatcgtaaaaaataaattgcaaataaaaaaattatatctataatactagtggtttgaaaaccggctgcaagaaaaactacgatgaaaagaaaacttagaataaacactttaagttctaaaacttaaattaggccttgcgtagtttccaattttttttctcaaaaacattacatcgaatctttggacacatgcatggagcactaaatatagataaaatgaaaaactaattgcacagtttgtatgaaaatcgcgagacgaacctttcgaacctaattagtcgatgattagccataagtgctacagtaacccacatgtgctaatgtcggatttattaggcttaataaattcgtctcgcggtttccagtcgagttatgaaattagttttttcattcatgtccgaaaaccccttccgacatccagtcaaacgtctgatgtgacacccaaaattttctttttcgcgaactaaacaaggccttataagccaataagtaaattgttagacctatgttcaacgaattgactagtttattagtggtcgaactgtatggagactcatgtccattaatgcatttaccattttggtcgatttgttttaccttcaatcaacgtataaactgataaaaaaggcgaggcacctgaatttttttcaaaaatcgggcgctgttccatcaagtagaccggaattgtttcattaaatagattgaaaacgtttcaattgtttaaaaagcttaaactcaaccaaaccacctcatggaacattttacttcaaagtatgaaacaaacggtttccaaaaaatcaggtgttgttttaccatatataaaataatgtttcagcaaatagcaaaaggatattttaattcactgcaacatttgatctatacatagtgaaacatcacgagtacacttgatgaaatattgttggtgaaacaaaagttgaaatgatccccttaatagagcgtttccataatacgtgggtgatttgttgcaacgacgcatgtggtggggcgtgtggtggggatggcgcggaggtgcaggaagcagcgggtgcccgatttttctggcgttgatcgggagcccgattactagcattttcctagaaaaggcagcggatagttctcttgcccctaaagtaaccaatataaatgtaacctagtataggtgtgacgtactgacctatcctaagaatatgaatctggacatcctagaatatatcacatatgtattaggttgcagttatattaggacgaagggaataataggaatatcctagggtatgtctgatttcgtactctatcgaaatattggtagtgccaaaatttaggtaagttttggcagtggcactgccaactctttcgttgggtaaa

SEQ ID NO: 26322 - DNA, 7773 bp, Oryza sativa
  unsure (1)..(7773): unsure at all n locations
tcccttatattataggacggagggagtaacacatagttgctgagattataatcgaagaagagcaaatcttaagtttagatagcaaacgtttacacgtttttcgatatctaggctatccaaaatctttttttttgggacaatacccacggcagtccctcaaatttattccaaggtcaatttattagtcctttagttccattttgttcagacataccctttaggtttgtcatacagttcaatatggttcttagtcccaacaaaagtgccatgtggacataagcccataccctaaatcttatgtaagatatatagtgaaaagtgtctagctttacggttataccacataaaaaacaacaataaattttccatgctttttggcctgatcaaaggaatcgatatgtacataaatttgaatatattatttacatttgatgactaaagaagtaatagattttgagtatatatatgcaagcgaagtgtgtagataattttgtgtggtattagtaaggataaattacacattcagatatagattttgtataagatgatattgttgagatatcgttttaagtgcagggttgaaagactgtattagaccttaagacatgtttttattaaaaaattttactgaacgaaacttttgagnccnaacattcaataagccattaaattttggacaactacttcaatgtattaattaagtcttagagctgattcgaaaatttgtcacttatttagcactatcaaaattagagatggatcatccgaaaaacttaantggggttattcgctccctcttttaattttagagagctccacctgtcatacacacatgtatcttggagtccatgctgcaactgtctacaaatctgtagtccgcagcttttctctgtcctcttttatctccgtgaaatatgtttatagctggcttatagtctggtggtgtacctgctcttattgtgctggtaagctagtaaactaacttttgatgacacggtgaaaattgcagccgaccgtaggcgttactattgatcttgctctaataacccaatgtaataagggggtggggcttatagcccctctctcccaaacaccccctaacacaaccggctgggactcctcacaatttgttcggacgctgtattagagcaagtctaatattaccgtccactactaactccattcatctgtagtcaatctaatagccattttatacagtagttgcttactatattatttatatatggtcccacctgtcatacatacagtgtgtcttagagtccgtgctgcagctggctacagatctatagtccgctgctcttctctcttattatttatctcgttaaaatatgtttatagttcgctaatagactgctattataactgctcttacgttccaaccgttacaggtatcatcaatgcgcattgtgttttttctcacctgcccaagatcgcatcctgcaaagagcaagagcaactgcccaactggcaagagctcagtgtagccagtagtactaccaggtgctcctggaaaaaatgttgaatttgggttcattaattagcgaacagactagccagacaacctgctgccctgctctcaagtttctatatgggcagttaatggcctttcaaaaagcgtactacctctatttcaaaataagtatagtagtaagaattcatatccaacgtttaaccgtccatcttatttaaaaaacttataaaaaatttaaaaattaatcacacataaaatactagtcatatcttataataataataataataataataataataataataataataataataaataattttaaataagagtacacttggttagtttttctcccccggcgccagcttgagtgacaggcacagcggcactgttacaatattgccgcgacagtgccaactcagactgtgtttacgtcaaaattaaaaatttaattaaaaaaactagaatattaggaaatgatctaatatcaaataattaggaggggtgaggctttaaacccaggtcgtctagcccaccaccttgtggagctagccggaagacccctgggcatttctcaaaaaaaaatttaattaaaattaaaagttttaaaaaaagttaaaagtttatatgtgtagaaaagttttgatgcgatagaaaaattgaaagtttaaagaaaaagttagtaactaaacgagcactcacatgacaaaatgcgtagccccggaggacgtttaacgtgcttccaccgtagagatgccgggccacggagacgagcacgacgacgacgtcacgcggaaccgcgagcggcgcgactttttctggccgaatccatgtgggagtcgccgtgacgacgacccgcgccgcgcgagcccttgccagagtcgccgcgccaccgcatcgagtaattcgttttctttctcttggaaacgtgcgtttccctgaacacgaagctggatttgtttttgctccccatgctgtactccggggtgatcacagaatcgcaagaacggacgtcagcacgctggtgcagcgccggactgcatgaagatgaaggactagtaaaaaaacatcaactcccagattattttgggttgaatttgcatgcctgtgttgcccgtgtactcctagtatgttcctaccaggacctcgccggtgtcagctttgacgaggaaacggaaaaagaaaaacaaaaagaaacaggtaggaacagtgcatgcatgcgacccagctggatcgctcggcaccacccagatatcttttgtgcagaggggaggaagggaaaagtaccccacgcacgaaaagaaaaaaaaaatctaagtactgtaccactgtgatgcacagacggccaaaagttttctctcgcagcctccctcgcgccgtttcaccgagcaggcaaggtatcaaaccaatcgacggagcaggccagcaggggccagggggagcagcacagtagcggaagctagcggatcggagcagcagtaacggtgtaggggcacagtagcgaagcgttgcaaccgtgtcgcatgcatgcgccgctgctgcagcgagccgcgcgacggcgaggtcgccgttgacgccgcatgcatctattgctgctcgtcgagttggcaatggcatatggcatcggttggggctttgcaggacaggtggtgcacgtgatggggagggaggaggcatgcttccctatattagcccagctacgggggcgcaggcgctagagtaggatgccaatgtcacgtcacgcccgctagctatagctgcaactgcgtctgcgtctgcgtctgcatgcctacgcttttctctgctccatccatcgtgacactgtgtttcctcagggggagagtagtacctctacctgcaactgctagatgcgtgatgggccgatgcgccgcagagatataaaggagcacttggcttttcttccccctggccaagacgggtcccgtccgtcgatcgatccatttcttacggtccaagctcgttcacatgaagtactagcctggatttattatatttacttaaaaaaaactagcaaaagtgcccgtacgttgcaccggacgattacgaagtgtgtacagtgaaaaaaagcgttgtttggtttagacatttaatatggtaaaaaagaattgtttgtttttaaataaataatatgctttatatttgcggaatatacatgatgtttagtttggatgatttttagcatgggagaaaatggatggacgaacaatgcacatgtagataaaaatagattatttagttggagttagtacatttttttaagaaaaaattcccgtgcgttacaacaggaaagatttagaaaaacaaatgaaatttggaattaaaaataaaagaaatattgaaagatgggtttagagtttacatagaaataaaatttagaaataatagaaattataaattatactggatgagaagtctagaatattctccaaaagagggtagagtacatataggaatacaatttagaaaaagaattgaaattcaaaataaaaaagaatattttttgaaaataaacagtcataaacaattaaaatggtattaatgctatttctgaaaattacaaaaatacttaaaatcaataagagagaaaaaactgatttaagcccgacccaatagagcggccttctgtgcttcgcacgtgcggtcggccccataggttggcccaatagcgcggcgacctaaaacgtcgctcggcccgacgtgggagaagcatggaccgtccgatctgatgaacagtctcgattgatcctaacctagataaatacccgtaaccctaaccttaaccctaaaatctctctctctctctcgatcccctaacacgctctctctctctttctttctcgtaaagcaatggcgccggcggcgactattccaacaggcgatgatggcagcggccttccccaccgagcagcggcgacgaagcttctcggtgacgtgttggcacatcagatccccaccatagcgtcggtcatcggttcagaatctagccccccgagttcgcaacctccattgcagcgaggtggcgagaagcagcacgtgatggcctcatcttgtggtaatatttttgatgttctttgatttcgatttatatttggactgtgattttgtttttaattggattgtgatgatttcaatttttagataatatttaactattcattttattcaattgtgtaaataagcaaaagtataagtcatactaaaaatatctttaatgataaaaccctaacaatcgagccgagtcggtcgagctggcggggcccacgcgagtagataaggatctatctagatccatccagtcgccgcccctcccattctcgcccagccctccaccccttncgccccttcccccagttgcctccttcgttcgccgctctctcagccggccggccggctacttccctccccatccatcccccctctcctagccggccggccgtttccctccggcgagcagaccacttctcctcccactctctctccacttctcccccctctctctgcggcggcggcgggaggggcggcatggaggcggctgtggcccggcgggggcaagaggggcgggccagacctcgcttccgccagatccagcggcatggaggtgcggctgcggttcggtggggcgggagaggcgacgtcgtcgtctctctctctctctctctgttcatggtggggaggtgcggcggcggtggcggcggacgtcggccgccacctcgcctccgccagatccagcggcatggaggctgctgcggtccggcggggcaggagaggcggcggcggcgtctctttctctctctctctctctgttcatggtggggaggtgcggcggtggtggcggcggacgtcggccggacctcgcctccgccagatccggcggcatggaggcggttgcggtctggcggggcgggagaggcggcggcgtcctctctctctctctctgttcatggtggagaggtgcggcggcggtggcggcagacgtcatggaggtagtgggacggacggtgtggaggcaggcggccgggcctcgcctccaccagatccggtggctgcggccgggcggtggcgggaggggcagcgggccggacctcgcctccgccagatccggtggcatggaggcggctgtggtccgacaggggtgggagaggccgcggcatcgtctctctctgtgtgcatggtggcggtggaggttgatgtgttcttggttgaatgttttgttctgtgtgttattgatggaatgtttcatgtgtgttttggatgaatttcgactgggatttttcttgggggcagggggcgaacgaaaaatccctgcatttggttgtgattttgggaattgattcccttgtatccgggatttgatttgattttgtgagtttttttccttgtatccgattctgagagggattggagggatggggattcgggggctgcgggcgaaggcgcaccgcgagggacgaaggtgaccttcgtccgacttgtgacgaccggaaaaatccaaatatttatattagttatagatatactcccacatactagtataacaacttgtaagggggtgtttagattcaggggtgtaaagttttagtgtgtcacatcgaatattatatatggtgtcgcatgaggtgttcgggcaataataaaaaaaactaattacagaatctgtccgtaaactatgagacgaatttattaagcctaagtaatccgtcattaacaaatgtttactgcatcaccacattatcaaatcaaggagcaaatagacttaaaagattcgtctcgcaaattagtcgcaatctgtacaattagttttttaacctatatttaatacttcatacatgtgttccaacgtccgaggtgacatagtgtaaaatttttggcagggatctaaacatgcctttaagttctaacatttaaaatttataccaaaatataacatttttttagcctacaactcttctcaaccaagccattcaccatttaaaattttcacttaaatccttttctcaagcaatcataatctttcccaattcaattccaccaactttcttaatacccttgtccaaactaaaactttttacatctcaggacagagatggtatttcacaaatatattgctaaaaaacttattctagacgccagtaacctagtgtcaacattcatcgccacaacaccaacgatgctagcaacgataacctaatctctctagcaacgataacctaatctctctagcaacaaagatgcagaggggtcagtcctagcacagaggatgtatttataaaatattttttttgaaaagggttaaatgtaatttattttttacaaatatatcctcggtgccaaagaggttggcactgaggactatttgtaagaaaaacattattatccgtttcaagataagtttatttttcatctatcctggacatactaatacaaaactaaaaagactagaatacctccttttatcgaattccaatataactattccttactttatatactatcaatacgtcctagttttcacaaactctaattcaataattactctaataatgattttgaaacaagtgagatgtgctaaaaatgaacttattgcagtacggaggaagtacattttaagccttttttgtttttttacaaataggcccctgacatcagtgtctttagcaccgacccctttcacatcagcaattagctaccatgggagagggtcgcaacgacgtcattagctcttagacatttaaccttgacacaatgatcctatcaccaagaaaaagatttatttctgaattaagtattttcataaatccatttatataagaagtttttaaaaagaccaaaatattttttaaaaaaagttctagaagtaatactattttttatccccatccaaactcccccttaacttgagagtgacatatgccatactgacccatcattcagtaactcggatgagaattgtgttctctataaggatgactaactattaaaaaaaatcactggcttcgccactctcatgttaagggggagtttagatggggctaaaaaaatttagtccctgtcacataagatgtttgacactaattagaagtattaaatgtaaactaatgacaaaacccatttcataaccctggattaattcgcgagacgaatctattgagcctaattaatccatgattagcctatgtgatgctacaatatacgttctctaattatagattaattaggcttaaaaaattatctagtagattagctcttatttatgc

SEQ ID NO: 26323 - DNA, 687 bp, Oryza sativa
caatgtattgtatagggtctattatctctaagttctacttggaaaccgcctgacctgcgatataaaagggaccccgcgaggaggacctggggcatcgaatgtcggagccaacataaccctcacagcctacgaagtcggagcctgcaaggagccaaatcgccgaggatctagtcgaaccaactagaccatgatctcgccggatccctcaagttccattgttccctttataacctgtgttttccaccatataatcccacatcaactggattagggctattacctaccaaggggcctgaaccagtataatcctcgtcttttgtctacttgatgtcgtattacgtagatccttataccaacgtaccccaataccctctatatccggtctacgggtatcacctgtcgacaagttccataaacaagcgttgtagtactaattttggaacagccgacattgccgggatgtcgccttccaacaccaaaaccgccaccgtcctcgctgccagtctcggcggaaacacacgtccccgacacccacgctgccgcgaccttcttcccaggcgcgacgttggcgtcgcccgcgcgcacgcgcatggcccgagcccgacaacacaagttggcgggttgccaaatgccaccgcgaccgcgagggtggcgaagccggccgctagccacaagccaactgccaac

SEQ ID NO: 26324 - DNA, 2239 bp, Oryza sativa
ctccgtcgatcatcgatagagcaacgtgtcgacgcctgcagcagcgtcggcggcggtcgacaccctgcctctgccgctaaacccgaacgttagctgcctgaatgctcccctccccttcggcaaccgcacagaggccaacggaaccggactcatggaccttgccgggacgccgttcgccttctccgggaggaacacgctgatggccgtcggctgcagcaagcataaccacctgcgccaccgcgtgccagggcagctcagacgccatcgctagccactcctgcagctcacgacctgagcttagactaggcaatcggtaacaacagcagcgaggaagcaacaagaggcagcagcaagcttgctccaccggataaatgcaaggcgaatgcttcgactcgctcggggagagggctgtctctgcaattgccgcagggctttgagggaatccttacctggatgtcgggtgccaaggtaagcgccttcttttcagacatttgcattgcaccttcagatatatagatactcctacttgtttccggagctggaagaggaagaccatgcatggaaagaacctgcaaactcaatagtattatatataagatgtcaacgagatgtactttcgtagtagaaatctaggaaggctaaacatgaaaaggaatctatttcaggggaatcacatgtaaatcaattttaaggtgtgcagtaaatcctagattttgtttagcttgtgctatatcttatctactacctactacctaggcgaataagcaatggaaaatccaggattcagattaatgctgttctatgctaccagttatgctatgataattcaactgattgcccttcactgtctttacagtggcaacttgtcccagctggactaaaggacctcatgtagttactaaatatctccagttttttcagcataactcttctgaagttttgatctttcatgaaactaatgttaaattatccatgttattactagacatcaattagtaccaacttccgccacaaaacaaggattacccttgcaccttcacacagtactgcaacaacactccaggaggatttcagtgctcttgcccatcgagcatgattgataatggttacaggtcagggacgggatgcactcccttggttttagttccacctccacctagtcctggtacttcctgtatatcctgtttgcaactttgttcaactacatttgtcaaagtcaagtcatttacagataatagggtatatcatacttactaagaacttattaacctagtcctggtgtttactgtacatcatacacagtaagcacttatgatgcacttctacaaataatagtgtcgagtctaagtgatattgcatttctgtttacagtaagcacttctacaaaaaatagtgtcgagtcttgtgatattgtattcctgtttacgcttacacatttgttatgttatttaaacaaagaaaaaaaaactccacaacacttcagagatagaaattattttcaatgcatgacatcaaggctatcagtattaacaacgaggatcaattatatatctattaggcttgtcaaagttgcataaaaaaaggaattgtagtatctagaaataaaattgtcagtgaaattcagctagttctaacgaaaagatcgatgacatgcctatcaacattcaacagacacatcctgtccttatccttattccaagttactggcattattttgattacacttgcgtctagattatcgccagttctgactgtctgcacatatatattctcaaaaagatatctcaattaaaaacagttaggcttagaaatagtactctccacatgattaattaaatagctttgattaggcatgacctacagcatcaggaagctaaaatatgttgattggttcctcttgatgcaggttcccccttgcaacgacaaccccaaggtttgacatatcctccaaatctattaattgtgcatacaatttagcatttgatggcagccttcaggtcgaagttttcttttggcaactatttttctaggacctaaagcatgccacagggcataagtggagatggcatgactaaggggaatggctgccaaacgggtcgaaagaacttccccatcactatggtaactcatcagcttctggagtgctacctttatttttaacctaaaaaaactacagattctgaacaaacagttgaaaaaaacataatatctacataagctattgaatgcaaatcgtttt

SEQ ID NO: 26325 - DNA, 42488 bp, Oryza sativa
  unsure (1)..(42488): unsure at all n locations
tattgattctcaacttaaaaatgcatatcgaggataatgatatttcaatcagtgataatcatcataaaaacaagtaatcaacacacaagtgaaggttttacttattgttggtttattgctctagaagagacataaacatcgtgagatattggagtgaacaacaaatggaaaaaagattagctgaaacagggccagtatcatttaccatgggatgtccatggacagcattatagtgttatccatgtcaatatcattatggcctaaatttgacttctaatccgcaaaaatttgctcctgatagttctccttgctaagaaattggctatcattgccatccaggatgctgtctcctcagctttctcaactccttttcacacatcaagttcaattgcaacttctacatcctcggctgtcttcccctttagcctcgagcatttcaaaaccaactgaatgtcagcattaacatgcctaattccagcttccttaaccactgcactatcgataatatccaatattgattctgctgggcaagtgaagtaaaacgtgagcacatatttcccccttctgcctgtgataaagttataaggctctttccccttggtaattnttngtanaagnncaaggctttttcaaaaaaccccaaaaaggggggaaaaccccccaaccccaatttggtgaaaaaaaaaaagaggccctttttggggtttttaaaaccccccgggcgaaaaaattttttttttttactcttatccgttaacaggcttgtttcaaagcgctcaggatctaagtgtcctaatgtcccttggcccttgcactagggttgtcagttgttggccaacttgacaccccgttggaggactggtacatttgtagctagatgaagacaagagagtgctgatgcagtttcagttgctatccataaacgatgctcccatgaaatcagtgtcaacttgttattgtgacgggtacgggataccatagaaggtgctggtacttctagttttttggatggagctttcagctttggttcagttttttgaccaagcaacccttcttcttatcctacagcatgtgacgtcaatttatcatctatttcatggagcaaacttgcatagttgcatagagtaccatagaaactgaccgacggcacaggcacagttctgaacgagacgaactactactcattattaaaagggttaagacgacaactggtggactcatgggcctcgagtgcagatggccggcccaatacccatcaatactttccatttaaaaaaaaccaaaagtgcagcagaaaaataaataaaacataaactggacattccctcaaaaaaaaaaaaagacataaactggacatggcataaaaccaccggttggaacgatctgacctctagggtttttgaagatcctcgccgtcgccgccatgtatgggaactccggcgagggccccccgtgaggcggccggacaccttccctgcatcctccaggacgcggttagcagagtctccaccgcccagatcctccactcgtccggctacaccgcggcggagccagccgccctccgcgccctctccgacatcgccgggcgctacgttgcctccctgggccgcgcggcctcggccatcgccgaggcccgcggccgcacggagcccaacctcgcggacctcaccctcgcgctcgaggaccacgcgctcggcgggttccccggcgcgtccgaccccgcccgccccgtcctccgtccggcgcgctctcggagctcgctggcttcgtccgcgtggtgcgggaggtgccgttcccgaagcccgtgccgcggaggggaggggccccacgcggcaaggcgtgggagagcttcgcggcggcggggaaggagcctccgccgaagcacgtgccgcggtggctcccgcgctttcccgacaagccggagccggagcccgaaccaaaggcggcgtacgacgaggcgacggcgaggtgggaggcgcgcgttcgccacgaggaggaggcgaatgcagaagaagcggtggtattgaagccgagcgttgatggcggcggggagcgcaggggagtagtaccggagaagagggggaaagtgagcttccgcgtgcgggcggagaggaagaagcggcgggtgggattggaccagcagtgaggcggtggcttcgaacggttcgcggagaatcgagaaaaatccgcggcaatagtgcgggcggcgagcaaccaccgctcggccgtggccgtggagaatggagatggacgacacgccgcggcgttgcccggtgacccctgtccagtcgaggggttgaagaagacttgacgagttttgggctctgcctgggccacacgtggcgcctataggctactagcccacgagccacctgccgtcgtggctgaactggccgaaaaggtcaagtgtgtgggtgattgtacaagttataattgagttgccacagtttatcacaaattttggctttagtttgttcacgcggtgaatttgtggcgtagagctggtggtttcaaatttcacagtactctgcttgatatactaaaagatcaatttcttgttttttgaggacgtctgagatcaaatccacatgtatccctgaagactccctcggcgattcattcgatcatccctcctgagtcctgccttggattcgtgatttctcgtgggttcctcaccgtgagattcatcattttcatcttcagatcttgacttgtggagacgatgaactgggtaaccgagattcccatccattaaacaagaagaatcccttgttgaaattaaagcaggaactgagacaaagatgcaaggaggaaaggcaacagttcagagtgctttttgacatcaacgggatacagagaaaaactacattgttaacatcaactggtgtaatagttatgatatattacatcgaattgctacacatgcttataaacagaacatacagtcgaagaaactattaattctttggacagtaaataacaggcaaatctgaatataactgaggggattatacatgacatcagagaaactatgaactattgactatgagatgaatgcataagattagctaaatagacatcctaaaatgctgaagttagtactttacaggagacagctatgccaaaagccatttttatagtcaccaacactgttgctctgcaaagaatttcccctccatggagtcattggctcaactactgtgtgagaaccaagaagcactcgtgatgagagcctaaagggtctcaacctccagttagaaatatacaggtgctgttgatctttacatgtcatgtcaccactgctaattagttatcagctgttcccaagttatattgaagtaaccatgccatttgctctttactgactgtagcccaaatgactgaaaagcccgcatcttcgattagctgggaatgtacacgaaacttgcaggtccaaggctagcaaatcaacaccagatacatttaacatcacagttgacgcctatgaaggatctcgcaaggcaggactagccattctaacacggtgagcaacagccaggggcggcctgccaacagcttccagtatcctagtaaaggcaaccttcgcagggacacatgtgacaagtggaattccccctggtttgatcaagccgccaaaaatgccactctgcttatgtgcttttgcttgaccacctactccatgatgcttttttccagggaaatggaagagagggttcggaccttctggcttgacaggcttgcttttttggattgcttcttttgagatttagaggctgacggccccctaacatttgagatgcttttcttatcaaccttaacctgatgatttgaatttgagtactttctaaaatctgaatttgagtactttctaaaatctggtttcatctcccagtctggatatgcaagggtaccttcatcatcacaatccaatgcccctgaggggttagatcggggaattctttgcatggcagtcctcctgcctgtacaccaagcaggttgccctccagttctcccttccaaactaacatcaccacaaaaaaccaggtggtcagtggaaccatcttcaagtatttcaatttgaacaggatgcccaacaattgctttgccattcagtctgctcattaaggaaacaagaggaacatgctctccctggtagctagcctggaccttcaagtcaacatcaaacaacattgggcccctgccacgaagacgtgaactgtacttttggtagaatgagggtccgctccaatatgcattccgatcaaaatgaaatatcttatctgaatccctgtttaggggagaaaccttggaagaatcatttccatagtcgttaaaatagctgtagcttcggctaaaatctcttgtagccttcaaacatgaagaatatgttctaccatggtacaagttaacctctgaatgacctgtgtcctcaaaaaaatctgtttcttcggaatcgtaattgacctcttcgttttggtaaaaattttgccccagcaattgctgattgggaatttgcatactcccttctctgggatttctaccatttattttatacggagatccttccatgaaaccatctgatttgtctaaccagggatttccatctgccatatccgatctcttaggtgcattacggctattacgtttacctttcatatgccattgggagacgcccaactcagaagagccatcctcttctgattcattcacttgacacatataagaagaataggtcagctcatcagcatcagcatcaatattcgcatgcctgaacttgtcagaagctggtaagaaataaggatcatgggcatgtgatgctggatgcagaatcaaatccgaacctgcccaaaagatcaccacagtgatcaaacaagccaaaatcccaaactcaaaataaaacaagagcatagccatgaaaccatagacagaactgatgaaagcttagctagagctaaacagaaacaaaaacaaaggtacacttaagataatttgagggattatctaaatcatttggctatctcctttttcttggaccaggtcacacctcgattccaaatttggcaggattcattgtacatacccaacataagctcagataagtccttattgtcatataagttcagaataatagaatggctgctaatctgtcttataatatactgtacacaactaaaacttcacaacaaagtaagtttggttaaacccaaacggtgttgttttgttgtctcacaacctacatattgtttgagtcattgtcggttcaaaactttttaaaaaaaaagggtccagaaatgtttgggcacctaaaaaacaaatcaagagtgagcatatttgattactttgatgctatactgtaagatataaattgtttgaaccttatgcaacaacaataatatggtaacatttttcgcaatgtgaacccacgtgtgtacaagtaaaaattgaaagaagtattagcatggtgtgaacacatacattgtaaaagttcagcgtcatcttctgtctcactctcagagcattccctctctgaagactcatatatgtgcttctcaagaagatcagaagatgtctgctcctcagaaaaagcaggatgatgaagataactttcagtctcaaaatcacctcctgtagaagccacttgtacggaaggtaaatcactatgactatgagtttcaccagaatcagtaggtaggaatacatatctacttcttttagctcggtaattggcaggtgatcgatccatttctccctgagttaggacatccccatagccatcattgtgctgtgactgatgaggcaattttggactgctgtgcaaaatctgaaccagaggttggcgtctgtcacatttttcaatagattcatcaaaatcacttccatctgatctaatcttttccgcagttgtgattttctccttgctatccaaattttctccggcctgtatatgcctcacatgcgagatgtctcccaagtgattgccaaaaagattatcagaaatgccccgagtaggagaatcttgaaagtttctctttgagccagcatggaggacatattgctcagcttccttttttatatcagaagaagcagttatgcccttccgtttcttactctttttgctcttgtagcgggtacttccaagatctttgttatgtttagagcaaactgcatttcacaaagataattgaggttttatatccaacatactcccttgaagatcatgcaaacaatttagtcaacaatgaaggaagctaaatcaaactttgccaataaatgggcttaccagaaacgttagcaggtctggaaccttgagtctgatgctttgatgcaagcagcttcttctccaattcaagagcatgaagaatagcatcttctctacgtgcatacttctctcttttcttaacagaagtcccttcagtagcctctgccttctcaatacatgcatcaaactccccacacctaaatgctttgacgcgctttgatttttcaatgttgtaccagtcgctatggataagaaaagacaagtacataagtttcagaattcaaaatatacataggcaatcatgtaaccaaacaaacaatataaatgcatagtgtgactattaattcatgagaaaatagtgcaggtaaaatagaatcagaatgatttctaaaaggcaaggcaaacatttcaccaatttacataaagtcaaagttatttcccaaagaaccaccatctgtttggtttccacatagcaaacatgcaaatttctctacagaaccaaaatgctgaacatagcaactgtatagcaacctcaggaataaggaagcaatcttataatcctcctagtttattttcagttcttcaagaccaaacatggtcacactgaataccatgaaaacacatgtttagcttattgttttttttttacaaggaacagtttgcaggttatcagttgcagaaatttcactacacattttatattattatacattacagatataagttctttttcttttttctcagaatttaaacatcgaggcacattaaaaaaaactgacatggagctaaactacaaaaatagaccattttatgcacacagctatacacagattgcctctcgccttcttccgtccaagtttcaaacaactaaattactgaacaggaaaattgcatagcatctcaaatgcactagaggcagcaactaaccaaaaaaattacctagccatcagcaacagaagtagaaacttggaaacagatggaaaataagggaatcagaactcacacactggcatcctcacgggcgagaagcttgaccggcgtgccggaccttggcgacatgatctgcgacggcggcagctcgtcgggccccagaatcctgccgggccaccatgacccgttcctccgccgcacccacacaatggtccccggcgaggtatccccaacgccgcagcaggccacctccccgtctcctcctcccccctccgagcaccccgccatccctcccccggccaccaaaccaagccctaaccgccgcctcgcctcgcctcgccttgcctcaccccgcttctagaagcttccctccctctcgagatctaccctccattcaaatcacggagggcgcctgcatctagaagccctctcctccgcgctcgctagatcgccctgcccctcgcgctcgctcagcgccccccccccccggcagcttctagaagcttctcagcgaggatcccaaggagagccgccgccgccgcctcctcaccccccttccccctccttctcctcctcctcctccacctccgcgaggcagggcccctccggcggcgccgctggttcgctgccgccgaggcggtcgccggaatatttttttccctcctctttctacgacagaaaagggtgggaaattaaagggcaaataaaaggattattttcttttttcctttcgggtagtagttttgttcttggttcccggtggtccgttctgcaagagagagagagagagagagagagaggcaacggaacggaaggtaaccgacgagtcgaaccaccgaagcccggaaggaggaggactgcgtggcgtaaaacatgagccggaatcgaatccaaggggcgcggacggcgcacgttacgggagcgcgggggggagtccatggcttccatgtgacggagtcgcgtctcgcctgcgggttttccgttctcgggcttgattggcacatgtacgcgaacaccgtgcggctgtacgcctgtacgtaagcacgcttaacgggtgtgagttttgagggacatatagctacataccacttttaagacgtggtaattaattatttatcactcatatagctatatgggctctcatgtgtccatgacatgtaggtccaatgataaataatttattccgagttttgatgatggcatatgggcatgtctaccaaatgttccggaaatatttgaatgtgtgtcaatggattttaatctagcatgtatagtacgttaaatattgtacaattataaaaaaatatttatttgaagttaatattgccaattaaattttaggggtagagtagtagatgtacactgaaattaaattaaacaacaacacacagagtagattctaagtctatcgtagttatagctggatagaaacactgggattgttgttttttaaaaaaatagttacattggatgggcaagggaagaggaaaatggaaaaaatatgatatgtgaaggataagggtaacattgatattgtaagtaaaattggttacgatatggttttacataacatcaacaatcagattcccataaaaatatgttagagacaatagataaaaagccacatgttgtttcggaagaaaaaaaagataaaaagcgacatgtatttttttatgtagggaaagatgtctgtcaactatcatggatcctaatacctagtgtgccttatgagttatggtggtcattacactctaaaaatctaaggataaatggggatcaagaaggtgcaatcgcgaacgatgatgtactcaagtagctacaccactttcgcactgcaaactcaacttgagcgttatggttgtagaatgaacacaaagttgtcccgcttaatggaatttagaatgctgatagattggtcatcgttggagctctaatccagaagctgcaataattcttagttatgcaaattggcgatggaaaaataacattattttgccatgatatatggttaactgcatctttattggcggaacactaccttgcactatacttgcatgcaacatctaaacacatcatagcaggtacgtccatgagacaatgactttgctcatctataatctccatgttatcatctatggcaattgactaatagtcgtaggctcttagctctaactagaaattgtagatgtgcgcatgagtcgtaacaaaggatgatgatgagacacaatgtgccacatgatgctcccatccctctaaatttatttactacaaatgtagggtgacaatagaggagtgacctaactagttagcgatttatatgggataataaggcggcgccaaaaataaccttcttgtatggttaatgtcaaaggagcatctccctatacaataaatctatctattccacaacaaaaatgacaaatacaaacaagttggatggtaaataagagtcttagcatgagataaatcttatctctactcaattcaggtttgtccaataaaatgaatttatctattcttaaaaaaaatgacaaatgcaaacaagtcagatggcacatagtcatttttcactgtaaaacattttccctgtaaaacaccggcccatgggacgatttaattggaatggcccatataaatggcccataagttgcagaataaattccattaggcccatatggcaaatactcagacgcttggtcgtcgagccagcctgctcccaacttttgggctgcttcctgcacattcctcacatgcgcaagccctaaagcccataaagcccagcgcaagccctaaagccagcaacggctaatttctcccctcctcatcgctgcgcactagccgttgcgacttgcgagttgcgatcgccgccgccgcccacctcccatgtcccatcggccatcgcttcctacaaatacgctcccctgtcgagaccctaaaccccacaaagcaagcatcgcatctctcttcttctccccccctcctcgccgcctctcccctctcgtcgatccgacgcgcttgggggagtcgacgctttctcttctcgcttgctaatcaaagctctcgcataattcccgtctctgtttcgttaatttccgcttgtttcatttaattacatagtcttcttagcgtgttgatttttctgtttgatcctgtgattgatctagtttacttctagtgatctttattgctgctggtattactgctgtttgtttccttgttatttgcgtgcttgtgctcttctgtttctgctaaccatggacgcaggctcccactcgatctcgtcggagaagagccacggactcgcgccgcggccgccgctccaggaggccggctcccgcccgtacatgccatcgctgagcactgcctcgcgcaacccgtcggccaagtgctacgtgagtccttggtttccccccgtccatgcgtgcgtatagactgttcgacgaaatgcctgaccgggtattgtgctgcgcgtgctctgcagggggataggttcataccggacaggtcggcgatggacatggacatggcgcactacctgctcacggagcccaagaaggacaaggagaacgcggcggcgtccccgtccaaggaggtgtaccggaggctgctcgccgagaagctgctcaacaaccggacacggatcctcgccttccggaacaagccaccggagcccgagaacgtctctgccgcggatactgcttctacccaccaggccaagccggccaagcagcggcgctacattccccaggtaacgcacgagctttgatgttccttcctttacattgatgcaacgatgtgggattgtgattactgatgcggctttgaaaccgatgtagtctgccgagaggactctggatgcaccggacctcgtcgacgattactatctcaacctgctggactggggaagcaagaacgtgctgtccattgcgctgggcgacacggtgtacctgtgggacgcctcgagcggatccacatctgagctcgtgaccgtggacgaggacagcggcccgatcaccagcgtcagctgggctcctgacggccagcatgtcgccgttggcctcaactcttccgacatccagctctgggacaccagctccaaccgactggttagtacattgttcggtatcctataatatttcgtgtcctaattcttgcttgatcagtacatgaatcagattgttctttctctgcagcttagaactctgagaggtgtgcacgaatcaagagtcggttcactcgcatggaacaacaacatcctgaccactggcggtatggacggcaacatcgtgaacaatgacgtaagaatcaggaaccatgtcgtgcagacataccaggggcacagccaggaggtgtgcgggctcaagtggtctggttcagggcagcagctggccagtggtggcaacgacaaccttcttcacatttgggatgtgtccatggcatcgtccgtcccatctgcaggccgcaaccagtggctgcacaggctcgaggatcacacggccgctgtgaaagcgcttgcatggtgcccattccagagcaacctgcttgcaactggaggtggtggtagcgaccggtgcatcaagttctggaacacacacaccggtgcatgcttgaactctgtcgataccggatcgcaggtgtgcgctcttctatggaacaaaaatgagagagagcttctgagttcacacggattcacgcagaaccagctgacattgtggaagtacccgtcgatggttaagatggctgaactcactggccatacttcccgtgtccttttcatggctcaggtgagtttcttcttgattagtagttttgcagtcactgcctataagttaatctgttatttgctgatcgtcttactgtgattgaactacagagtcctgatggttgcacagtagcatcggctgctgcagatgagaccctgcggttctggaatgtgtttggtagtcctgaagcccccaagcctgcagccaaggcttcccacactgggatgttcaacagcttcaaccatctcagataaggatgaaccaggtgaacaaattcgtctatttgatctggtcctttggacagcttaaaaatgatcgtgctggtatatttctagaactcgtatttattcctcgattgtttaaccatgttgagcctcaggctttggttattgatcttttgctcactgattttccttttgcaatgctcttgcagattgagatggccttggcacaataggctgtgcaagaagagcattgcagtgcttctcatgataatgatccaatcgtttcggttagtgtcattgctccctagttagcacttaacacaaatgcatagtacggtgtaaatgatctttgtttgtttcgtttgctagctttcaaacggaagatcgcaagtgagatttggcttcatcgatatcttcatctttgattggtagatactatcttcgacttcaagttcacaaagagcaccaaaaagaacctggaaatgtgcaaaaccttatcacttatcggggaatgaaatgctgagttggtgacttgagataggaatatatacttctggcaatttagttagttattctgtacattatctaaaaaaaagttagttcttctgtagagcatatgtaaagcacacacatagtatctaaaaaaattgatcttgttttaattgcgccaaaagatcaatttttgaagaatcttttggtggaaacatcaaatgatcggtttgatgtaacaaaacaagaggtgtagttcaaatatttatgtacgttcttcctccgtttcatatcatactattcaaaactagtcgtttgaccttttttagtcaaattttatctagtttgatcaatttttcaatacaaaacaaacatatttgtagtagtagtatttttgttagttcatccagagtacggacacatttgaccaaggttctaacttctcttaacagatagtagcacttgcattttttgttcatctgaagcagtagtagggctgaggtgccgtagtagggtataacaatattggaaatttgattgaaattggaacgatgtgatggaaaagttaaaagttttgatgtgtaagaaagtttttatgtgatgtaaaaattgaaagtttgaaaaaaaattaaaagtttaaagaaaaagttggtaactaatctagaccacagtagaagggaaccatgaggacaaacaaaggaacagtgatttccacccatgtggcccgccaaatcggagcgggcaggattagattttaattccacccctcccttgtcgcgttatgcctctccctcacagactcgcatccggtatccgccttctccgacccgagcgcggtgccaggctagccagttcgccactaccgcacggcgcggcgcggcgtatggtggtaaaaaacaatacgatgacacagtagtggagagcacgagagattccgtgtgcccccgcggccgcgtgcaccagctcaccgtctgacttgctgcttcgccgccacccaacagccagacccgcccggccgggctaattctcggatccccttccgcgccaacgacacgcgcgcgcccggatgcatgtgaccaccgccatcaacgctccgccgcgcggacgcacgtacgttagctcatctgctcttgtggagtggggtttggctacgacgacgacgacggcctcctcggttaatctgctgtgatgctgctccatatgtacgtgtacgcttcacgatcctgtgttcgcttgcggtgatttggtttgaggctaattgccaacgaacgcaggctctggctaactactaacctaggaacatggaatgatgcttgctggactagagatagtactagcatatatatacaggtactggtggttgcggatgttgtctgttggcgtccacacagaacattacaagagatgagggtagtagcttagctaggtgtttgatgagacgatgatcagagctgtggcatctacagttagtaagtgctatttatgtgcacacaagtacactgttccggggagtatggagaaattgagccttcgataattggtgtcacaagctccgatcagaagtgataatttgttcgatggcatcagctccctcgctttaagcatacgattctatctccaaaactgaaacctaagtatgcgattctcttggatggggaagaagtttacttgcttaaaggggggataattaaagtgggaaccggaacaaagacaaacgaaacgtgggctcctcgaatctacatgcaaggaagagagaatcttatgctgaccaaagtaccaaaccatctctctctccctggctagctgtagtagagtagtaccgagtaccgtcacttgaaccacctaacacctaccgccgtttactgtcgcaggcatcggattccagcaggattactttggctatgcatacacaatttcatgtcttatcatcagctattcaccgtgggaattttattccaggttcccaattttggcttacacaccgatcgggccaaacgtgtgcactgatcctcacagcgatggactcgcaaattgcaaccgtgccgtcaccgtcgtcacagtttagacagcggctccatcgaccacaagataatccatccacttacgcaggcacctttctctgacgaccaacacaaattgcgtctcgtctgcatatctgtcgcggcagcgactgccatagtgccatcactcgcgggcgtcacgactccacactttacaaaaccagcacagttatcgcggttattacgtgcgataaacttctcagcttttaaaatcacgatatatctcatggtaaccgtgtagttacagtgatagttgttaaactgtgaggtggtggtaaccccaacccaaaacgatttagagaaaccgacgactcacgccgatgcatgccatgcctgcatgaacggcggcggcgatcgatcgggccggggaggaattgaaggctaagggagaaaaaaaaaaggagtattggaggggtggggcggcggtcacaaccaagttggcgcaaatattcctcccgggcgaggccaaggcaaagccacgcgacatctccccgcgtctctctcgccggccgccggccggccccaccgcatcgccccggctagctagcttagctatggctctcgatctcaccaccaccctttcgctctccgccccccggctgctacttgcctgccgccggaatattcttatattctcccccggcaaaacggaaggctaagtacaaccgcagctcgctgtcgaataaacgaccaaagagcgcatcgcgtattcgcgtgcgaattccatcggcacgaacgcgcgatacgcatggagagatggggttgatcaggccgctgttgctttcatcgatcgaggaaaaaagtaacgggattctctctcgtcctttgggttgagtttttttcacctggcaatgccacggcgcatatgcggttgaattgttcttggcatcatcgggtgtaaccgtgtaacaaccgatcgatggtcgtcgatagagcgcccggccggcgatgctgcggcatcgtgatcattgaccggtgaggtgacacctaatcaccggtagtagtactactattctttatgcaaaatctatacgtactcctcctagtaatgatcagagtatcagaccggacagaccagacagcttctctggccgacgaccgaaacgcagcggcacacatgaacacatggcaggggccgctcttgtcggggcgcgaggcgtccacgtggcgccccctcccacatgcccttcgttgtcctgttcccccccgctcgaaggacgctagtacgtgcacaccgctcgatccgacggcagcggcgccggcggcccgtccacgcggcgcgccgcggttgacccgcgttgcctctcggcacaaggctcccctgagattccggccgcgcgcgcgggcgcgcacacatgagctcatgatgtgaacgtgatgatggtgcgcggtgcggcgcgacacgcgacgcgatatgctttctctctcctcctcttcttttggctccgcctcgcgcgccactctcccgcccaggcgcctctctctctctctctagtttctcgcaccacctgcctacatatcgccacagccgctgtcgtcgtctcgtctctgtgtgtgtgtctccatcagacgccggccatatagctagcgagaccggcacattcccatcgggaatccgcctcgggcttcgccgcaatcccacgctaactcacgccgcaccagattcacgctcccagctacaaactcccagccgcgcgccggccgcacgcgcgtgcgcacagctagcgatcgatcgtgatcgtgaccgcggccgggttgactgccgctcgacgagcgcacacatcgatcagccggccggacgaggagattgtcagatcgtctcggctcgtcgacggattggccatcatgttcgaggggatggagagggcgggctacggcgtcggcgtcggcggcgcgggggcggtgggagccggggtggtgctgtcgcgggaccccaagccgcggctgcggtggacgcccgacctgcacgagcgcttcgtcgaggccgtcaccaagctcggcgggcctgacagtaagtaccaactccatgactccatctccgaacaccttgcaccatgtcagtatatgtcaccatgcccatgcttcgatctttctctgtgctacatgcgtccaaactccaaacacaatcgagctgctggagctgtaggccagcagaatttattagctgtgatgaatggaacagtgaaggaaattaaatcctgttcttgtttgcttgcttgtttaattggagcctttaattgtctaacagcgaaaaagaagcatgtccatgaaccatcatgagagatgccacagtgatccgtatatatgatcatgctgatcatcactcatcatcctcatctcataccattttggggccatgcatagttacatctgcatagtcctgtactgctttgtgacagcaactttatgctttggggttataatttcgttttccatttgactgtgtttggacagaggcaacccccaagtcggtgttgagactgatgggcatgaaaggtctcaccttgtaccacctcaagagccatcttcaggtctgatcatcttttttttactggtttttcttttgctttatttgcttcttttgatctaccacctacgatgctaatatgtgcttcttggcgacatctttttattgatccacagaaatataggcttggaaagcagaacaagaaagatacaggcctagaagccagcagaggaggtacatgcttttgtaaatactaaatacttctcactaagtactagtaacaaagatgtttttaaaaatgataaacccatcacgcatgattcatttctgtttcttctaaaccttacatttttcatgctctttgacagcatttgctgcacatggcatcagttttgcctctgctgcacctcctaccatcccatcggctgaaaataacaatgcagggtaagttagcagtcatcaccatgcttaattccagcttatgccaagttgattgcagtaagggcaatctaattttgactctgtcgcgtcgaaagcaacgccttcaagatcatgaagaggtgtatccgtgcaggactaacagcatctttttagttggcagggggggtacgagataggctttgtatatagagcgattggtcgtactatttgcgatttgtaaatacggtacaagtcatctactcttacagaagtaaatgcggtgcttaatttatagaggaaaacggtataggctgctaatgatttggaagattaggttgtgtgaaagggacactgtgtgctaaccgtctgcagatcaggtcaggtgttaactggtctgttgcgaaaatggaattttgtagtcatgttacatggtactagttccacaaaataacataaaaaaacagctaataagcagcacaaattgagtattcaggaatcggtctgtctctatactctgtcgaagcattattatacagtatactataaaaaatttgccgacagaattgcattaattcacttgaaacaaaaagaaaacaattgatcgcaatcttgcatctaatgcaatcactttctgaagtactaatccattttagaaaaaacaataagtattgtttgttttatgctttggatgagacgagcaattattcagtttggttttcaatgtcgcattcggattggcttataatttcttgaacaattttgtcatgattcagagaaacgccactggccgatgcgctgcggtatcaaattgaagtccaacggaaactgcacgaacagcttgaggttagattgccaatgcatcacccattagcttccctgcttgaatcgtagtgtagctcagaacacaaaaactaacaggtcaatgtgttgctccacgtacaggttcagaagaagcttcaaatgcgaattgaggcccaagggaaatacctgcagacgatactggagaaagcccagaacaacctctcctatgatgcaactggaactgcaaacctcgaagcaaccagaacgcagcttacagatttcaacctggctctttcaggattcatgaacaatgtttcacaagtgtgtgaacagaacaatggagagctagcgaaagcgatatctgaagacaatctcagaactaccaatctaggctttcagctctaccatggaattcaggattccgacgatgtcaagtgttctcaagatgagggcttactgctgctagatttgaatatcaaaggaggaggatatgaccatctgtcctccaatgccatgcgaggcggcgaatccggtctgaagattagtcagcacaggaggtaaagattcagtagaatggcgaccatctgtagtttaaattaagagttacctttgtcctatgagaaattcttttgtggcgatattgagggtgcttaagtacagtgttggtccagagtgtactaatgtaaaatttgtggggtaaaggctctgaataatcgtagctaatcaatcatgtctagatctgaatatcagaatatatacactgtatgagtattcgtacctgcactctaaacgactaaagcaaaagcattatcaagtcttgcaacagtccaaccacgttgaacttctggtcattttgtagtagaaaagaatccttcgtggtatcattttggagtaagcacaccacatcagatgatcagagcaatcaacggcaagcattttgccattttactacaggggaaggtctgactgaacattggtgtagtgcagctacaaccaagatgtgcagcagaaaactacatctgaaactgaaaggatggaactggagcttctgaattctgaaacagagctccagcattactgaggtaatttatatcatttgggtgctaaaaccagcagttagtgcagggttcaaatggatagtagcacatgtgaaattgaccaaacagataacaggacgcaaaatgattggtttccaactttccagcgaacagaacaaaatgcaccaagaatgatgcagtctacgctaaactgaataatcaatgtattaacccacaaacagtggctatcttatggtagggagttcaatagcataattccatgcacacatgaatccggatcacgagaaatcatgtcaactcgtgaacataagaacattgttatttgatactatttctcatgtatgttcctaacttcctatctactactgcggtagcacagatcaacagcaactcgtgtttcttggtaacaactgcagagctgagcaggacacaagccgccgtaagatttcttcagtgataatcgagcggggcagggatatccttgagatccatcccctgaaaatgaacatcctgcatgcacatcacaagcaaaagaacaatccagtcatcacaagccgtacacaaagcccacagcaaacttaggaattcacacgcacgtaccgacgcgaagtggttgacgtcgcggtggtgtgcctcgtcggcgcggacgacgacgacgacgtccttgagcgtggcgccggcggggaggcgccagtagtcgatggcgatcggcggcgcggggacgttctcgatcttgccggcctcgatgtccttgaggtactcggtgtaggagtggatggcctcctcctcgaggtagccgacgacgcggtgcgcgagcttgggggacaggaggtagccgaggaagtaggcgttgaagaagacgccctggacggcgagcacgagcgcgcgctcgtaccacctcggcttggccacctccatgaaggtcatgaggtgcatccgctcgttctcggcctcctccagcagcgcgcggatccagccgccgctgtgctcgaagcggcggagcgaccggaggtgcagcagcatgccgcccaccatccccggcaccgccgccaccgtctccagcatcatcgcgcggcacccgtacctcctctgcaaaatcgttccattgattcccatccatttcgatcagcaaaatagattggcatgatctttgatggaaaattagttgtggttggttacctggaagaagatgtcagtgggcacgcgcagcgccttgacggtccagtaggcgaccttgtcgagcagcaccttcggctcgtggtgcttcttcaggtcgatcgtcgtgtccggcgagtacgtctcccatggctgcaaattagcaaacacattaattcatcgacgcagttacacaaattgaattcagattagttaaattaacagcaaaaaagagaggaagcgatctttaagcaggatcatggataaatcgattcttactctgaagcaagaccacttccactcgacgccgtccttgctcgcgagcttcgacgcctcgatgccccagtagctgctcgccacgggactcgcagtcgcactggccggcccttccttggcggccttcgtcgcctccgccttcgcggcggcggtgctcccggtgttctccttggacgcggccgtctcctccttcgccgcggcggcggaggtggacagaagtcgcgcccacaaggccacgccccctccgccggcgccggctaacggaggccgctgcgcatgcgcatgcgcagccgcagaggtcgagctggagactcgggggcagaggtggcggaggaggactgatccagcagcgcgggagcccatcgccggagatcgtggagacgctgctctgctcttcgctgaggtgtgcgtgttgatgctctgttcgtggctgcagacgtgccggtttctggagggggctagcttcagcgtgcagatccacgtgtcggcgatttcgttcgttgctgcttcttcggatatacgaggctgttcattttttaaaaaatatatttaaccgtttattttattaaaaaaatttaagtaattattattcttttccaatcagttgattcattattaaatatacttttatttatatttttatttatatatatagttttacatatagttttatatattttgtaaaagtttttaaataaaacggacggttaaatatatttaaaaaaaatcaacgacatcaaatattatttgggcacgaagagagtattatactgggaaaaggagttcatggtggctgctaagcggcaagctgatagcatcatagcagtggactggtctttcgtccacttctttcttcgtattttctgtggactatatagttgctttctgtgtagaaataaaaaacgtgtggctgcgcacaatgatcaggtgacatcgatcagttatgtacgcggagatgattaaagcgtataacatgcgacatctaggagtagctacgaaaatattagaaaaaaaatatggggactaagttttttttcttttggcataaggttcaattctttctcattttttagcaaaatggcatcctaattacatatataaagcatatccactaatcagtctatttttttaagaaatccaataaaattctaacaaccacggtaaccttttgacatccacaatataccataagaatgagtcataagatattatgactagtcatatacattatgggcactagccataagacattaaatgttaaaactagccataagcttacggctcaaccttaagaaataaaataataagataaaatacactaaagagtatgaaaatagattatggtatggtaggacctaccttaaaatataatttgtttacatagatgtgagacacatcttaacatctattcttgtcttcaatattatagtcatggatatatggtatgatgggacctaaattattttcaccaagaccttaagcattgctgttgcccttaatatgggaggagatatcctgttttttcatattaaataattatagaaaaaaatagtttaacatgtaacatattacaacacaagcacataaattaaaatacgatatgcaacaaaatgaacaaattaaactacaattagttaacatatattcataattattttttaatttatataagttaaatttaactttacatgtttatcaagtgatccagcacaaataatatatatttttaatttttcataactatttggataacatataaacaatgagggaaatagttttgtttccaattgaatattaatattagtgcaccacctttttaaatcctaaatgaaaaaggtaaaaaaaacacaaattgaaagtttacaacacatgtaactaaggtgccatgattcctgtaaaaaaaatgccttaatgcaatacatgacaagcacgggattgcatgagcagcaataagatgtgaagacgaggtttgaactcacagtcttcattcaaaacaaagaaagagctttgaactcatggaaaaatttctccaaaattccaacagaatagtgcttccgttgattttcagtggatttcgttggattaaattctttttgttgcaacgtatacatgattctgcaggacttcttttttctccctatagttggactgcaatccaaattgtccattttccagttccagggcctaactgatttctgggcgtcctacggaaccaacggctcgtccggcgcggcgggcgggcgaatcacgccgatctccgggagatccgggttaacggagaacctcagccaccgcttcttctccacgaacctcagcgccggctgcagcacgagccccatggccaccgcgccgaggctcaccaccgccaccttcagcgtggacagcgcgagcaccacggcgatcagcgccgtcggcggcaccagcatcgccacgcacccggctgtgcccagcggcaccctgtatgggcgcgccgcgtcggggcgcctcacccggtgcaggatgaaggcgacgaactcgaggagcatgccgaagcagtagaggaagttctcggccgccacgatctcctggaagctcatcatcgagagcagcagcacgccggaggccgagaagaggatgcccgccagcggcgtgccgtaccgcgaccgcgccgcgaagaaggacgggagcatgccccgctccgccatgcccagcagctggtacgagtcgctgctcatctccgccacgaacatgcccatgttcgacagcgccgccgccgactgcacccaccacatcagccacgcgccgccgagcagcttcgcgatgtccgcgaagtagccgtctgtccactgccccctgtccagcggcacggctcccgtcccggcgaggagagggtacaggtaggcgaccaccacgaagatgaccgcgtagaacagcgccttgggcagcgtcttgccgggattcttcacctcgccggccaacgtgctgatcgaatcccagtagttgaggttccagaacagagtgttcaggtacagattccaatcgacgttgtggaggtcgatcacgagccacctcgccggccggagcttggggagcgcgatgagccccatgacgaaaaaagggaggagggagaagacgccaaggcagatcgccacccatccgacgacggtgagcccccggtaattcagcaatgtcagcacggccgtcaggccgacgacggcgaacgccctcggcgcgcctccgccgagcgccgggacgccggacttgaggtagtccaagaagaggacggggtagagcgcgttgtcgatgacgccgctcaaccacttcatccacccttgctggaacccccagtacgggccgagcgccgacgccacccacacgacgtacccgccgttctccgggaacatggcgcccagctccgccgtgatcagcgcctccgggatgctccagatgacggggaggaccaagaagccgatgatggcgagcagcggcccggccgcgcccacgctgtcctcgatcccgaacggcccgccggacacctcgtagaagatgaggaagatgagcgggatcatcgaaaccgtgcgtgccgacgacggcattggcccgccggcgtcgccgtcggggaggcccctgtactccgtgccgcactcgcccatcggagcggcaccgttcgccggttgggcgctctcgacggtgggcttctgcatgtcggagaagagaagaataattggttatctatacgaaagcattagcagaagagatgtattgttgagttgtagtaggcaactactcgagttcaacaaggagacccgcctgcaaaaaacacaagaaaaacacaatgacaagaacaaaccatgtgcatgtagccacatagtatgtttagacaaaaattcttgacgaaaccaggcgttttgtcagtacgaacgaagatgtaataccgaatcaaacaccaaccattggcccaccgtgtaatcttgattgtgaagaagggcaagaactcaccaccagaagaagctgcttaatccttcaatattctaatttggtagtctcaccggagggttcccatctcaagatcgtgatggacccgaaagaacagctagaacctgaagagggattggctcctttgctccgctctctttagcatctttcagaaataaggtacttgctgcatcttcgacgaagacatcctgcattcctactacgtatcatcaagctatcaaccaagcccgcaagtggatttgtttggtgaagcagcggcggctcacagagagctgagagaggtggtgccatgcggcgttcggccggtgacacctgttgcggcagagacggccacgcagtccgctccggctacacttgtaaactgcagggctaggtggctgcttctctcccgcctctccgctgcttcacggcccaaaagccttctagcacaaacttacaattgggccatagatgttagctaaggcccacgtctagcaaattgggccgaatcggcgaatctcgtcagccctgacagaccaagacatcgatgcttcagttccttcctggtccatggctgcaccgtacaggttaaaaagtcgtacgagatgggccgaatcaatgcggaaaacttaaaagatcttatcccaaacaggggtcagattgggattggtagcgatgcgacgagagaggggaaccgattagccgacgaagcgatcccggtgcacggctggctggcgaacatggccgcggctctcactcgcacacaagtagacgtaggagtatacacgagcagctaccggcggcaaaaccacgagaaataggattgagatggagacggggatcgagcgagctctcacctcttgcccggtgtcagcgtggccgagatccgccgccgccgctgccgtcgtagaagctgccgggtggcccggcgaccggaccgtggccagcgacacctccggccgtccgccggtgtccgccatggatcccccgatccctccttcctcctccccgtgccccggatgctggagctcaacctgattattattacgcctccggccgtgcggagtggaagcgcgcatccagcataaatagtggcagtacgtcgctttccagtttacaaattatcaccagcgtgagcataaagcgcgcagcacatttggactgaagttgaaccaaacgaatagaaaaacacacacgcggggaaaaaaaagaaaaaaaatcctcacaaagcgattgcctttctcgagagcaaatcttgcactgtagcgtgtgcacatggccagtgcccatctctaccgtttttgctcctacacgagacgagaatgtcagagtacgcggcatatgccaagcaaggccgtgcgggaacacttggctttaggttgagttcgagtttcccaactcactcccttcatttttcgtgtgcacgttttttaaactgctaaataatatattttcagaaaagtttatataaaggcgctttaaaaaatcatattaatctgttcttaaaaaatagataatacttaattgattatgtgctaatggccatttcgttttccgtgggagagtagccgtgcattgaataaaaattggtctcgagcagggggcgccgctaatgctagccccgtggtagtacaatactacaacgcagcagggcgattcaacccggaaacgatggaaaatcaggcatcttcccatgtgcacatggcaaagcaaggggcctctcgttctcatctgctgttatgactatctgtgcgagccgttccggcggctgtgataaccagatctagcacgtgatcaagcagtgcgatttatggacggatccccgcgacggtcgctgcgacgctgcctcttgacgggtcagaagttaatcagcaatcaggagtattcagctgagaaaaaagttcctaattgactgtcaacaaagtgacaagacttcagtcgactggctgagttagttcggcagggttagaacaactgtcaccagaattagaaaggagagaatataagttgaaaaagtgttaaaatgagcatatccgaataattgcacattgagcggtatgcctagaaagtaaagtccaatgcaactagaactggtttatctttggatctgattctgacggattactacaacaatagtatcgtttctttttacagcgaatcctgcctactcttgtagtcttgtgatgatcagcatcaacggacataaaaaaaatgacagggttacagcgaccaacattatctgaaaaaagaaatactgacagggaatgccgcttgcagtttcactgcgtggagtatattcccaaacgttggattcaacagaaaacaggtagtaaatcatattaccatctcaccaattccgccaccctaataatcgaagatatcatggtccatacctgttcccgaaaaaatacaaatccaaacggaagcaacccggcccaaaatcccaatcatagaacaaaccacacacatttgttggcatcctgaaattcataagcaggtcggcttctctctctcaaaaaaaaatagcaggtcggtttgtccgtcagagcttaaagatcacatcaagctgacagggcgaccagccaccaaccggggagagggagagcgagaaagaatggacaggcccgctgcctgcgcgcaccaccacctgctgctctctctctctcgcgtcgggggccagccaatacacttctccgctccgcatcaccgtcgccggtggggaccgcggcgaggcgatgctgtcgatggcaaggaatgtagagaacatcggccccgtggctcgtgaatgggaggggagatcatcttcgtgctttggcaggtctaacctaacggctggcaggttgcgcccccactgcatttgccctttttcttgttagcgaaatcactgcacttgatgtggtaaccccccatcatcagtaggagtaataattatcacgatccaacaacaccatcgcacaaaaaaagtccgcccgatttaaaacgagcttttgccgtatcggctcgcctgaaagcgtgtcattagcatgagccaaaggaaggagagggggtgaaaaaaaagggggcagaaaggaatactttcccttccgttggagcaaagcgggttaaaaaagggttgggaggcagataagaggggagagtcccggacggagcgcgatgccggagacgggacgggtttgaggttggggagtatggttataaaaagtaacggggcgcgacgcgggtagaaaccgtggtggaggcaaaggcgccgcgggcttggcttggctggcaccctctccttctcgtcttcggcttcgtcttcccccgtcaaacccacccacgccggccgccgacgccgccgccgttgcggcgggtgcttcccccgctcgcgtcggtgccggggggctgaggggaagagggggagggggagggaaggcacgcggctgacctcgtgggggaggggagggggggaacggggcgacaccacccacccaccgccaccatgtgctcgttgcccgcctggtaaggtatggtatctgtttcattccattgccccccatctttctcgtgcttgcgcccctgcccccgccgctgtactttcgcgtgccctggattagctggttggttcatctgcttgttgcggcgcgcggcggatctgtgcctccagccgccggatctgggtggttcgcgggcgttcggtgcaatgcgagtctgcgcgtaagtttttttttgtgtgttgtggtgaacagtggtgataattattgcagggtttttttttttatcttgtgggggtcgtgtccctgttgggacctcggatctgttcttgtttcgtggctaatttggattttatggcagaaggaagacgttttgtcacaatagattgagaacgctctctttttccttcccatggatggtcataatctgtgccttttggtgcttagcgttgtaatttgtgattagggtagcaatgcagattgtttcacatcatgttccaacccaaggcaatgcttctgagttacgaaatgtttgtaatatttatgaccttgctgtcttgccatgcttgatcgatcattgttgttaaattggatacccgcattacttccaattttttgcacttcttaggtagttaggggtataggatgatcattccatgtcgacgccttattgcaactgattgaatagtagcatcggtgtcaatattttgtcaatgcagcagcaacactctaccttatcaggcaatgttacctatagtgcatttttttttattctaggaggaagtgtatttgattgctgccaagaaggcagtgcttcattttgcacacatcagttttggtacttgcatcatgtggcctgtacatcattgtttgcaaagaagagaaagctgaagcgctataaatccttcaagcagttttttcggtctaaacccagccatatctgagtatgttagaatgattattatgtgcaaggtttctgtcggttttgattgtgatcctcagacataccttgtgacgcagatattcatgctgagttgattccttctagtcactttgcatgtacctatagtttgaacatgtgcacggaagtaatgatctttgactgtgttatatgtttctgacttaaatctgttatattagattggaccagctgtgatttggggagcttaaagttttgatcagagacatggaaaaagtgatcttctgggcacatctccttaaatgcaagctttttctttcaaaagaaactcttgattggtgtgttttagctcgtgggaacacccaccacttctctctggtgaactacacatagtggttttatgctcctttatgctcaagaacatttggctgattcaatctttttcctgaagccatatttcaagtctgccaaacatctacatgtaatgcacctacttcatagcttgttcttccttcattttgtgtcatatggactaatttagctaaccaccatctttttattctactagcacgtcatctctaaagaagcttcctttaagttgtagatgctgatcatataagctgggtatgcctctttttactgttcattgatgcatttattggcatttagagaaataaattcttgcaacttgaaatattctaaacaacttactccttcccttattttgtagggttaatacctttgctcatttgtttgtcatctgttgctccctagttaattaccactagtgttgcattgaggtcagggttcatccttgctatagtatgcaactatatactatggttgctgcttgatcttctgagtgaaccaagatccaagaaaacataaggtgctggggctactgttcaattgactggttgcatatatttgttcgtgctaatcgatagactagtcaattggaagtggtggcaaacacctgtctttgtgacttggctgtccaacaggaaaaggctagcacaaggctgacattgaccggcataatggacaggtaactttcatattgacttactatttttaggtcacctttttcttatcaagtatgttgtctttgcagattcaaaatgattaaggaagttggtgacgggactttcgggagtgtatggcgtgctataaataaacaaaatggtgaagttgtatgtatctgaagataaatccataggaggaaatatgcatttcatacttttgcaaaatattcccagtgaaataaataactgattgtaagcaaaatgtgcactgatctataggtggcagttaagaaaatgaagaggaaatattattcttttgaggaatgcatgagtctacgtgaagtaaaggtattttaactgaaagatgtaccctctttcctgctatgaaccttcaactgatatttctcctatattgaagtctttgcggcgcatgaatcaccctaacatcgtgaagctcaaggaggttataagggaaaatgacatattatacttcataatggaatacatggtacttaaggatgtcatataccgcaaaagtttaattagctctgtatcgcttttgttaagtctcccatgttcttccaggagtgcaatctctaccaacttatgaaggatagagtcaagcctttctcagaggcagaagtccggaattggtgctttcagatttttcaggctcttgcatacatgcaccagaggggttactttcatcgtgacctgaaacctggtaggttctcttgtttagtcaacatcttcacctatatttctgtggcaatcaaattatgaaactacggatgagtatcagatgtaggtatgcagaatcagggtattattgtattgagaatatgagacatttacctttatttttaccacatctactttgcaaactgaccgagatatactttctaataaatatatactttcatgtgggattgtattgtgcttatagctatggcactaatcactgtactaatgcagagaatctgttggttagcaaagatgtcataaagctggcggactttggtcttgcaagggaagttacatgcgtgccaccatacacagaatatgtgtcaactcgctggttagtagcactctactcgcacacgtggacacaaaatccttttctttgttaatgttgatccacatgtgtttgaacatatcaggtaccgagcacctgaagtattgctccagtcatctatctatgattctgcagttggcaaagtttctactatatactttgtattttggcacatatagtacatactaagtcatgattggatgatcccctttttgcaacttgcagatatgtgggctatgggtgccataatggccgagctgttgacactttattctctttttcctggcacaagggataatatgcatatatcatatgtatatgcattgttggtatgatttggagacacgtatctctctgtgtttgccatgtattttgggcatctgttattctgtctctcttattatatttcttctttgtggtggtcatatttgctcattgctgttctctttatccaactgtttagtgaggctgatgagattctgaagatttgcaatgttatcggtagcccagatgaacaatcatggccacaaggattgtctcttgcagagaccatgaagtttcagttccctcaggtcagtattcatcttccccttttccctttgcctatatatgttttcttttgggggtaagctctttgttgtgattatacttgtttctgaatgtgtcatgaatctttgatatgtgttgagcccattctgcaactgtttattttaatcccttggtcattctctgatgaattttgtccttgtgcctccctatctctctagacaatggtggaattatatcacttcgcatgccttacaatctttcatctccattagtccattgcctccttttcctcgcatattatcataggtttaaaagcgtagtgtcttgttctaacttgattcatgagtttgacatagattgtccataaatagtgggcttaacacttaactaatctcatgtggatcttatcaatgcaggtcagtggcaatcaactggcagaggtaatgacatcagtcagtagtgaggcagtcgacctgatttcagtaagttctacaattctgttgccccagatggcgtacttaaaatctttagattattttattatatttgtttctttctacatctgcagtcactgtgctcatgggacccttgcaagagaccaaaggctgcagaagttctccagcatactttctttcaggtaaaattactattcgaactccgttgctgttgtctgtacctctgttgcagaagataaatcaaatttatttttgccatccactagggctgtacatttgttccacctactgtccggtcaaaagctggagtgctccctaaaacgcctccatgtggttagtttccacactgttttgcctcacaaccttggtgttcctggtactcttggttatatctatgatctatttgtttcagttggagtaaaaggagtttcggagcacggcatgcctcgaagatactctacaggaactctatcaacaaccaaacctcatagtaatgcatctctgaaatcaagtggcttatctaagaccggtaatatgtttaatcttttttctcaattgcttgttagcttgcattgtaggctatatttttatttctctttccaccttccaggtgtacaaagaaaacttcaaatggatcgtcaggcgccacagaagattaaaaaacctactgagagtaataataaactaaccactaatcgagtacctgcaaggaatagcccaggcaagtttccatagttgctttatttgaattctacatcaatttgtggttgactttgaagatttacattccctttgtggcaattataggtcaccctgtattaaggcattcacgcagtttacctgaaactggccgggcaacaatgcacaaggtttcaacccttaccgagagattaactcatatgtctgttacctctcgaacgcgtactactcccaagcctgctgccccgttactgaaggctgggctcggcaagtctgacttactgggaaaaacagacgaaatacctcctgcaaagaggttgacaagaaaattagtaagctaacgtagcagcatccatacagtggaagctggttagctggtgcagagaggtgttataagctacagagcaaaatcccggtctgctgaaaatgatggcactgccggagtgtttgccaaatttgctgcatccaagtgccatagtagaataagtcgagcctgccgatccacgtggatctgcttttgccccaagtttgttccatgtttgaatagaacatgagtgtgctatatcgatttgaattgttgtcgaccagtgttcactcgcatatgcggtctgacaaatgatagacccgcgagcaggaggatgtttggcttttgcttgtacagtttatgagcttttgggtggcggtcaagtctttgtcgggtccttggcaaatgatacaatgcatagtctggttttgacttcgtctgtggctctattcaggtctttgtttgaagatgatgtctcatttctcatgaaccttcgaatgttggaaatgacctgattgtatcactatcgtctgctctactttggacgaacctgctagttgtgcatgaccggtgcacttaacaagcaatatatacaccattctaccgtcgaggatcacatgaaaccatgctaaaacaaacgaattaaacgaacaccctgtccataaaggttacaaacggaagaccaaagtggtcagttaacaagagtagcagcttgactgagcctgctgcttctcagaccacagcatccttccccctcatcctatattcaccctgtaaaaaaaacctagtagcactaaccgtagcagcggcaaagtagtagtatcatcacactcttaactattcttcccggcgacgcgttagcttctgtcacagtatcacttcactctcatcaacgatgggtctcgcgttagctcacagatactgcgcgtgtatccggtcccggttctgctcccaccacaccttggcccgctcctcgccaaatctctcgcggctgcaacgttgcgcacagagagaagtgttaaaaattccacgcgaacacgaggaaaatccagcgtgatctgccggtattggtgacgtgttagcgttttcgggatgtgtgtgtggactgtggagtggcttgcctgaaccggacgcggcggagctcgcgggtgccgtcgccgaactcgcggatggtgatggacaccccaggctcgtcctgctccacccactccgtggcctccaggtcgctcgcgttgctgatggacacggacgcctcgtcccgggacgacgtcgtgccgcgcgacgggtcgtacggcgccgctggtccggcggccgcggagttgaggaggttgaagtggtgcgcccacacgtggtcggacgggtccggcacggccgtggacgggtagaacggcggccgagccgccgccaccgacgacgacgacgacagctgcgccttgctcgacgctgtccggctgatcgggtgctccctgccagcacccgacgacggcagcggcggcggcggcggcatcatcatcgccgggctctccctcgtcgagccgacgcgggagtagaacgaatctctctgcaaacatcaaccatcatcagcaacggaatgtgcagagcttttgctaaccagtgatggaacggaagtgacctgcatggcttcgtcgacggaggacgtcggcgtcgagaagccctgctgccggctgaacgtctgcacgttgtagagctccaccacgcggtcgtagttctccccccaccaccgctgcgcctcccacttgttaaacatctcccggctgcatatgcatcgccacaatccgttagctcatgctcatcactcgagcaccacgtgctcgacgaaatgtcatgtcgcttgattggcacgaacctgaaacggatgcgcttcagatcgttgccggcgccgccggggatggagacgaaggtgatctgcacgccgggctccacctgcgccgtccactcccgcggcacgcggtcctcctccaggaggactgtctcctcgtcatcgtcgtcgtcgtcgtcgtcgtagtcttcctccccgatgctcggtaccccgctcgcgctcgggctcctgatcacgcgcggctggaagctgcggtggttcaccttgggcggcaagtcccacgtcgacggcgcggcccgggcgccggcgctcgccgtcgtcgtcctcatgtaagtataggcctcgccggccccgtccgacgtgaagcccgactcgtcgatgatgcccgggtacgcggcgaggcggctggagcggtggaagcggctggtcctcaacgacgggctcccgccggacttgtattggtgcctgccgctgccggagaacttgagcaccatgtccttcaactgaaaccacattaaatttgtgcagattaattaattatcctcctgaataagggatcaattgattttccattgtaaaaatatttattaaatatccattagtcaagttaacatcatccttttttttttttgaacgaatgccaagttgacatcatcatacaacagatgatattatatatctgaggtaacatttttgccttgcatattcagtaaatataatttcttgcaattggcaacagagtggctgcatataacttttaacatgccattgcctttccagtatataaaactgcgggagtttcgttcggggcatcaacattcaccactaacgcacacgcctcagcaatcaaatcctacgcgacagctcggtctctcaagtaaagcgccaatcatatccacagcagggttaatgatcaccgatcgattccatctccatcccgatgattagggctaacaaaagcaggacagggcgcacttccgacccccagattagtcgcgtagacgcctagcagaagggctcacacatcaccgaaaagcaccaacaaaaccatcacaatgtcctaaaacccaggacatcttttgcctgaactctcaagcaaggaacaaagcaaagacaaagcacacccacaccacaccactcaagtttctcaaagcaacatcgtggacagcgcccccccccccccaaatttttgggatcataataacaccagagagggaagggaatcgatccggtccattcacacacacacacacacatagccacacaggtgcatgtcatgtggtgcgtgcttatgctccaaatatgtgtagtactagtactgctactttaaaagacggcaaaggcgaaagcgtgcaggaagcaaaggacgagagtactcgagtcccagtgacgaggcgtgtcatcatggagtagttcagagatgggtcgcagcgagagcccatcttaagaaacaaaccagcccatcgcaaggaccacaagtgtgtgtttctgtgcatggcctacgggctggctacggcccagctttattcttctctgagtgtccaggaccgtcttgggggggggggggggggggtccctcttaagaaaagaaaagggaaaggaacatcttggactgaagagagtagctgcttgtttgataactcgaaggggattgggagtttacacgagggagttgatgatgagattaagatgggaatttgatttttaatcccaatatcttatttggtagaggtgatagaaattgatagggaatttagttggagattaggtcattaataaaaacggatggctgagatttggttaaacaaagtaaaggatgaattccctcctaattacctgcccctacccagttattgaaaaggagtgagttccttcctcaattccccatcctcatcccaccaaaattcccatgtctcccaaccaaacaaaaattttaatagcttcatccctctaaattcccaatccctactaaaaactccctccaaccaaacgggccgtaggagtaagacccaggggttaagatcaatcaaccagatagtgtctttccaggagggaaagatcacattagcagctactaggataggacagtcttttgttgggagcaagcaaagtgaatggatggatggatggatggagcaagtgaaaagggcaggggaatggtagtatgggggaacagaagtgaccatatcaaatcagtccaaaacccaaagcttgaggggatccatgcaagaaaaaagcaagagccttctctcccccaccaaactctagtcatattcccctgggccttgagtccttgaccaactttatcaaggaatgttttaaaatgtagttagagcactgtcattcaccttgtacttgtgattccatgcaggatattgccctgattagacacccggtgaggaagggaaaagaaaagagaaacggtgtatatcaccacaagtgtactagtattggttgtcctcctgtacgtagtggtactctgttccctttcaaaggccaagaacaaggtgacgacaagcaggctaggacaaaagaacaactacagtgtaatactttctcctccgtcccaaatgtaagcatttttgaggctgacacgggtattaagaaagtatatgagaatgattgaaaaatatgtgtgattggttgaaaagagaaaataggtgaaaaagaatggttgtgattggttgagaggaaaagataggtagaaaaatagcttcattttaaaataaagtactgtgctagaaatagctatattttggaacggatgtagtactagaagtactagcaccccactgctaaggagcagcagagggcattcaattgactggttaatgcaacagaagaaaatgtggcatcaggtctccgcccatgcgctagtgcacaacatgtgcgagtactacggatttttacttgtgtacggagtactggagtagtataagaatgcacatcagcacatgtacctgtgaagtcagagacttgccggagttgggcgtggcggtggcggaccggtgcccgccctccccgccgtccttggtcgaacacgcgatgcacgcaagcatttcctagcctctcgagtagtccagaaccgcgcaaatcctccttccctgctcagtcacaaacaaagtccatcgaagagccaagggaggagattgtcactcgttttccgcgcttttcaaactactaaacggtgcgttttttgtaaaaaaattttctatagaaaagttgctttaaaaaatcatattaatccatttttaaagtttaaaatagttaatatttaattaatcatgaactaatgactcacctcgttttgtgtatcttcccaatcttcccaatcctctctctctcaaacacaccctaagataagaatctggtcctggtgtatcaaaagaggaactgagccgtcacgcactcacacggctaaaatccaacatgtactagcaacgtagcagtgccattgatccagtgtgtgcaaggagtaaatacacggaacatttctagtagcagcaggtacatcagattacactgcagccactgccatggctgcagtgccagccggccggccggccggcatcaactccgagctgagtagccatagccagtgagtaaacgccgctctagctaatgcatgccatgccatggcctgcgccgcaggcttttgccttccttaaaatcgatacaccgacagcaacccctcgccagccgagtacgctgccaccatggggcgcacacgcccgcgcgtgtgtatatccatgcccttgggccttggcgcggccggcctgggcccgaacgcatgtttgcacgcgccggctcactgcagaccactgccatgtttgagctctggcttagctaggggtaggcgaggcatcgagcaagaaacggagtcaatgccccccaagctttggctgctttatggagtagtacgtagtatgagaggtacagggaggtagctgcggcaaagtatagcccgggtggtggattgattgattgatgcatgcacggattgatattactgcttaatgctgctgcaccggtgggctcagtgtgcaggcgtgcagctagtacgtcgtcgtaggtagagcattcattcactcaacaagcataggcttaattatgcttgctactgcagcaacaggcaacaggcaaccaaggcatgcatgccgataatacacgagggagcagagaaggttctgagaaaaactgtactagcaggagctcttttatctactcctacgtgaggacactgccactccgaatccaagtgcatcgtccagttccaagcgaaaggttggaagcttggagagcggccgatcgagctgagcaggaggcagatagatagacggatgatgcacatattgcacatttgcatggatagagagaagcccttttaggaccagggccctcatggaaattttatcagtggttgggagtggattggaggacccactgaaggaaatggaaaggcaaacagaagccttcttgcagtgtaacatcccaactaaaaaacagtcctacttgcacctacaaaattcgcgtgtattgtactattgtaatactaccgtttttagtttaagcttgttatactacaaagggtactaggagtaattaccaatggataagattgattatatagttaagtgtggatgacgacaagtgagaatactgcttaccagttagcaagccaccatcaggctattgctcatccaaagcaactcccgccaatcacagtctcgcagcaatgcttgtgaccacgcggacagtggtatctcgtcactgctccttctgacgcaaagatgatctgaacaacagcgacagggaagagaaggtgataaagattacgcaatgtacatgtggccgactagaaaagcataatgctcacttttatctgcaaaaatactgctaggacagatatttagccgattgttcgctgtccaaatcgacaagcctgactctataaagaaacaggccagtactcattgctgcaagaggctgtcgacgctacggaaaaaaaaggcaacagtgggaagcaatgggattgcctccccaaatggacccaatggaaggctggagatctcaatgatcgacaacgcaaacggacccagagatgaacccccctccgaaaacgaaagcgcagcaaatggacactagagcagagcacaggacacacggagctactccaaatatgcacaccataaaaaaagaaacagagaaagagatggcaaagatctcgttctccgattcaaggggaaaggaaacagcagtagtcactggtcagttaccttcttcctcctcttcttggacggcgggtggctcctctctcggtcgacagatcctcgccggcgcgcggcggcacaagagctcggaagcgacagaggagagcggctgagctatcaggcgatcgactgccgccttttgggtggtagctagcgaacgagctgccgagcagcgacgccaacagaaacaggacgaagaggagatcttttccactcccccttttccttttcttttctttttttttccgcgagggagagaagcagggagaaggaaggattgagaggaaacgggcggggagcagaggcaggaacagagcgggagggaggggggagatccccggattcgctcgcggccgtctgatccgcccccgaaatcgagcgaaagcactcgccgaccgagccgtcgacggctatttatacaagggagaaaagcgctcgcgatcacggccgtccgtatgtttcgctaggctgcgacggccaggatgcgtggcgcttggttgggggagtggggtgctttggcccacgtcccaggccttaccacgcgcaccgtaccacacctgctctgcgtacgcatttttaacgtggtgcagccgttggcagttggcttgtggctagcggccggcttcgccaccctcgcggtcgcggtggcatttggcaacccgccaacttgtgttgtcgggctcggaccatgcgcgtgcgcgcgggcgacgccaacgtcgcgcctgggaagaaggtcgcggcagcgtgggtgtcgggaacgtgtgtttccgccgagactggcagcgaggacggtggcggttttggtgttggaaggcgacatcccggcaatgtcggctgttccaaaattagtactacaacgcttgtttatggaacttgtcgacaggtgatacccgtagaccggatatagagggtattggggtacgttggtataaggatctacgtaatacgacatcaagtagacaaaagacgaggattatactggttcaggccccttggtaggtaatagccctaatccagttgatgtgggattatatggtggaaaacacaggttataaagggaacaatggaacttgagggatccggcgagatcatggtctagttggttcgactagatcctcggcgatttggctccttgcaggctccgacttcgtaggctgtgagggttatgttggctccgagattcgatgccccaggtcctcctcggggggtcccttttatatcgcaggtcaggcggtttccaagtagaacttagagataatagaccctatacaatacattgacgacccagtcttgtccgagtaggactctttccatctgtagactccgtgaagtatttccttagtgtacgcaggaagtatccgtatgcgcgtgggtataccctaccaatatataacatatatcgaagggtaaagggtatgcctaacccggaaccctgacagtagcccccgacttctgcttaaatgaactcgtgtaaccattcgcgacttcttgtgttgagactgttgtcgctcccggtgtgaggaccatagagtcaggacgtagtcgagaacaccgtgtgaagcccaacggtcacgagtgaatttaaactgaagtccaaaaaactgccgcgcgtaacggacccagaaatctccagcgggcatctctcccctttccttggaattcgcaccgtcggaagtgcgtctatttaagggaattttggggatccattttgaagtccgcctagtgtgaagaaaacatcccgcctgtaagcgctctttgtcttctccgctgccacaagaaaccctagttcatcgacttgagccctctcttcggcgatctccgatcagcgatggatctcggcaaatcatcctccaccagtgcgtcgctgaagaagcttcaggaagacggcgcccttcccggtcgcggaaccatggaaagagaagcaggaggtactaatccccagcccgtcttaggtcgtatggttgcgatcgaagactatattctctgcggttttctccctccgccttccgagtttcttctcttg

SEQ ID NO: 26326 - DNA, 3878 bp, Oryza sativa
aagatcccgtcggtcttgcgacatcatatatgaaactcaagatactataaaaagatatctagtaggttcagcattgttttggtttggtagaatcgcaatatcatagtcgtagcattttatgataatactacgatctggattaggatatttaatcattgtatactcacatggcaaaccctttcggttttctctcaattatattgctggatagctgtaacacttccccgaatggtaagagatcgaacccatccaattcaactggcatgatcaacaccgcggtgaattatcaaccagcgtggccagtgttgaactacaacgactcctactattattactgcatcagtttgaggaataaaaccgttataaatgtttactatccggcaggctagctacccagtgtccagaggagctcggctaacaggctaactgctcatatacatcaggtgtgtttaggcccacgccaaaattgaacattcgattgaaattgaaacgatgagacggaaaagttagaagtttatgtatgtagaaaagttttaatgtgatgaaaaaattaaaagtttgaagaaaaattttaaaactaaacttggccttgatcgaatttcttcgggcagctacagcaatgcctagtggtggcaactcttgtctttgacccccacagagcttggtcaagaaaggtgacagctagctaagggagatcaaaagggcaaaaaggagaagcgaagtgacaaggctaactaacccaaagggacatgagttacgcgcatgattgaaaaccagctagactggcaggctggcaagtgtatgttgccatgttgggttgcaaccccaatgtggcaaaaaaccagataacaagcatttatttcaagcctattacctagtagtaagcattatgggaagaggtagtagttactacctggtatttgtgctattgccggcaacaaccaaataaaatataagatggatggattttttcaggtggaccccagcttgtttaccactacactcatataagcattgtgagaagagttgcagcttactacctcctggtcatgggcccatcttatttactagttgggtaagatacattgcgcatgccagggcaaagaaaatccgaacatcttttccccaaagctctctctggccacttcaaccttctttacgaggtgtaataaaacacgcaggacggctctccagtttgcccggcgttttgcatgcgcgcggatgagatgcactgccatcatcatggtccagacgtcctcgcaggctcgcacacgaacggcgatcatacatgctccgcaatggaacgagtagtagtatagagaagctctgaacttgtccaagtacggcgatcatacctctgtccatgtatcagatgttcagatattagctcctctcacactggcgttcacgagcagacggaaaatctagcgcccggccgtagaggggagaaacaccatggaggaggagacaagtgtaggtactgtgctaaagctgtgcagctagctctggagtacgtcttctgctacgactgcatggtggcgagacatacatgcagaaacatcagcacagcaatgatactttacgactgcatgcattgttgagagacagtacacagacggagatcagttgtacgctgcaacttgtgtcccgacaggaagctccaccataccacttcaagaagagtatttgcttcttcgtcaattatactccatatatgacgacgaaccaacgatggggacctactgatttcagctcttctcttcaagattctcactcgagtgttcttcaaaacagactactccgaacatgtagcagtacctttgtactgatctacctcacctcacagcttttctcgtaatagtagaacagatgctgcatgcgctgtgactttagcaaccaagattcttcatcctctcctcctatccccaaggcatcatctgcctgcagccacccaaattgctcgacacctctcttgcccctttccttcgagctgtgcaataatactgttcatccactgctccgttcaacataaagatacaataattccggtatcgtggaaaaggggaaaaaaaaatctctcgagtgccagctcgacgatgatgctcgccgtggtgggctggcccgcatgacagtggaagcaggacgggtgggcccccacggggtcaccgtcaccggaacgaggccttgggaggcccacctgggccggcctttgccggacagcatgcgcacgtgacggcacgggggaggcatgctccctctccaggaccagtcgccgcccgtcgcctcggccggcggccagccggccggccaccggctgctgcacacgtcgacatccccgtcactgtttcctcctgaacagtgggcccgaggaggagagcatctcctcggtttttaccgtcctctctttcctgtgtcactgtattggcggtgatgacgattctctgctgctggttggctacttcggctccaatggtagagcactgtagggctaagctttgactgtagcaggtgtaagtttttttttttcttttgccatgtgtgaagcctgtagctgtttggtggtatgtaaaagtcgccaatgtctgtcactcagctggcagggagggagggagtgaggggagattgtgcagggagaaaagagaggtggtattgcaatgggccaaggtcagtagccgatcgatcacactggcatctgctcaactcaccaagttggcgaaactgtttttcacagacgtgtcggccggggtaaggagcaaagaagggatctttcggtagccggatcgtgaaatgtcggccggacggcaggaagagtgacaaatggtgctagactgcattgtccacaacaaggccgttctgttcaccactggctcggcacataccggatcgtgtgcatcagtgcatatggagatccgttgctacagctaaaacatcatcaacagtgaggccattccgctcacagctactattacctggacctatatagcctgctggttttgctgctttaccaggcggtataggtgcctctacgtcatacgtacgtccagtccagctcggcttctctcaagagtgttctgtaaggccattgacaatgcatctatagatggcattcagcccaagctgtcacgtacgtaggagattcctctccatgttcgtgcaagtcatggcctcctgaagttcctcgtcccccacaaagacctgcataggaccactcagcgtgggggcaccatcgctcgtgcaaccgtgttgtgaagatcgtgtccatcgctggccctaaaacccagctttggtgcctcaacgagggacatggagtagctcgccgattccaacggccatcgcactggtcaagcaaggccagtgagtgaagggcttcgatttgcgccggagaagagagggcacaagcgcacgagacgcctagagagctcgtcagttgcgccttggagggtgctcgttcctccgtctacttgttgtcgcaaagctcgtcgttgtgccgggcgccgatcactggtggagaaaccatctttggtcggtcggccaaattctacaatagtcccggttctaataaaaaccggaactaaaaagcatctttagtcccgatttaaaagttgaggggtactttttgatctttagtctcggttggtgttaccaaccgcgactaaagatcatttttaatcccggttcaataagtcgtggggttcaagacagaccccaattatttttactcccggttggtataaacagccgggactaaaaatagtcccagttgtttatcccaaccgggagtaaagagtaccccgaaccgcgcgccaaatattatccgcgtgccaccaaaataattgtttatatcaaatatttttactcccggttggtataaacaaccg

SEQ ID NO: 26327 - DNA, 6864 bp, Oryza sativa
cgaggcccccgtccagctgccatgtggcggggacagcaagcgggaaggggacccaggctgaaccgctatcaatgcgcgcggcgccccaactgcccctcgccgcattaaatgcggtaggggcagacatgaggtgccgcccgactgacgcacatcagtcaggagtgaccggtctgtgaccggcctatcgccggtcacgtctgactggacgggcggccgtgcccccacgtcgcctctgtccccggcggagtggaggtaggtatgacccgtcccatcggagcgtgattcggagctccctccacgagaaggacgtccaccacaagtcttcacccatttatgagggaatgacagggctgtcccccgtgtcaggcagggggcgacgatgggtcccgcttaaggacgagcggtggcttggcttccgggcgaaggcacgaattgtgatctggtcaaggtagggtgggtccccaccctgtagaagagtaggtagaggcggtgcatgtggtttccccttgagctataaaaggaggaccttacccaccgagaaagacgacgactctcaggaagcctgagctctaggagaagagaagcgagaacgctctccggagtttaggaacccttgtaactctcaaccttaaatcccacacacagaagtagggtattacgctccatcgcggcccgaacctgtataattctcttgcccatacgcgactagcaagacttagggcggatacgcgatctctagaggcgagcccttttccctagccgaactcacaaaaggggatctcacgatctcccgatagagaggattactcctcgacaatgtcattttaatatatttgaataatataatgagaaaacatatatgctattatatgagagaaaatataatgatgctagccgcgcaatctgcacgggccatcatgctagttttaataataagaaaatagtacgagaaggttagtaaaaagtactgaatggataaaacttctcgatttacatagcaaatactagttaaagggatataagtgaacttattttaagataactagcacaatatcaatgcgttgtaatggatattataaaagaaaaaaggtaaaatttacaagtttttagcacaataaatccatttggcatataatgcctacctggtgttaagatttaatgacacaatacgatcaatgtattgataggcataaacttcgagtcaactaaaagagcttatttaaggggtgtcaaacctatgaacccatacgtcacgaagggggtagtgctggcaaattcaatgcccctaccattgctctcttttaaaatggtatagacttatactatcatcatcacattctagtatgatgttggtttattttggtgtggtgtcgcgtgttctctaaacgcactgtgtcgtgcttcatccatcttaaaataatcttatcttttacctatttcacacgtaccaataaaaatctctaatttattaaatgctaatctcttcgtctcaaagtgaacagaagaatatactagtaatacaattatttctcttctaatccgctctcagtagatttaccccgtacttacagccctctacaatcctccctaaacacagagtgctatagcactgtgcagtgcagtgcctcattcgtctcaaaataatcctatcttttacctatttcacgtaccaataaaaatatctaatttattaaatattaatatctccatctcaaaataaacagaaaaatatactagtaatacaattactacttatgttccaatccgctctcagtcgacttaccccgcacttggcagtctggcctctaccatccttgcgccgtcgcgcgctcgtgccggggcttggctgcgagcgaataaaaagaaaagaaaacgtcaaggcctcagacgccagagcgctacaaaatggcccacgccgccgcggccacgggcgcactggcaccgctgcatccactgctccgctgcacgagccgtcatctctgcgcctcggcttcccctcgcgccggcctctgcctccaccaccaccgccgccgccgccgcagcagccggaggacgaaactcgccgtgcgcgcgatggcaccgacgttgtcctcgtcgtcgacggcggcggcagctcccccggggctgaaggagggcatcgcggggctctacgacgagtcgtccggcgtgtgggagagcatctggggcgagcacatgcaccacggcttctacgacgccggcgaggccgcctccatgtccgaccaccgccgcgcccagatccgcatgatcgaggaatccctcgccttcgccgccgtccccggtacgtattgcccgccccactccgcccccccggaatctacgcttgcctggctgcgcggctgagcccatccagcttttctgtttggctgcaagccgctggccatagagaatcccggccatttttctgctgcttaacagttgtttctgcctacctaacccctgctcgcctcacggctccagcacgtacggcaaaatcatgagatattcagggggttttctttttctttttctttttggagacgataaactcaccatcttgattggtgtgggtttaattttgtacagtaccactattttgttccattcattcattcacttggtactcgtactacgaaaggtgtggacctgtgacagttttggcacgcactattcccaacaggggttttgcagtcctatctcacacggtagaccgtttgagcatttagggcccttttaaatcatagaaataaaaaaacaaaggaataagaaaagcacaggattctaacaggaatacaattgtaaaacagaggattgcaaaacacaggaaaaatacaggaatgaccgtttgattggaccacgagaaaaatgtaggaatcatatgagagagatagactcaggaaatgttccaagaggttagacttcttgctaactttcctccaaaatgtgcataggattacccattccataggaattttaaaggattgtatatgattcaatcctttgtttcaaagaccttcatatgatttttttttccataggattgaaatcctctaaaatttctacatttttcctacaaatcaaaggggcccttaagttcgttagcttttctgtttgaaacatgttttgcacggattatttagttgattaacacgataaatcaatattttaagaaataaactttacacataatttagagtaagtaatctaacaatgcagtagaagtttttttttttttgagaaatcgtattttaataagagtggagcaaaaacctttggcaaaaatttggagaaaagaagctcaaaaaacaaaatccgtggcgaaccggcgattgtggtattagtactgcaaagaatacgaaaaagaccaaaattgttgcctgaattcagccgtagtttacccttggagtacgtacatggttcaattaatttgctctagctgataattgtgcttgatgcctgcagatgatgcggagaagaaacccaaaagtgtagttgatgttggctgtggcattggtggtagctcaagatacttggcgaacaaatacggagcgcaatgctacggcatcacgttgagtccggtgcaggctgaaagaggaaatgccctcgcggcagagcaagggttatcagacaaggtgcgtattactactgtttattctgttctaaaaaaaattctactgtttattcgtatcgggatttaatctcgctgtagctagtcatagttacatttgacaatatcagagggtttaagctctgattactcactgctggtgtgacgacaatctgtttaagcaggtctcctttcaagttggtgatgcattggagcagccttttcctgatgggcagtttgatcttgtctggtccatggagagtggcgagcacatgccagacaaacggcaggtaagatactcctcttttttatccttacagaaaaaaagaaaatgggaaaatgtaatccctccgtttcaggttataagactttctagcattgccacgttcatatagatgttaatgaatctaggcacacatatatgtttagattcattaacatatatatgaatatgggtaatactagaaagttttataatatgaaacggaagaaatatcttggatcggagaacgtttcaaatctagccatcaggttacggtggcatgggttaccatgcatcggttggaatcttggttgagcaatcgcatctgtcgattttaatttgccgggttgcgaaaatgtagaaaaacgagaggatattaatgaaacaattctgctatttattaaaatcagatgtcaatcaactcatcttgagaggagtctgtattggatgttactgaatagtttttggatcttttcactctctttttttagctaagagttcttacctgagtcttttacagtttgtaagcgagctggcacgcgtcgcagctcctggggcgagaataatcattgtgacctggtgccataggaacctcgagccatccgaagagtccctgaaacctgatgagctgaatctcctgaaaaggatatgcgatgcatattatctcccagactggtgctctccttctgattatgtcaaaattgccgagtcactgtctcttgaggtaaaaaaacttttcatgctctgaactcgtaagtgaatttaagttacaacttgatatggtttgcacatcaacttgcgtaccatgccgatttgcattctcgcaagagattcttgcatgtgtgtgacatgtgaaatgtgccaggatataaggacagctgattggtcagagaacgtcgccccattctggcctgcggttataaaatcagcattgacatggaaaggtttaacttctctgctaagaagtggtatgatcttgccatcttcctttcctccacttatgattatcggcaaacagatgttggacaaaactgaactaatttgtgttggcttcgtcttaatttgaagggtggaagacgataagaggtgcaatggtgatgcctctgatgatcgaaggatacaagaaagggctcatcaaattcaccatcatcacctgtcgcaagcccgaaacaacgcagtagtaccctagtagtgaaattacgctcctgctatcttctccatcacgaataatgcaaattctgacgagttagcacctactgatggcgatttgttgatttggggaacagccagtgcactgttaccacgtcattgattttgtactcgtcagacttaaaaaaaaaatatccatgaatgtgcactccaaatacgtcaagaaattcttagatcttcagaccaactcgtcagctagaggtggctaaaaagctcatttagctccctcggtgcaagattgctttgattgacctagttttcttcttaaaactaaaactattttactttggatggaagttagtttcactctgtctgggctcggctcattagctcgttaagaaaaacagtttcaaatgataaaataacataataaatcaatttcgaagaaaaatggagtagataaaaagcacagccgggctcaaccgagggcttatttagattgaaggattttcatgggaattttggaggactcaaatccttgataaaatttctacaagcccctttggaacataacaggatcgctataaatcctatgcctcccaatttcataggaaaataaacatgagctcaaactcatgtttttatttccctttgagaaatctaatgcactctctccctatctctctccctttgagaagtctaatgcactcgctccctatctctatagtttctctcctttgaaatttctgtgtttacttgctactaatcatccaaaggcaactactctatagtattcatgtattttaaatttctgtaggattttatagagcgtggcatcttatttctatgttttttttatcactgtgtttttaaaattttgcgctccaaaggcgcactagcagtgcagcagcgtcactatgtcagctcgacgccgaaccgccatccttctccgatggcgcggcgcgctcaccacgccacccgcgccgcacggtgaaccaaagctggcacggcacgggcaggcaccagcacagtcgggcaaccgacggtctgccgcgcgccgcgtggtgctccggtcacggagacgtcggcaatcggcgtccatcgatgttgccgtctcactctcgtcgtccttcaggatgacccacttgcccgctccataattcacaaaaatagccaagcaaaagaacggctccatctggtacgaaaatgacagggccctggttaagaaatcaacgacgttgcgaagaaagcttggtctctgacgagagaatggcaggaaacgataaggtagtcaggtagagctagaactgtcagtttcacacaggatcattcactttctctccagcagctcaacaaaggctcgccaaatcacatcaacaagaatgcttattgtataatcatccctcgtgttcaccaataaatctgctgcggcttattggtattgtatgactaagaacagggttcgtggctatagctgacatccgtaaatttgtaatccatcttggaattaacaaaaaggtagcacacaatttgagcccaatctctgcttaatttgtcggcaggacgtccaacttttatcagttcttcacggtggttacatgcctaagaagcatctggatcacttcaggggagacatttgcagcctgctccttcagttgcgcaattttcgtgtcagtttcttgctcaagccgttttacgtttgcaccagaatcaccgctactctggaaagaaacaggaaggttagcggcaatagctcttctaattccacgaactatacaagattgaaagatgcatacctccgcaaccttcctctggaactcagcttccatctgagctgatgaactactgt

SEQ ID NO: 26328 - DNA, 13417 bp, Oryza sativa
  unsure (1)..(13417): unsure at all n locations
gaactcagcttccatctgagcacggtactcagctatttctctctcagcctcctcttttgcctgacgaataggaaaggtattcagtttcaaacccaagtcagatctctagatgttgaataaaaaatgagtaggagtaacatgtttgtattgcgtgcttagaagcaaaagatagaacatggtttctgtaaacgatcatacaaggccatcgcattctacaaaagctgtcaaagggcacaattcagggtaacataccactttttttatacatttccattcaggtgttatttccaaaatatatgtgatatattcgatgtccaactatatgaacaaaataccatgataattacatgctaaaaagatatcaaaggaatcagacaggtactttaccttagttaaggtacagaagaatagtaacaagaaagcatgtttttcactcaattttcgaggaactaacagaaaacatgaggccatctctaattcccactgttgaacatgttttaaattccagaaagcatgttttcattctgctgaacatggaattttcccactgttgatttgcttaatgttggtacaatggaacttattcaacaaacaggatgattcaaaattaccctataaagacatcaacaaagaaatatacgagcaaaatcttgttgtaggtatatcgaagcaatcattgcacatatttcgtacaacataagcaattcccccccatcaatttccgcgttattcttaatgaatatttgtggaacaattaccgctcctagcagcattaacaatctgttgagcttcttgctctgcagccaataattgctgaattccaccttggcgtctgttagcatccatcttccttctgctacatggtgtgaggaactattttattattagacaaaataacacatagtgaaagccgagtggaatataacaagtcctaaatgaacagaacacaaatgaatgtgattgcataacatatgccagaattcgagcattcacaagatacattttaagaggtataaataaaaaatggaagatgttatcttctaataaaagccactgacttttagttacaataacaggtgctaatttggcaccggataacagttacaataacgaggataacaacaaaacaaaaggactttctctcccatacctaatatccctacttgtgctactttgcattcagaagcacaataaagaaaatagcagtagtgggcctcctattgtttttactgggagtaagagggttctttccaagctaccggcttgcctgtaattcagttatgcttgtttacccatgtacaggtttgctgaatgaagaggtcacggaattagttaaccatatcagaggattttaaaagtgtgcgtgcacaaaataacatctgctctctatcccaatctacgatcacagaatataatcatgcgatattatatttcttcttgcacaaaatcaaaccacagagtggaccaagagcttttatgatgatacgatcagccgaaaagagtcagaatactaaaactaaacaagcatacgtctatagcggcgagcagaaggcaataatcccccaagattcatccctgatccggcccacaacgatcccattgccagttttcaccacctccccacttctccacaatagtgtttgagatgcgcaagcaaatgtgagtggaaataatcaggaaaaaaaaacctactagagaggcaaagcctccagattcgcttcaatcaaccgaagattggatcgagcgagggacctggtatgcgcaggcgagaggggatcatacctgcgcgcacgacgattctcgaaggggtgttggggttgcaggttgcagccttgcaggagccaggagcggatctgtggctagcgatagaggagagaagtctgagaagccgtgaaggcacagattgacaacgaaatcgggttatgattggacacataaaattgggccgtaagcggcaaggcccaacatgttcaacccaaactgtaatggaaaaagtacaccgaaggtccctcaacttgtcatggaggtacaaaatcatccttgaaccacaaaaccggatacaacgcgtccctcaacctataaaaccagtgcaaatccctcggcggtttcgaacccggttttgtccgacgtggcagctgactcagcgtgggacccacatgggccccacgcgtcagcctcttcttccccacccctccatctctcttcctctctctctccttccctctccacaggcggcaatcggcaggctgggcgcggcaggccggcgcagcgggctcggcaggctggtgcgacgggccgcggccgacggttggcaggggaggggctgggcgtggcaggccggctggtggggaggaggtcggcgaagcgagacggcagaggaggaggcccacgggtggtaagagcggcaggtgtgctcgaacaggttctgtgccgtctgcgcgcggtcgttcccgcggcacatgacagagagaagggagttgagggcgactgcgttcagctccacgccgtactttcccatgacattgaaggcctcgacggcttntctgtggttgccgctggcgcattaggaggagaagatggaggcgaaggtggcgacggtgacgaggccgctgccctccttgttcatggtgcggacggaggacggcgtcccacatgggctactccatgccggccttgccgaggatgtcgacgaggaggttccaggcgtagccggtgtgattcaccgaccgccccgaccagacgaagaagcggacggcggacttgggacgggagtagcagacgcgggacctgagcacctgctccgcgacctccgcttccgcatcccccgactggacccggcgaggatctccaggaacgcctccgcgcgcggtgaatcctcctcgccgtccagccgccccttctccgtcgccgcgctcatcggcgacaagcgaagggattaggatttaggaacaatgaaattgcttttgggattgaactgcttccgattctctgaatctcccctcaaacagcattgactggaaggttgttggtgatgagtttccgcggtgtccgtttgtcggtgaggcggagagcgaggtgaggcggcgccgccctcaccgacgacatggagattgcgtttccggagagcgagacgagtgcgggcggtggccgacgagtggcgttgtcccgctgcagtgacaaggacaatggtggctagagagagagagatggatgcgatggatgtggtgacggcgacgacgacgacatgcggatggatgtggcgctccgtgggctggtgatgagccgagcacggtagcgtggtcggcatccggtgacgcccgagctcggtgacgccgccgccgccgccggtggcagctcctccctcgccagccgccacccgcgcccatcttctctctgccaattgcccgtggagagaggacagagagagaaagaggtgaagaggagaggggaagaagatgcagacatgtgggacccacgtgggtcccacgctgagtcaactgccacggcagataaaatcgaagtcaaaaccgtcgagagacttagtttgcactggtttttgtaagttgagggacacgttgtatctggttttgtggttaaggacgattttgtaactcgatgacaagttgagggaccttcggtgtactttttccaattgcaatttagcagggcaataggccctctggagtctggacgcaaacgtgcaaactgttgctagttccatttggatttacaaaacacggtttcattcttgcatgaaaatactacctccattttttaatagatgacgccgttgattttttcttacatgtttgaccattcgttttattcaaaaaatttacgtaattataatttattttgttatgagttgttttatcacttatagtattttaagtgtgatttatatcttatacatttgcataaattttttgaataagacgaatggtcaaacacgtgagaaaaaatcaacggcgtcatctattaaaaaacggagggagtatatatttttcttgaattctaaatgggccttaaagaaaactgtattttttttctctactggttgttagtgccacttgtaatcttgtcataggggtaggactaaatccatcaggattgaattatggcattcttttaaatactagtaatatgctcgtgctaaacgctacgattttattctatctgtcttaaataatttttagaatttcatgttagcaaaaaaatatttttacatgatctatgcatttgaactttaattcaattcatatcatacataaaatatattttatgtaaagtgcagtactatgatattgcgtgggcacaataaaactttacaagatgaggcccacatgtaagtcataggagaaaaactaaaaagcgtagggcccactcgtcagccctattctccctctctgtcttttcccccaaaaacagcagagcaagcggaggcggcggcgatggtgatggtgattgcagtggtgcgggctgtatgctgtggatggcgatggcgatggcgatggcgatggcggtggtgtgggctgtctacggtgcattatccatttaagttgtatggatgaaccatgataaaaaaaataatccagaacaattttgtaagcatatgtatcccttaatataatacagaccataattacaatctcaaatgacagcctggtgcaaactgacacatctagtgtgagatagtatgtagaagataatcacacgacattccatataaaaggtgatggtgtgctgtacaaaacaagaggacgatggtgagtaacattcgatgagcaatttactatattcaatatttttttgaattaatttagatcatgcgaacctacctttgctcactagtcaagaacgtctttatacacgatatttctagtgctcttccctgttgaatcaatttctttctttggctttgccaaaatccttgttgttagccttgacacaccccttgacaatgcgacatatagctgaccatgtgaaaacacgggctctagaagatagatcccaacatttgggatggtttgtccttgtgatttgttaatggtcattgcgaaactgagacgtattgggaattgcttcctcttgaatttgaaaggtagagatatatcgtcggagcaagacaaagggattcgtgggatgaacacccttttgctggcatgttgtccaccaacaatctcagcatcaattgcattatcttgaaaagctctaaccattagtctagtaccattacacaatccattatttggatcaaggttgcgaagaagaatcacgggataattgatttttactattagctcgtgtggtggcagaccatttggagtaatagagttaaggtagtccagaggataactgttgtgagggtcatcatcaacagagtcaaagctgtgataaaccttggcctgccctggaaatctgttaatcatattcgcattcagcttgtccacgtaatcatttttagtggatagaatagcacgtgtgctcatataagatgcagagcttgcattcttttcatcatcaagtgagtgaaacacatgattaatcaattcgtgtactgaatcctcgctattcccgtaagcaatcacaatttcatcaggtaagtgaacgtaatcatctctgatagtgttttcagtgccatttccaattctaaggagatatttcgaaaaccatggatcagattgagccctcatgttacgcgacaatctgatcttcctaatattttcccataaatatgatctctgcaatgttgcatcagttatctgggcccttatcccacgtgtaaccacgggaagtaactgtctgaaatcatcgccaaaaacaataacctttcctccaaatggcaatgaacaacccataatgtcttgaagagacctatcaagtgtctctacggcttgacgcttcgtcattgtagcttcatcccaaataattaaggacgccatgtgaagcaattccgcggtgccactttgcttcatgaagttgcacatgctattgtgagaaatcttaatagggattttgaatctcgagtgcgcggtacgtcctccaggcaaaatcgacgctgctgtacgagacgtcgcagttgcaatggctattaatccctcggaccacactctagcaagaagcgccttgtacagaaatgttttgccagtgccacctgggccgtcgataaaaaatacctggctcttcttattagttacatgatcaatgatctcattaaatcctgcacgctgctcatcattaagggatgtgtatatgtctaaatggtcttggtccactggcacgttaagttcgtctataatctcttgtcattacgtcgttgcaacattcacctgattagtgaaaacaaatatatgcatcatgaaactattggtgggtggtgcaaatgtaaactaataagaaaaagacgtgatagtataagaaaaaaaatacctatatcaatgacctcgggaagaccatactccgtgatatccttccccatggaatgaagcaaatcacgtatgtctcgtagcaccatctgctctactgctgcagggttagtgttccctcggctgtaatcttcagacattgcagccttgtgattgtcccatagtgcacggatatcagtgacttcgcaaaataccagtatggttgcaaataaccgacgcagagcagatggcatttggaaagtgaatgcctcgttcaaacaatcgtcatgtgacttatccgtctccacaagccctctcttctcgcatgcctctctaaaggtagagtacgttgtacctgacactgtcctcaaatcttcaaatgaggttgcacctcgcacgtggttgagaagcactctcaagtagtatctctccccctctgcagggtgagcgtacacaacccgtctaacttggcctctctttgttttccttttttgccacacattctgtccggttatccaacggtagtgttcagggaactccttttatagcagtttccttgcttccgggtctacttgattgattttgaaatactccgtaagagttgtcctggtagaagatggaagattaacaacatcctcaagattaccaccctcattatacgtgacatactgcatgttaggaatatgaagttggagctgcagaacagctggatagataccgaacagtggaaaaccaagcatcctatgtatagcctctggtggtgtcacgtatctagcatttctgtactgttgtatctcatttatttccccagatggatcaaccgagaaagatgcacagtcgtgtcctttatacacatacttatagaggtacttcacagatttgatgcttgcacaagcctcaacattgatgtgacaattataccgcataagcagtcctggattatatgggaccacccacctattgtctaacactgcacctctaatcttgacacgccatccatcatctcttctcctgtacaaagggtacgagtccttcccttgttgtgttgcttgattgaactatcgaggaaagttgaagcgatactctccatccaccatacaagcacaattcctattcagtgtgccacatggtccatgcagcatatgcttgatgacaagacgatgtagctcagggtatttggccttgtctggtatctccgtgcaaatcactttatcgtactcatctggggttgtcaatttactgcttgacttcatgatcaacaggatgtgttcatgtggtagtccccttttctgaaactcagtgacgtgcgcgtaagcctgaacctccccaaaatattttttcttcacaataagatccaacacatctcgcagcttagccctgaaaactcttgcgacaaggtctggtcgatcttgaggttgctggccgggttcaagatgttctgttatctcatcccagtatgggttgcacgtcattgtgatgaagtaatctggcctcccaaaacattggacaagagccatcgcattgagaaaccttcgttgcatgtcgcgatcacctcccggaaaagatcgaggtagcacaatcctcttaccaactgccgaaccgcttgtctctccagaagaaagcacgtcaaccacgccctgcaattattaaataacaccatgatcaaataactggtatgttgaatcacagatgggagacaatatcaatagttgtagaaatatgttataccatttacctggtatagctcagcccgaatctttttttggttctcaggttttgagtaccaatcgagtctcatatactcgattttgatgtacatgtcaacggctcattgttggaaaagtcatcctccgaacaaatgatgtttagaagtccccttttaacctgcagcctgaagcaatagtactccctcgctgtgacaaacttgtcctttttccctttgccagatttactactatcgtcattatcatcttcattgtctagatattgtcaacaacctcattctttgcgtccaaacttacatattaatatacataaacaatgcataaggacataaagtttagaaattattcgacaaaagccatgagtaaacgtacccggaagatcattaaaagtgctttcttcgttggtatgtacatcaccaaaagttgatgcttcacatgtttcatccatttccacatcacacggaatctggttgggatcgtcgtacggcatttttaggttccacccagtctccccattagggttaaataaaggatacgccaaaggatcataacaaccatggtatgctttgatataacaaggcttatcaccttttgcatgtaccaagacatgtctatcaaaagttttcatcggatcatccccctctaaccagatagtggcaacctgcgaggcggtgggtgcattatatcttcgttggtcaggtgttacattcgtgttgagctcaatcatgtagtcatctagattggacatggatccaactctactgaaggtctgcacatatgggttctgcaccaaaatacgtaaaatgacccgaacaaggttgatatcaaggtcaggagacctgcgaaccctatgggccagtgcattagcatcttctgtatcataaaagtagagctgcatatggcacggcccttgagaacctggaaccaaattatccaagcgatggtacaacgcaccgtgcacacgaaatgtatacacaccagttcctgctgcagtgctgactcgttggtcaagggtcactccaaggctcgtaaatgagaaatgggagttgaaataccgtatgtgctttctgaaatactttgcatcattatgcacttggctggtaaacaaccgtattaattcatcaggcaccgttggaatcttaacatttatctttccctccctacaacaaaacccaggagactcaaattgaaaccttatcgcctgacagtgtttgcaatctggcactttttttaaaacatggtgtgtctttggtagcttatggtacacacgatcgtgtgggtcatcagtactaatcccaatcacaccagtacatcaacacgatatgactcgtatccatcatcctccagaacttgactgacaccttcaaaatcattgtccacacattttgcgtcctcaacccccctatagatgatgcatgagacgatatattttaataatggacaagataaaataactgtttaggtgattttttgagaactcaacatcgacgacaccatctacaattgcaggctcgaataatgcactatcgaattcgacgtagttggtttgtggaatggcatgatgaacaattggtttctgtatagtttgactttgtgtaactccatctggttacaacgtatatgtttggattaatattgggtaacactataaatagagagcaatgcacatacttgtatctaatgttctcacctatgactaaaccggctcctgtctgaccaaggtttgaagcttttcttacattgaatcgaggtttgtagacatcatttctgtgtaaccaatcatttggatcatctggatcatgattctccttgccggccacctgcgcatcatttagaatggtggaacatactgttccataaagcgatccttcattaatggtggagaaagcaccttagatatcaaaacaatatcagaatattggattaaagacggagaaattagcggaaggcattaatcttaccaatagcaggggggcttgatgtagcactccagccgtcaacattgttcaacttagccttctttcgggcacgccattcacgctgatatttcgtcttctgttccctcctcttgtctatactcgacatctcattttcactctttttgtctatgctcaacattttagaatgattgaccttttgactttcagtcacttgcgagtggcaagaggtcggtgtatgaattgttttgtatgatgttacttcatctggaacattgtttgactctgccttcctctttgcgcttttctcgtgccattcacattgctttctgctcttctctctcttttctttagctaacaactgagcatgcgtcaaattctgcatgacagtggctgatgctcctccaccatcaacagaattagactgagccttcctctttgctcgccattcacgcagttttctattcttttcatctttcttctctttcactaacaattcagtctgtgtcaaattttgcattatagcatcatttgtcacaccttcttcaccaaattttgactcggccttctgtgcgctccttgcacgccattcacatagctttatgttcttttcttctttcttttgtttgtctaacatattggtttgtgacacttgattaggtgtggtaaacacaaaaggattgacacatgtctcatactcagccttcttttcatgttgatttgtgtgctttctagcaatttctctccttttatgttcattcgttgtaaaaggtgtgtttggagctgttgtagttttattgcaaaatggaaaaaaacaaaagatgtggttcatatatgtatacaaagagcagtcaaaaagtagaaaatattatacatgctacaacacctggagaaacattagttacatctctgaaggcaatacgccccccattggctgaagcatttggatccatacctagctgataaaatataaacaaacctgagattcatccaattcataattgtggtttcatactgtatatagaaatgttatacatcaattgaatgtatcactacaaataacaaagcataatataacctttatacttataacaatacaagcccaaccagatccatttcactgtcaactttaaagttgggactcggttgcaaataaaaagaagaagttatacagtatacaaatcagttatcaagtcaatgattagcggtagagcaataccgatacagtatgaaaaaaagtggctcacctgaacaggataatcaaaatgttaacaatcttatttgcaaaaggagttaatctgaataacttatattttatcatgaaaggtaaaaactgtgatatattaatgttgtaaacataaggactgatgggccatgggtgtagatatacagaaattctcatcgaggattcccaatttctagcacaatttacattgaatatattgagcataaatgatgtttttacaaaagatcgacggcagggatacttacgggaaagaggagacatattagggatggggtaggggtggggaaggggtcttgtacctttcagcagtggtagctcttgaggcggcagcggcgtcgcgttgtcggctgtggatggcggcaccctcggcctccactgcctctgcacggaagctcaaatcttaaagcttgggagcttttagagtcctagattcagatccatggaaggatttacaacttggttgcacgagtttcatcagttgttggcttgagaattaacacatattcagatggcacgtctttgtattgtgtgattagccaaatcccatactccataacctcaatggataagtttggcttacattgctgatcagataaagggaaaagaatagcatttgtagaactaaatcccaacagtttacacccgatcactaaaagtagagaaggaaattttagctatggatcgaatctgtcaatttatttcagtaatgtttctatttgaggttgcttaacagagtaagaaaatgatattcttttgtgaaagaatctatttaattctcatatgaaatccatcgcatacacacaccatgtcacatttaaaattattatatcataacacaaaatcaggaaagaatctgttagaggtaaaaactcaaccttatcgcgggcggcggcagcggtgaggtgcatgagatcgtgggcggtgacgattggatgccaagtccggagtatatgatatggaaccctataaaaacatgaaagggttcattagtagcttcatccaaccagttctatttgaatttaaaacaaacaagtgtactatgcactttgcaactcgcctatagtgttcattgatctaatatctgccaatattgctctaattttggaggtgtagaaactgttacctgcattaactttgaatgattcacaaaggagagcattttctcacatggctaaaaatgatgtataggaacaggttgacttgtatttaatccaaaaggggagaatcagtaaaaataaaccattcaggcaaatagacagaactgtctttttctttttctgaaagtgacagaaccaagttgggaaacacaattctactctgattcgagtcaagcttaatgaaagacctgatcatgcagtggtttgtcaagggttaaacaaccaaagctaaaaatcagcacacaaatttcctttaccaaaagtacatatgaacgtcaagcaccaggtagagctatcaatcatgtgcatggcaaaatttggatgtctgacgataataatatgcttgggaaaggatcagcatgcccaatcatacaaatggtccagcaagtcatataagttattttataagattacaagtttctatagattatatgatttattatcacgagtaaagcagcacaaattgttcttatggaatttataagctgacatgtcatcctattttttagtatttgtctgacagatagtttcaatacattagaatgcataccatcgactcttcactatccagtccacaaaattccaaaattctaaatattgttctttaaaaaaatgatgttgatcaaaaaaatgggggagggaagggagggatctggcagccagggacggcaaggtcggtggcgacggcggtggggagggagctggtggaggacggcgtgggcaacggggaggatcgatggcggcggtagtgggggagggatctggtggaagggcggtgaaagacgtgcgggcgcgcggaagggcgaagagacacggatcattatagtgctggctagtttaaccacatataagcgtgcaatgttaggaaataatgttcaatcagtatagtgtgggctagttgtagttaaataaaaaagtttacatatggaacgaatctgccatttttagt

SEQ ID NO: 26329 - DNA, 30255 bp, Oryza sativa
  unsure (1)..(30255): unsure at all n locations
attatcggtctgtgacagtcacagccggtcagatccgggttaggtgcggccaggcggtctacgcacgccttgccccatccggcaaggtgtaagttttaagcacttcccccccccaattgaagctagcgtgttacatcccagagatggcacgttagccccgatcgatttataccaggcttcatcctaaccattacaggcgaggtgttacacgaagaagggcaaacatgcatgttattaaactgacgcatggtggacaagaatgaccggtctgacactgatcgcatcagcaacgggcagccacgatctcacgttgcgcctgtctccgccgggagtggaggtaggtgtgggccgtcccatcggagtgtcattcggagggcaaccataccaatctccgtccataaagagaagaaaagtccagtttggaaagagaagggtgcatgtggtatccccttgaagtataaaaggaggaccttgcccatagagaaggggttggttgattctttcccggattgagtgctgagaacggggggggaagtcagctcacactttgtaactcattcatacacagatccaccaaaacacaggagtagggtattacgcttctcagcggcccgaacctgtatagatcgccggtgtctcgtgtttcttgctggcagacgatctttccacatacagagagagagcgagagcttgagattgcaccctaagcccccggccgaaccggcaaaggggggcctgcgcggtctcccggtgaggagccacgagctccgtcagacatgtataccgcaaggacaacatcgaaccggatgatctagcacggcgtgcgtccagatgagagccactcgaacctagcacctttctggacgtcctgacaaggccatcagtgaaagacgcaagcggcaaagatagcccggtctccctcaacaatagctcaggggctacaaaggcagagcgcgtcgttgccgacattgagaccacagacgactggcacaccccactcatcaaattcataggcagcgaagagttgcccgaggacgacgcaaaagcagagaaaatatcccgtaaagcaaaagtctactgtatgataggcaacgatctatacaagaaggcgccaaacggggtacttctaaaatgcgtctcgtccgacgacggcagacatctcctcctcgatatacatgaaaggatctgtgggtcacatgccgccggtcggacattagtcggaaaggcttttcgacaagggttcttgtaacgccccgattttcgttcgggtttaaaaatcaattaataatacattttctagaaattaaataaaagttaaatcaatttatccaagtgaaatgttgggagaattaaaattttcccttaaaaatcattggccgggaatattttgtaatattctttgtgccctaatgtactctccggaattttccgtgaattttcggagctcgagaaatagttttaatagcacaaaggtcattgcatcaatttaaataaaaagaaaacaaaataaacttccccttcctccctttcgggctcggcccaaaatcctctctccttcccctcccgcggcccggcttgcctcccctttttggcgcaagtcttcttttcctccctcccggcctcccctctcactcaggccgacaggtgggacccgtggaccccacctgtcatccccaacctccggccagctccaaccgccgcccacgccggccactccctccgccgatcccgcacctcccctcgtcccaaccggcgtggacccgagaccccttccacctcgcgaccacatcccgccccactccccctctctccccgcgggaatcaacgccacgccgagccggcacacccccacgacgccggcccactttccctcgaaatccggcgctccccggccctctcctcgcccccttgagctataaaatcaatccccgtggactcctcttcctttttccccgttttcccgagtcccccacgccctctaccgagctctccacgccgatccccttcgccgccgctcgccggcgatgtccagccgcccgccaccgccgctcccgtcgctgccgcgctgcgccgccaccacctatagcatcacaccaccccaccgcaccccggcatccactccatctccctcctccaccgccggaaccaccttcccatcgcgaggccgagccactaccgccacacaccgccttcagccggccgctgccgctgcgttagtcgtcgccgcacctcgccgcttgcgccgtcggcaacgccgtgccaagctctaccccggcctccgctccgtttccccattccaccaccgcaaccacccttccaccgtgcatcccgagccacctccaccatacgccgcctccagccgtgtgccaccgtcgccttagccgccgccgcgtcgctccgtcttcacctctcgcctcgcagcgccgtgcagcacctcggtcaccgttgttcatcgccggaaacccaccggaacgtggtacctctcggtcgccggtgagccccaccattcctctcctctctggcgtggtattctcgccgctccggtcgcctatttccctccctaaccgctccaataatttccctaggtcttgccggccctcggccgcggctccgccatggtcgggcgtcgtcggaccgccgttcccgtcgcctcccgtgtcggccgccgccatcctttccgccgccggtcgcctccccatggtcgtcccgtcgccggcgctcctcggtgaggacccccttcatctcctttccctttcccctcttttcgtcgcctcccgtgcgtgccgtcgcgccggtggtcgtcgccggcgaccatcgggccgtgcgccgtcgctcccggccggccgaccggtgagctggctcccgctcgcccgtggccgcccgatcctccttcggggcgatctgggccgtccacgtggccttcccgtgccgcccgcgtcggtgcctctgtggcgccacgtcggcgccacctccgctagccgtccgtcgtggccgccacgtgtctgccacgtggtgcgcccgcggaccagcgcatgcgtggactcggtccacggtgcgcccgccacccgtgagtcaccgtcaggtggggcccgcttgccggcgccacctctcccccgtcggatgacgtcataattgatttaaattgcgcaataaatcggtaataattctagaaattcattaaaatggctcaaaaccttctaaaattcatatctaattcattcgaactccgaattgagccattcaacttgcaaaattcatctaaaattgagctctacatgtttgtttactttttatgtactgttttcttggtgtttattagagtttttcctcgttttgcgtgccagcgtgtagtttccgtcgtttcggaagtccgcggtcgcgaggaaaagagttcagaagatcaaagtgaagaagcaaggcaagtcacacattctccttgagcatgttgatcccaatttataaatgttttaccgtttacaaataaatatgcatgttttgctaattacatgggatcagggttttcctatctgctcgcttgcgccatgtttacttgatatctgttctttgtcaaccttgggtaataaattgactagcttgtgttacttatgtgacctagctagaactatatgcttagccatgcttaattaccactagctcagtcgatgggataattgcagtattagacattctagtatcttgttgagctgcgtgctcgagacatctggccatgttttatggtcgtaattatccaactaaaatgcgactgaatggtgggctgtggatgcatggttttgcgagtcgcacccatagcaattaaggaccggttcacgggaaaccctggaagacttacagcgcttgccacaagcgggaatgggtaactgcttgatctgaagtatagctcgaccctttcctaggcaccggtggcgagggtgggcgtgatggagttgggtcggccggggtgtccggttgtccagctgccggattcaccgcggcgcaagaggggaccgcccactgccttttgaggggtgggggtgaaaccttagcgtggtgtggatggttaggggagggttatgcgaagggtctcgtcacaatcactcgacatggtgacgtgtgcatcatgggcacatgatgacgcggtgacatgtcggtgggttgtgtcttgtgggtacagttgtgcacctctggccagagtaaaactattcgaatagccgtgcccgcggttatgggcgatcgaccagattcaccgtgattagtctcacacctaataaatcgacccaatgcactgtagtaaaggtgggttggttgggcctgttcaacgtggtgtagcgttgatcagtggagatttaatattactttaattactcaacagttttactgttttgctcaataaaatgttttacaactgcctttatgcaaatagccacaaaccgtccttgtgttcccccttgcacgtctgcatcgttggtgtggcttgctgagtacggtggttgtactcagccttgctattattcccccttttcagaagtgtagtgcttctgagctgaagatggagttagaggaccaaggctcagaccccagttgagttttgcctgtggagtggagctgaagccccgctaggatcgcctttttccgctgctgctgcttttgtttcggtgtgaggactaagtgcctcttctgtaagtattttacgctttatttacgtttggaactgtttattacttgtcgttttgtgtaccctggctggtcctggacagggatttaatacacaaaatagtctggaaatttgggctaaatttctgggcgtgacagttcttctggccaaccgccctcaaagatgcttgcgacatggtttagcggtgtgaagctgtcaattccacagtaaacacacaaggctaccagcgcaagcactccagaccatccctctcacttggccgttctcgtactgggggctagatatactcggcccattcccacgaggacagggcggctacaagttcctattcgtggcgattgataaattcactaagtggattgaagcgacacccacgggggaaatcaaggccgacaacgccatcaaattcatcaaagggatattctgtagatttggattgccccaccgtatcataacggacaacggctcccagttcatcagtgtcgatttccaggactactgcatcaggctgggagtcaagatctgcttcgctcggtttctcaccctcagagcaatggacaagtcgagagggcaaacggcatagtactacaaggaatcaagacccgcgtctacgacaggctcatgtcacatgacaagaagtgggtcgaagaacttccatcagtactatgggccgtgcgtaccacaccgacaacgtctaacaaggagacacccttcttcctcgtgtacggctcagaggctatgctccccaccaagctacgataccaaagtacacgagcacataagtactccgatgagaatcaggaggagcagcgaaatgacgatgtgaatctactcgaagaacatcgcgaacgagttgtcgttcgagcagccagctaccaacaggcccttcaccgctactacgagaaacgcatccgagcacgcacactttcgatcggggactacgtcctccgacgggttcaaagtcaagcagggcgaaacaagctctcacccaaatgggaaggaccgtacacgatcacacaagttctgcagccaggcgcattcaaaattgcagacggcgatggtcgcgagttggcaaattcctggaacattaatcaattacgtaaattctatgtataaatcaatagtatccatacttgtaagacatcttacagcttcaataaagcctattttcaggtacaaactacaatcaaagtgttccttcccgatgatcccttacccagatgacacctagcgttgaaacctatcctcatgtccctttacgccgtcttgacaaggcctccaaggaacctaagggaacttcggctggggacgcccagagccgataaggccttgtcggatcctgtagagatgaaagaccatgtaagatctagtcgtgtaagagttctcgccgtgcgtattaaccaagccgtgtaatcggaaattaactttccaacttcacggctgggggctaggatcagtgcttgttcaaccgaggcaggtcaaaggtctaagagccttatcttccgagacgaattctccgatgataaggctgggggctagggagagtgtataactcaaacgactgatcgaagtcacgaagtgagaagacactcatacacgctacatccagagtaagaaagcttagttagatagatttcttttctatttcacaagtacttcttacaattccacaaaaatccaaaattatattacactttttcctaagacatttgtcacaggacacggagactaccaggaaggccaacgccagtccatggactggaagaccttctccgccagcggtgccatcgacctcgccaggccatctatctccgtaggagttcttcgagaacgagaatacccttcgtagaggaactcgaggtgcagctgcgggcgatgatgtcgtatgcaagccaacacatgccccccggcatatcggctcgatcgacgacactcctgcttcagggcctcgtcgatacgctggtcgatgccttcgagctgggcacaggccccattcagccacgagatgtatccagccgccgattcctcgggatccccacggggtactcggagctctctacatactcttgacatggaggtgcagcaactcttcagatacgagttgaaccacacagcgcgaccccggagtgtctccacggcctggtccttcttcacttccagcatagtcctctcgagtttcgcgacctcaaacttcgtcctctaatactggatgcgacgatcctggtcagcaagcacactctcgaggtctgctcagtatggaaacgactaagtcaaactgctcttctcttccgagaatacagcagatcaagtcgatccagacggaagagtaaaggagatgaaaacaaagacaaccaacctaagggagtcgtcgccatacccgtttccacaggtgaattttgagctacgtcgccatccagcacatgtggctcgaacgcaagtatcggaacgatcactggcagctcaggctgcccgcgctgctggacatcctcgacatcaacatctctacatacgacaacaaagtactcaagatcaaaatgctgaagaaagccaaggtgataactgcacacacaaaggcagttggaaccaatgagagttttacaaagcatgactaaagagtacaaaagagccaaaatcctactcttcaaaaagcgggaggacagactcccccagatcgccgacttctttcatcacatccttgcgcgcgtcgctagccgccccctgatccaagatcttccgcagatcgagttcagggtgcaccagcctcacacacgcaaggacatggcacgccccggtatagatctcgttgggcgtctcctctctgatcatggccgcgtgcttggaggggatcgcctccatcgccatcgccagctccgcaagcgaagtcgtcagcgagaactcatcgggattcaccggaatgatggacttgataccacactccccggtgagttggtgcagactagtgtaggtgacccgcaacgagccacgtatttccgacaagttgttctcgagctccgacatgcggtgctcgagcccctgccgttgtcgctcgttgccggccaccagttccctcatcttctggaggtcctcgtgaacctccgccagatcacgcgccagccggtcggtgcgctcattcgccgacgatgccgtcgtcgccctcgcctccacgatctcgcggctaacaccgcgagcaccagcctcgaggaggtgccccatctcgacctggagctcctcccatgtgaggacggcagtcggcggaccccgaccagccgcgagatcgctggctgggccactcggcgtcacctcgcggctcctgggtacgaccacgacatctgtcgaggccatagtaggggacgcgctggaagtccctccggacccatcttgcgccgctttcacccgcgccgccctgtgaaaggctacaattgagacatgctgcaagagctcgatgaagtgataaaacctcaaagttcacccacttacttctcaccaagcgtcacaagccgctgccgtcgtggaggtgggggggacgcatccgaggcctggagtataacgggcatgatatgaggaggaagtttcccgactacgcgatgaaggacaaggagaacttaccgagagggtgggtgtctttcgacgatgtccgatcacagaggagaatttcctcccctttttcggagcgttgccgccactcgttgtggcagcagcggcagcagtgtcagacgcctccttggcgattttctccttcagcgacgccgccacctgatggtccacgagcggcctgatgatatcagtcagagggagagcctacgcttcataaagtcacaatgcgatcccggaagaaaaatgcaaaagggccgctgagtacacttacattgatggcagcttcacgttcggctgcccctctctcgcaacgggggacggggacgtcgctcgccgttgtcgggccgctgaccatcaattggccgacgcggtgctccacggttgtgctgttcaagcctgtagatcgagaccagaatccgataagtcaggaggaacacgcacataagggagtcaatttaactacaagaaaaataccccgaggagaaacccgggtcgcatcctctagcccagaatagtcaaaggctgggtgggctcgagcctggagcggctgaatccgcctaccaatgaagtcggcagcgacttcataccccgacaacccccgtactcggaggtcatcaatgggatcgataaaaattggagggacggggtcaaggcgggtttggcggtccaaggtgaaatcttgtctggttgctccgttggaacaatgaagaccggatccgaatcttctatctgaagatagaaccacctcccccgccatttgctgtgagataaggggcactggaaggggatgtatcgcgacttcaggccatcccgaaaccggaaaccgacacacccggacacctttttaggttccatccagcgcaactcatagtaaaagcggaagaggtcaagaaacggctctaccccaatgtaggcctcacaaagatgcgaaaagatactgaggaaggcgatggaattggggttcaaatggagcaaggaaaggccgtagaaattcaagaccaagagaagaaattcagaaggcggaggaagaaaatcacaaagaatatagtcctcgatctcaaccatgcgacccaggacatgttggggttcagtacctcctgcttctctctccatggtcccacgaccgggaagggcgccatcctcctgtagcttcttcagcgatgcgctggtggaggtagacttgtcaaggtccattgccgccggggatcgccggagaaaggaccgagatgagctagctagggtttttgctgaagcagagaagacgaggaacgcttggaggctggagagttttttcacaaccagcggacttcaaattggatccccaaaactcccttaaatagtcgcatttccgacggtgcaaattccaaggaaaggagagagattgccgccggaaatttctgggtccgttacgcgtggcagtttttcggacttcaatttaaattcactcatgaccgttgagcttcactgggcgttgtcaatcacttcttatccctcggtcctcacaccgagaacgacaacaacctcgacatcagaagtcacgatcgattacacgagttcatttaagcagaagtcgggggctactgtcagggttacgggtaaggtataccctctacccttcgatatacgtcatacatacgcgtatacggacgttttcggcatacgttaaggaaattcatcatggagttcacagatggaaggagtcctactcggacagaactgggtcatcattttatcgtgccgagtccgatgtctccgagtcctacttggagaccagttaacctgcgatataaaagggacccccgggaggacctaagggatcaaatctcatagtcagcacatccaccacagcctacggagttgaagccaagtcgccaggtgatctagtcgaatcaactcgactacgatctcattggtatcatcgagttctgcttctccttctgtaatctgtggtttccattatataatcccatatcaactggtttagggctattacctatcaaggggcctgaaccagtataatctttgttttctgtctgcttgatgtcgtattacgtagatcctcataccagcgtaccccactaccctctatatccggtctacgggtatcccccgtcgacagtggcgtgccaggtagggggacttggtgctcaaggttctactactatgacatccagcttcgtcgacaacagcgtcaacaccaacctcaaccaaggagttcctacttcaacaatgctggtgtggactcaagtcggcgaaatcgtcttcccggtttacaccacggtgtcgatctcggctgtccatcaatgaccgaagcgagaacacagtggctacaacccagnatgactccatgtcgaaggatcctcccgccgaagcgaagaacggaacgtcgatgacatctgagccgagaaaggatcntagtacgtccnaaccttgtctttccgacaagaatcactagccgacgaggatgatttccgaggtgacaaggtcctggtgtcctatccacaaaaccagaaaacacaacttgcaagcctgctgggtttttctcaacgtccacgcagaaattcgtgcctgcaaagagtgcggaattcagcgtacttctcaaactcgtgatgtatattgtcctattcacaagacaaagaatcacgacctctcaggctgcaaggtctttctcagcgccatgaagacgtcacctcctaaggtccaacagtcacgcatccccctcagggatgaggacaaggaacaaggagcgacggtgatttcagatcgattcgttggggtagtcgatatctatcctcacgaaccatcagtcttgcatctgctcgaagactatggctcatcgtcaacaagtatgccgcgcgaggtattggctatcgacgagaccggcacgtcagcgcgcgctaatgtggaagcggagaatcaagtgactacaccggcccagcacatcagggccgtcaacgcaatactgagggaaaccccttacgatcccgttctgaacgacgatctcgcacgatggacagaacagttgcgggaatcagtgaccaacctcagcaacgcgttcgaggaggccgctactgcagcgcacccggaacagccaccaactggcggtgctaatggtgaaaaccctaaacagcgggaattgcctcatcgagccacccctccacctcgcggcatcaacgatctccgcgatcacctgaatggccgccgagaggcgcgatgtgcacgagacaacgagaacagtttccgacatcgcgtctcttcacggcgtcacgataacgaagaacgaggaggccgtaaaaaagaagaccgagaccgtgataaccgccacaaccgctacgatcacgacgatcgcgaacggcgggtgctggncgatactggtcgagaacgccgccatancgacgacgacgacgaagatcggcgccgagacaccaacggaagacgacgacaggattctcgagaacccgaccgacgtcctcgtaatcgtacaccggaaccaagtgacccatcgtcatcgtcgtcatcttcctcatcctcatcatcagataggtatccacgaaggacgtacgaccgccgacaacccatcgcccccagcgctggttgaagagctttcagtcgttcactgcgtgatgtctgatggcctgagagatttcgaccaggagcaatagagaagtacgatggagtaccgacccagaagaattccttcaggtttactccatggtactctacgctgccggagcggacgacaacgcgttggcgaattacttgccaaccacattgaaagtctctgcgcgttcatggctgatgcatcttcccccctactcgatttcttcgtgggcagacctgtggcagcagttcatcgccaacttccaaggaacttacaagcgccacgcgatcgaagacgacctacatgcgttgacacagaatccgggtgaatccttgagggattatgttcggcgctttaatgagtgcagaaatacgatccccgaaatcaccgatgcttctgtaatccgcgctttcaagtccggtgtcagagatcgctatactacctaggagttggcaacgaggcgcgtcacgactactcggagattatttgaaattgtcgatcgttgcgctcatgcggacgacgcactgagacgcaagaacgacaaaccaaagaccggaggagagaagaaaccagccaaggacgcacccgagtcaagcaagaagaaaaattgcaagagtgggaaaaggaaagctcaagcggaagttatcgcaacagaatacgcggaccctcctaagcgccctgacccacaaggcagcgacgcgaagaaaacatggtgccctatacacaagtcagacagacactctctagaagattgcctcgtcttcaaaaagtcgctcgcaaaacacatgccattggaaaaaggcaagcgagtacgcgtggtcgagaaggacgctgaggcggctactcaggaatcgggctcagcatacccagactctgatctccatgtctcgcacatcttcggaggttccacgacatactcctcaaagcgagaatacaagaaagtggaacgtgaagtctgttcgacgtggcagggagctgcgcccaagatgaagtggtctgagcagaagatagaattctcagaagaggaccaccccaagactgctgtcatcccagggcgatatccgatcgtggtcgaacccactgttcggaatatcaaggtcgcacgagttatgatcgacgacggcagctcaatcaaccttctcttcgctagcaccttggacgcgatggggatcccacgaagcgagttgacacccaccgatcaacccttcatggaatcactactcagtcatcgtccaaaccattgggcaaaattacgttgcttgtgactttcggccaagcaaataacttccgaacggagcagatcacctttgatgtcgctgaattcgatacagcatacaatgctatcattgggagaactgcactcgcgaagttcgtggccgcatctaactacgtgtatcaagtgctcaagatgccgggaccgaagggaacaatcactattcaagggaattctaagctggcagtgcaatgcgacaagcggagcctcgacatggtcgagcacacgcccagcccacccgccacagctgagccacccaagaaagtgagcaaaacaaacaagacgccgaaaccggacggtgcaatcaagatcgttccactctctagtgccaaccccgacaagacagtcaaaatcggggcatcactaggcgggaaataggaactcgcgctcatcaccttcctccgcgaaaatgctaacgtgttcgcttggcggccgtccgacatgccgggggtacccagggaggtgattgatcacaaaatcatggtgcgacccaacgccaaaccagtaaagtaaaaactgcggagatttacaccagatcgaaaacaagccatacgagaagagctcgacaagcttctcaaagctggtttcatcagagaggtactccatccagagtggctagccaacccagtcatggtgcggaaggccaacgggaaatggagaatgtgtgtcgatttcaccgacctcaacaaggcgtgtcccaaggatcacttccctcttcctcgaatagaccaactggtggactcaacagccggttgtgagttgttgagctttctcgacgcttactccggctaccaccaaatcaacatggcgaaagaggacgaggagaagacagcattcttcacgccgttcggggtattctgctacgttaagatgccgatcggactaataaccgcaggaaacactttccaacgcacggtctagggcgcacttagcggccaactcggaaacaatgtcgaggcctacgtcgacaacattgttgttaagaccaagacaagcgactcattgattgacagtctgcgggaaacgttcgacaacctccgacgatatcgcctcatgctcaatccagagaagtgcacgttcggagtaccatcgggaaagctgcttggtttcctcgtctctagcagaggaatagaagcaaatcccgagaagatcaacgcaatcgaaaacataaagtcgcctacaagactcaaggaagtacagaagctaaccagatgcatggcggcactaagcaggttcgtcactaggatgggagagcgaggacaacccttcttcactctgctgaagaagcaagacaaatttgtatggacacaggaagccgaagaggcattcattgcactcaagcgctacctatcaaatccacctgtacttgttgccccccaacctaatgaagaattatttctctatattgccgccacgccatattccgttagcactgtcattgttgtcgagagagagaaagtgcaacgaccagtctactacgtagacaagatatccacagatccaaaaactgctctacgtggtaatcatgacatcaagaaagctacgccactacttccaagcccacagggtcaaagttgtatcctccttccctctcggtgaagtagtgagaaacaaagacgttgtcggccgcattgcgaaatgggtagtcgagctaagccaatttaatgtccgctttgtgccacgaacaaccatcaagtccaggtacttgccgacttcgtagccgattggactatgactgataacaggtcaggcaaccaaattgacaacgaaacgtggacaatggtgttcgacggcgcactcaacagccaaggagcaggggcatgattcatcttgacatcacctttgggagatcagttcaagcatgcaattcacctcaacttcagggcgaccaacaacagccgagtacgaaggactactcgccgggataagagcagcagctgcactcggagttaggtgactgatcatgaaaggggattccgaactagtcgcgaaccagatgcataaagattacaaatgctctagccccgagttatctaagtatctcgcagaagtcaggaagctggaaaaaaggttcgatgggatcgagatccgacattgtcggtgatatgggaccgggagtattgcgcccggaggcttgaggcagatggaatcgcccacgtggcctggcaccttcggggacgtcgggcccgagggtgaggtgtccgccctcctcctgatttccccgagggggggtcgggttgcacctgccccgaccccgagggccgaggtgccccgaccccctgaggggtttgcactatgtacatgggttgggtgagcacagcagggctcacctaaccgcatttattgcgcatcggctaagcgtgtcacgccgcacgaagtgcagtgcagtgcactcgattatccggtctgtgaccagtcacagaccggtcagatcgcgggttaggtggcggcaggcggtctgacgcacgccttgccccatcccgtcaaggtgtgagcttctaagcacttccccccccccaactggagctagcgtgttacatcccagagatggcacgttagccccgatcgatttataccaggcttcatcctaaccattacaggcgaggtgttacacgaagaagggcaaacatgcatgttattaaactgacgcatggtggacaagaatgaccggtctgacactgatcgcatcagcaacgggcagccacgatctcacgttgcgcctgtctccgccgggagtggaggtaggtgtgggccgtcccatcggagtgtcattcggagggcaaccataccaatctccgtccataaagagaagaaaagtccagtttggaaagagaagggtgcatgtggtatccccttgaagtataaaaggaggaccttgcccatagagaaggggttggttgattctttcccggattgagtgctgagaacggggggggaagtcagctcacactttgtaactcattcatacacagatccaccaaaacacaggagtagggtattacgcttctcagcggcccgaacctgtatagatcgccggtgtctcgtgtttcttgctggcagacgatctttccacatacagagagagagcgagagcttgagattgcaccctaagcccccggccgaaccggcaaaggggggcctgcgcggtctcccggtgaggagccacgagctccgtcatctggcgcgccaggtagggggctcagtgtgtgttttctgagctctcagactcttccgcgtgcgccaagtctttcttgttcagcataatggctgagcaaggaaaagcgcacgacctctctccgagtgtgagcggcgacgacggggagccgaatccacgccgtcgagctcgtactcccccacctcctccgcgccaaagccctaagcagggggaggcgcttgagagggttgataaatccgcagcatcaccgatcgcgggtgatgcaggagaacggcgagatggggagcggcgcctcctcgtctacggcgacggcagcacgcctcagggtgcgcttcaggctgctggcgcgctcctacgacacccgcctgtcgtccatgacccggagtctccagcccaacgatggctggaagacgtggccaacttggtcatgacggcacagcagcgcctgggtgctggtggacggtccgccaccaccaagacctccggcgccgctaccaccggctccgtgtcgtcaaggcggagggcgcggcgagcggcggcggctgcacggcattcggctgccactccctcgtcgacaccctcgactcgggaggatcagcatggggagccggatgcccgcctcgacatcgagcgccggcgtaatagccggcgtactccccgtgcaacggagggcgcctcttcgtccagagtgtcacctcgacatggacgtgaggaccagccctccgtgcccccggctggtggtgtcggctgtagagcctttgtggcgagtcttcggaatgtccgttggcccccaaggttccggcccaccattaccgagaagtacgatgggagcgtcaatcccaccgagtttctccaggtctatacgaccgggatcgaggccgctgggggtgacgacagggtcatggcgaacttctttcccatggccctaaaaggacaggcgcggggttggctgatgaacctgccacccgcgtcggtccactcctgggaagatttgtgccaacagttcaccatgaacttccaaggcacatatccgcgcccaggcgaagaagcggacttgcatgcagtgcagcgaggcgatgatgaatcgcttcgctcgtacattcagcggttttgccaagtccgcaacactataccatgcatccctgcacacgcggtgatctacgcgttcagggggggcgtgcggcacaaccgcatgctcgaaaagatcgcttccaaagagccccagactaccgcggagctttttcagctcgcggaccgagtggctcgtaaggaggaagcgtggacatggaactcctccggttccggagtggcagcttcggccgcccccggatccgccgctcagacagggcggcgtgacaggaggaggaagaagaggtcggaccgctccggcgacgagggtcatgtcctcgccgtcgagggcgctccgcgggccacccgaaaggggaggcctgtgagcgacaagaagaaagaggctggtactcccagcagggagcgccccgccggcaggtggtgctccgtccacaacacctccctccacgatctcgcggactgtcgcgcagtcaaaaacctggctgagcgaacgaggaagtgggaggaggacaggaggcaggaacgccatgagggcaagtccccggcggttccttccggcaaacggcgaagtgaggccaagcagaaggcccccgccgttgacatcgatgatggtgatgatgacctaggtttccaagaacctggggccaccatcgccaccgtcgatggaggagcgtgtgctcacgtctctcgccggagcttcaaggctatgaagcgagagcttctggccatggcccctactcatgaggcgacgcgtcgggcgcggtggtcggaggttgctctcactttcgaccagaccgaccacccaccgtgcattgcccggggagggcaggttgcgatggtggtttctcccaccatctgcaacgtgaagttgggacgtgtcctcatagatggaggagcggctctcaacatcctttcccccgcggcctttgatgctatcaaggccccggggatggtgctccgaccgtcccagccgattatcggtgtgacgccggggcacacgtggccattaggtcacatcgacctaccggtcaccttcggtggacccgccaacttccgcacagagcgggtgagcttcgatgtggcggacctcagtctgccctacaacgcggtcctagggaggcccgcgttggtgaagttcatggcggcggtccactacgcctacctccagatgaagatgccgggccctggtggccccatctctgtccgtggcgaccttaaagtcgcgctcgcttgcatggagcaacgcgcggaccacctcgctgccgcgaccaagcccgagggtggtgacgagaggcttggcgcctctgcccccaccgccccgaggcagcggatggccacatgcgacgaggtcccggtcaaggaggttgccttgggcgacggcccatccaagaccacacggatcggtggtcttctggatggcaaataggaagacgcgctcgtctccttcctgcgggcaaacgctgatgtcttcgcatggagaccagcggacatgcccggggtccccagggaggtgattgagcaccgtctcgccgtgcggccgggcgcaaggccggtccggcagaaagtacggcggcaagccccggagcgtcaagccttcatccgcgaggaggtggcgagacttctagaggccggattcatccgtgaagtcatccatccggagtggctggcgaacccggtggtcgttcccaaggcgaacggcaagcttcggatgtgcatcgactacaccgaccttaacaaggcatgtcctaaggatccttaccccctgcctcgcatagatcagatcgtcgactccactgcggggtgcgaccttttgtgttttctagatgcatactctggttatcatcagattcgcatggctagggaggatgaggaaaaaactgcgttcattacccccgtaggaacctattgttatacatcaatgcccttcgggttaaagaatgcaggtcctacttttcaacgtactactcgaatttctttgggtagccaaatagggcgtaatgttgaggcttatgtcgatgacttggttgtaaaaacgcgcaaccaagaaactttactttcagatctagcggaaacttttgggaacctccgctccgcccgcataaaactgaaccccgataagtgtgtgtttggtgtacctgcgggcaagcttctcgggtttttgatctctgcccgaggcattgaggccaatcccgagaagatacgagctatagagcggatccgcccccccagcaaacttagggatgtgcagtgcgtcactggttgcatggccgccctaagtcgtttcatatcgaggctgggagagaaggcgctgcccttgtttaagctcctcaagcgctcagggccgtttacttggacggaggaagctgaaaatgcccttgcccagttgaaggcgtatctcagctctcctccagttctggtcgccccggagccaaatgagtccctgctactttacttagcggcgaccccccaagtggttagtgcggcgttagttgtggagcgcgatgaggacaatcctcatcctgcgcacccctactccgtgccgacttggcccgggagcaagcagggaggagaggcccccgagtcaaacggtggcctaaggcccctgacgaccggagacggccctctacccgcttgtcagacggtgctgggtgcccccgaccctcaggaaggccccgaggccactgcgggaaggccgcacttaacgccctctgaccccgaggctaaccctgtgctgactcgacccgggaaagagcaggaagaagaggcccccgagccgaacggaggccagaggcccctgacgaccggagttggccctttgcccgcttgtccgacgatgccaggagcccccgacccccaggacggccccgaggccactgagggaaggccgcccctttcatcctccgaccccgaggtcatcggcacagaagacaagtgcgccccgaaaggccacttgaacgaaaaacgccccgggggtacggcccctagcgaagaggatcggccccgccgaaaggtgcagcggcctgtctactttgttagtgaggccctccgggacgccaagacccgatacccgcaggcccagaagatgctttacgctattctgatggcctcgaggaaactgcgccattatttccaggcgcatcgggtcactgtggttacgtcttaccccctcgggcaaatcttgcataatcgagagggtacaggacgagtggtaaaatgggcaatcgagctttctgagttcgatctgcactttgaaccacgccacgctatcaagagccaggccctcgccgattttgtggcagagtggaccccggctccagagaccgtctcaatccccgaggccagcacgaacccctctcagctgcctcacaccgcccactgggtgatgcagttcgacggttctctgtctctccagggcgccggtgcgggggtcacgttgacctccccaaacggagacgtcctcagatacctggtccgtctcgactttcgagcgaccaataatatggcagagtacgagggactccttgccggactcagggtggcagctgggctggggatccgccgcctcctggtgttaggcgactctcagctggttgttaaccaagtctgtaaggagtaccggtgctctgacccgcagatggacgcctacgtacgccaagtgcggcgtatggagcgccattttgatgggatagagcttcggcatgtacccagacgggataacatggttgccgacgaactctcacggctcgcgtcctcgcgagcccagaccccaccgggcgcctttgaagaaaggcttacccagtcgtcggcgcgacccgaccccttaggggagacggatgcgcctgaccggcccccgaggcccgtcggagtccaggcctcgggacccgaagagagcgctccaagctcccttagattgattgcttggatctctgagatccaaacatacctcacagataagactctacctgaggaccgcgaagggagtgaacgcgtacaacgcatttccaaacgctatgtgctgatagaagggaccctctatcggcgcgcggctaacggaatcctcctgaagtgcattcctcaggaacaaggcgttgagcttcttgctgacatccatgagggcgagtgcggagcccattccgcctcgcgtaccctggttggcaaggcctttcgtcaaggattttattggccgacggctctcaatgacgcggtcgatctggtccggcgatgcagagcgtgtcagttccacgccaagcaaatccatcagccggcccaggccctgcagatcataccgctgtcatggccatttgctgtctgggggcttgatatcctgggaccgttcaaacgggccccgggcgggtttgagtatctgtatgttgcgatcgacaagttcactaagtggcccgaggcttatccggttgtcaagatcgataagcactctgctcttaaattcattaagggcatcacggcccgttttggagtgcctaatcgtattattacggataatggcacccaattcactagtgaactcttcggcgactactgcgaagacatgggcatcaagctctgcttcgcctcacctgcccaccccagaagcaatggccaagtggagcgcgccaatgcagaaatccttaaaggcctcaaaaccaagaccttcaacattctcaagaagcacggcgattcatggatcgaggagttgccagcggtgctctgggcgaaccgaaccacaccaagccgagcgaccggggaaacgcctttcttcctcgtctacggcgcagaagcggttctcccatccgagctcaccctgaggtctcctcgggccaccatgtactgcgaggctgatcaagatcagcttcgtagagatgacctcgactacttggaagagcgaaggcggcgcgcggccctccgagctgcgcgctaccagcagagcctgcggcgctaccatcagcgccacgtccgggcccgatcactctgcgtcgacgacctcgtcctacgccgcgtccaaacgcgtgctggattgagcaagctctcaccaatgtgggagggtccgtatcgagtgatcggtgtcccccggccgggctcggtacggctggccacgggcgacggcacggagctgccaaacccgtggaacatcgaacaccttcgtcgcttctacccctgaaggggggggtcgggtgtcaggttttggctcgggctaaccccgcacccccctcgggtgtgcagggttagccgggggctaccacacatgcacatatattcctttcagcatttcaataaaagcagtttcaaattcctaaaggttgtgtctgtgccgtttttccttctgaaaaaatcttaacttgaaataaggtcactcgtgctcaaccttgccctcgggggctcggttcggtcagctaaaatcgccaaacggggcccagaaccgagccgtgccccggggcgtggtgaactccgggggggaatcggcaaaaacccacaatcgggtcacccataaccctcggtcaccacgttcccggcctggccagtctcgacatgtggatctccccaggcactagccccgacccgcgcctttcgaagactgggacttgggcacgggcccttaaatcaggctaagacacaaaaagaggatcacggcacagatcatcctcaactcattgcatagcaaaataaaactaacacaaaaattttttcatcatttctgattgcagattaagttaatttgtacaaaagagaggcatgaaggccttagaagaaagaaaaagaaaaaagataagattggcgggggcctgggggctcattccgatgcgcccgggtcgccggcctcgtcgccaccgtcgtcctcaccgctggcgtcgccctcctcgtcggagtcaggggcgaacgcgagccgaggggccgagccctcgaagctgttgacgatgtggtcggcagcatccccgacccgcgcgcgcgcgtcgtcctcggtcccgggagggaactcctccagcgccatccagggagagaagctggggtcccgggcctggtaactcgccagcacgagttcgaccgccccccgggcgaggtccctcgaggatgacttgatggtcttctcgagctcctcggggagtcgttcgaggacccaggccatcctgttgaggtgcggagcgaggccttccagattggtggggggcaccgtcgtctggcctctccagaggccggcttgccgaccggcgcgcttcatgcgggagaccgcatcccaaagcatgtcgggcccaatctcgcccgccaagcgaagggcctcggcctccccggtggaggagtccagcgctcgctgcatctccgcgacggtgtgttcggcagctgcgaggcgggcggctaagtcgctttcgcccgcggccgccccgccgacaggcgtcctcgcgtccagctccttttcccgtgcctcgaggtcagcagcccgctgctccagtgcggctctctcggtgcggacgcactcaagattgcggcgcgcctgctcctcctgcgccgcctcgcgaagggacaggctgtccgccagccgtctggtcgtggcctcagcatcctcgagagctcgctcccgctcagcgagtgcgtcctcgcggaggcggagcgcgcaatcctcctcggcgcaggcggcctcgtgcgccgccagcgtcgcctcccggagagcagcggcgacctcgcggtccgtcaagcccctctccacggcgccggcgtgttcttctagcgccatggcacgggcctcaagggtctcctcgcgccgccgagacgccgcttcagtctccgttacccgccgctctcgggcagcggcggagtcaaggaccccttgggcggcgttgagctttttcttcagctccgcctcccagcttgcgtgctgaaggcggagagtgtcttgcgcctcgatcatcgcggtggtagagatgagggcggccgcccgctcctcctccacctcacgggcgatctccgccagcgccgccttgcgggcttcaagctccgagatgtggcggcggtgggccttacggcccacctccaccatggcgtccaccgagcgccgcccctcctcgacacgcgcccatgcggcctcgagctccgctcgttccgcccgcagggcctccacttgggtgttgaacccatccagcactgcggtgtttgcggcggccagggcctgcagaaggggctcggcgctcagcggggcgacagaagaagaggagaagagccgccttggggaaaaggcgacgcggcttggccccccggaggatgcgctgggctcggggatgtcccccgggcccgtttggtcctgggcgtcgcccggtgaggtaggcccaggcgatgcgccagcagcctcgtcgcgagccgcctcggaggatgtcgcttgagggccgcccgagggagtgggcccaagtgatgcgccagcggcagctgtcgcctcagcctggcgagcccgggcggcctcctcccgagcagcttcttcggcttggcgagcccgggcggcctcctcccgagcagcttcttcggcttggcgagcccgggcggcctcccgggcggcctcttcagcttcccgaaggcgatctgcggcttcacgccggtcagcttctcgcctccgctcctctgcggccgccggatcttcggcctcggactggccggacttggggtggcgggaggaatgcgacgggacatcgctgaagcagaagaaaaaaccaaaagacgaacaaaatgagcaagaaaaaacttctttttggagaaagatggttgcaatgagagtgagacgaacctgcgagggggacgggtgaatgaccaccttggaggggaaatcaggtttccccggcatggctccgtctcccccgtcttgcggagccgcttctttttgcgctccccctcgggctgcgacgtcggcgcggccccctccgggcgccgactgctggcacgtgtcgccccgccccctcggggaggagatgggggaggtgttcctcccagcttcctcttccccggggcgtcggcagggcggctgctccccgagaccccgacgcggggcccagaagcacgaccccctcctggggcagattgttccccccggcggcgctcgcccgcgccgtcgtggcccttaggggctctctcctctgaggccccgacccccatcataatggttagaatggaggcgcggtcgggatcgctgcagagggggaggatctcctgaggaatgcgagacgcctccgcggagctaaggttcagcaccctttggaccacgatcttgaagtcctcgggagcccaatcccatctggctccctggtgggtccgcatgtagtcttcaggcccagtgtactcccaggcgctccgggcgcgccgttggagcggcgcaatccggcggcggaggtaatcgccgtacaccattgtcacgcccagaaattctcgaaccagaatttctaagctgaatgtgcattaaatccctgtccaggaccagccagggtacacaaacgacaattgttgacatacagatccacgtcttacaaaaatagaaaagattacaaatgcagcggaaaagataaaagcgagctaaaccgggaagcttgacttcagcagcgggcgactccactccacaggcaatccttgacggcagcgacgaaaccaactttgacaaaacagctccaactaggaagatcttcagctctggtgtgggggaaaagagagcaagactgagtactacccactgtactcagcaagtcataccggaagaggaggtatgatgcaggatataaccaaaggaggctagaggttcttttgcataaagctagcatttaaaaacagtagttgaaggcagtaaaacagttgtagtaattaatcaatattaaccaaacactgtccaacgctaccccacgttgcaacaggcccaaccaaccacctgaactacaccagttcattaagctaaactaggaatgagactaatcacggtgaatctggttgatcgcccataaccgcgggcacggctattcgaatagttttactctggccagaggtgtacaactgtacccacaagacacgattccacacatgtcgccatgccccgaagtatcaccatgatactgcaaagggggaaatcgtgacaagaccctccacataaccctcccctaatcatccacaccacgctaaggtttcacccccacccctcaaaaggcagtgggcggtcccctcttgcgccgcggtgaatccggcagctggacaaccggacaccccggccgacccaactccatcacgcccaccctcgccaccggtgcctaggaaagggtcgagctatacttcagatcaagcagttacccactcccgcttgtggaaagcacggtaagtctcccagggtttcccgtgaaccggtccttaactgccatgggtgcgaccagcaaaaccatgcacccacagcccaccattcagtgtattttaattaactaacaccattgcggtggcaccaatctaaagctatgccaatagacaaagtctatgtaataaggtgatccccatttgtgtgctagttgaactaagcatggctaagcatttcctaaaccaacatctagtcattttgatacccaagttatcaacggcatatggtaaacaatatgtggctgaggaataggacccatcccacattacattgtaaaagaatgcaacatttaatagaaatgcgggatatttgtaaattgggtacaatatgatcaaacgtatttcatgacttgccttgctctcgcactgacgagacctcagcaacgtcttcgagaaaccgtggatcgacaaaacggccgaaacctacgcgacaaacaaagcacacaagcaaaacaggctataagactactgaaacagggaacaaaaccatttttaatggattctttgcatttttcttgatttactgagacttgaatggacttaaacggagctcggatgaattacttatgaattttagaagataaactgtgtttttactaataaagaaaagtccttaatcaatttattgcgcaataaagcccagggctgacgtcagcgaggggagggggtggcgccgacaggcgggccccactgatcagcggcactaagggggggagagggggcggctggcaagcgggccccacgggcagtggctcaagggggagggagtgggcggcgacatgctcggcacggctcaagccggccggccatggcgaggcgacgacggcgcacgaccgccggcggtgaccggcggcgcggggagacggcggcggccggcgcgaaggcggcggcggcagccgaagacgacggcgcacgcgcggagggcggcggcgctcacggggggagaggaaaggaaggaggaaaggggattcctcaccgaggcgatggcggcgaccggcgtgggaagagacgagcggcgatgaccggcgacgcggaggcacggacgggcggcggcgacaccctaggagaagatggagaggcgttaggagaggagacgacgaccacggcggcttgaattgtcggccggagatggaggggagggaaaaactcaccggctcgcgaggggagaggtgctccggtgggattccggcgacgcgaggcggcggccgggaaagctcttgcggcggcgaagctaacggcggcggcggtttggcgcggcggcgactctagcggcggcggctcgcggccgaaggcggcggcaagcggcggcactagcaacaagcggcgcgagcgcgataggaggcacgggagagcgcggcgagtgcgaaaaacgagagaggaagacgcggggagcgatttataggtgcgggagggggcggacgtggccggggaggtggccgatttggccggcgacgtggggagtggagggagagtgagagaggtggattcgaaatcgaatcccgccctctcgagcgcgcgcgcgggccgggagatgcgggggaagaggcggcgacgtgggcgcgaggtgcgggcgcggagagggacggagaaggcgggcggcgtggggaggtggggcgccggcggttggggctcggctccaaccggctagaggaggaagacgaccgacaggtgggccccacctgtcggcgcccgaaggagagagggagggagggaggacttcggggaggggaaaggggaacgggccggcccacaaggggaggccgagcgcgggcgacgggtggactgggccgacggcccaagaagaggaaaaaggaggaaacaggaaaaagaaaaagaaaagaaaggattttcctgggatttaaaaattgcactttggtgatttttaattggttaaaattatttccaaggctctgaaaattccactaaaaatcctgttaatatattgtgacatgtagaatccaagaaaaattccacatgccgattccgattattatttgcatttattaattagggaattagctctaggttaattaagataatttcttcggacgatttatttagccaatttttaaagcaagcaaaaggggggaaacttcagggcgtgacaaccatggccccggtgagcccctgggatcgcaggcccaccaggcggtcgaggacggcgtcgtactcctcccccagatctaccggcgcccgccagctggagacctgcgccgggggctggcttggaagtcggaggcgcgcttcgttggcgagggaggtgtagaaccagtcgctcttccagtcgtcccacttcttgcggaggacgcaggggatgtagcggttcagcaccggcccccgcggctggaagtagcagccgccaaccaccgacggcggtgacaccgactgcacggtgaagaaccaccggaacagctgaagagaggggcgcaccccaatgaacatctcgcacaggtgcgcgaagatggccaatgtcatcaccgcattgggggtgaggtgcgccatctggagatcgtagaactccaggacatccatgaagaaatgagaaaatggcgggaccagcccagccatcgcgaaggggaggaagaagatggaccgccccgggtagtctggtgccgggcgccccttgcccagcatcactatctcccgaccggtggcggactccggcatgaagcggcgcggcagtccggcgtgcctctcattcacaatgcgggaaggcggtagcacgctgccgtcgagcagagcagagccccgtgccatggcggcggaggatgagatgattgagaacgagcgcgtgtggcgaaagtggggcgtagcagagaaagggttagagctcaggtggcgaaggcaagaggaacaatggcgaaaggaagggagcaaatccttttctcgatgcttttatacccttgccatcgctgggcctggctcctcgtttctcgcgcccactacctcgctccctcgtatctcgctatctcgctccctcgtttcccgcgcccacgcttccactaatcccattcgcccgcttacggcgcatgaagtggatatgcggttgtggcattcgaaatggatcgtatcgtgcgcgcgttaattacgctcgccgaccgaagcggcgttaccgtatctccgggcgagacaaatctgctcacccagattcgcgcgccgctcaagtggtgtggcagtcttgaatagccgcccattatggacaaccaaagttatcaataccaatgtgcatggattgagaccgttgggtattttgcccaactacggagaccggtcccacctgtcaccaggctttaggggtggcgtcacacctgaccgcttcccttgggaaggaaaattgctctggcataacgccgggggctactgtcggtgatatgggaccgggagtattgcgcccggaggcttgaggcagatggaatcgcccacgtggcctggcaccttcggggacgtcgggcccgagggtgaggtgtccgccctcctcctgatttccccgagggggg

SEQ ID NO: 26330 - DNA, 2093 bp, Oryza sativa
catagcttttctgccgagattgcgcgattctcaatctttccctaacagctctgactttctcttctgcctcatttaaaacttctgtaccaaacaactggcgttcccctgtctgatcccagaagagcggagtacgacacctccgtccatacagtgcttcaaatggtgccatctgcagactagcttggtaactgttgttgtacgagaactcagcatacggcaagcttttgtcccatgccccaccaaagtcaagcgcacaagctctcaacatatcctctagtatttgattgactcgctcggtctggccatctgtttgtggatggtaagcggtgctgaaattcaaccgggttcccaattcttcttgtaatttctgccagaactttgaagtgaattggcttcctcgatcagacacgatcttcttaggtacaccatgtaaacacatgattcttgatagatagagttctgctaatttcttccctgagtaggtagtgtgcaccggaatgaagtgagccactttggtgagtcggtcaacgactacccaaatagaatcatgccccgatgacgtcctgggcaaaccggtgatgaaatccattccgatttcttcccacttccattctggaatctgaagtggctgtagcaaacctgctggcctttggtgttctgcctttactcgttgacagacgtcacagagtgctacgaactcagctatttcccttctcatgctgacccaccagaacttttctttgaggtcttggtacatcttagtactaccgggatgaatggaatattgagtttgatgagcctcggttagtatcaggtcttttaattccttgttttcgggtacacacaatctttctcccatccagattgttccttgttcatcctcaacaaaacctcgggcttttccaaccctcatgttctttttgagctctgctatttcaggatcacttgcctgagctatgcgaacctgctccaccagcgtgggctgtgcctctagggcagccacgaatccgtgctcaactataccaaggttcagatgttccaaatcgcgttgaacctcaccacatagttgctctacccatgcaacattgcagtagctcttcctgctcaaggcatccgcaaccacattagccttgccgggatgataatgtattcccatatcataatctttaattagctccaaccatcttcgctgtcggagattcagatcaggttgggtgaagatgtactttagacttttgtgatctgtatatacctcacaacggttaccgatgagatagtgccgccaaatctttaaagcatgaacaactgcggctaattccagatcatgcgtcgggtagttgccttcatgaggacgcaactgccgtgaagcataagaaaccactttgccatcctgcatcaacacacatcctagcccctggcgagatgcatcacaatagacctggaaatctttcgtctgatcaggcaggattaagactggtgcagacaccaaccgtcgtttgagttcttcaaaactcctattgcattcagcagaccagataaacttttcttccttcttcaatagctgtgtcattggcttagcaattttagagaagttctcaatgaaccggcggtaatagcccgcaagtcctaagaaactccgaacctgagtgactgtccttggtggggtccatttggtaactgactccacatttgctggatccacagctactccttgagcattcacgatgtgaccgagaaactgaacttccttaagccagaacgtcgcacttgctgaacttggcatatagctggtgctcttttaacttttcaagtaccagccgaagatgctgctcatgttcttcctcggacttggagtagataagtatgtcatcgatgaaaaccacgacaaacttgtctagaaattccataaacaccttgttcatcaaattcatgaagaaggcaggtgcattagtgagtccgaaagacataactgtgcattcgaacaacccgtaccgagtgatgaatgctgtctttggaatatcctcttcgcggatcctcaactggtgatagcctgatcgcaggtctatcttagagaacacagtagctcctttcaa

SEQ ID NO: 26331 - DNA, 2199 bp, Oryza sativa
  unsure (1)..(2199): unsure at all n locations
atactggtacttgtgaaaatttgtgatttgagcgatgctatttgatttgtaattaagctagctatctcttttttcttggaccgcaatgtaacatcgtgttgctaacttttaaactataaaagtaagataaagaagtaacaaaagtgtgtgcttgctatgtaggtctattattcggagcaacaaagggaaggaatggagcaaactttggacgtacctagatcgttgaggctaccgacaccaaaggctcaacaacaaatggatgaattttggagggatcgacaaaaagagattgagacaacaaaggactttagcgagcatgcgatccctatggcccgcttgaagaagatcgcatcttctcaaaagggtaacatgatgatgtcctttgacatgccagcattcttatcgaagatgtgtgagctcttcgtacaagaacttgctgtgcgtgcatgggcatctgctcaatcccataaccgttgcatcatactagacacggatattgctgaagccattgcctccacagagtcttatgactttcttgttgatatcctccataatcaccgtgagaagcacaaatccactccttgttctacacttactacaaagcgtgtaggttagtcgatcaacctttcacatatcgcccgccctaccaacatcagctgccactgtttgcttctacatatactccagccatccctattactcctagtttaatgccaccaatttctcactatataccgntccaatatccatccttatcacaagaagtgtccacgatgatggcttccgcacccatagtgaatagatcaatgttgctcattcacaacatagcaaggggtctaggcttacaaggaaacaatatcagcacattcgccaacaataatatcccagacaatattattggttgtagtagccccgcggttcttgcaagtatgatgagtcctgctttactagacgttgcaggggcatcactaaatccgccaaactctcactccatctgcacgatgaacatgatcaactcgagtgatcccagtggatctagcattggtgacattaatgttacaaatcaagcaagtcttgctccctctgaacattttaaccctgctatccttcaagagtcctcatgtgcttcgttcttatataataacaacaatgacacgattgttggtgtaccggagggtgtagatattagtggcaccagggatgttgctggtttacttatcaatggtcaagaagaagaacatgagaggaaaacaaatgttgagcaaaatgagatatatgaaagcattgatataggaataatcaatgcaagtgttgcggatggtaataaatgcagtattaggtgggatgaattaggaacggccgatgattcattgctagataaatttttggaggagtttcaagcaagaaacgacggtgttttgcacagcgggattgtgttgcatgaagaccattcctaggtgacgtgattttagcaaacccaagtagtagcaatgccaatataagtaattgagttggcaagttttgtttatgtcttttgtaagaatgaggttgtaactctttttcttgttgaatataatgttgtttgtttggagagaagaaagttagtcggagtaaaaaaaaaaagaagaagcatatgactatgtagggtgatcggtacttgcgcatgtgtggtccaatcacgagttcattatctgtaattgggacgaagtaaacgcagtggtgatgagaatggcacacgcgtacgtggcgtgggaggggagcagggaggccagcccaccaaccacatcctcctcctgtgtgtgagtcgtctggatggatgttaccaaaataaccaagcaagataggaagggaagaggaagtttccagaagaagggaagggcaagaaaggaaatactactactacacctgtagtgggtgtgggtgggtggcaggcagaggaggagccaagaagcaacggtcacatttcctttgcttaccgtgttgtgttggtctcatcgtctgtctcgctcggcgctcgtctttctcccctccattccatttttccttctcctcttcaaccaaacgaaaccctagccgcctcctatagctaagctaagctccctcccctcctccctctcatccatcaatgggcaagctcctctgcgactcctcctccgccgccgtcgccgtcgccgaggcaccttcccctgcccctgcgcc

SEQ ID NO: 26332 - DNA, 3138 bp, Oryza sativa
  unsure (1)..(3138): unsure at all n locations
gcgcgcgacctcaggcaccgcatcgtccgccgcttctcccacctctacgccgccgcccaagcccccgacagagacgccatcgatgcggccgtgcgccacctctacgcgccggatctcaaggccggctggggcgtccacgtcgtgcaggagctcaagttgctcgcgcccaagaccctgcgccaccacctcgacgctgccatcaacgacctcgtcgacctcggcatccaaaggttggttcttatcatcaatccacaccctcccggatcgatcccctctctcttttcttttcttgcaccctctccaatcgcgcggaatttctttcatgccacctcttgctcctgtttttttccccattgattaataaatctcctccttttgcacatatccctactactattagctttacaattacgacttcaattactactgcgcctaggtcctgcctaaatgaaatggtcaaagacaacgaatttctttctcttaaaaaaaaagtgtcacctacgcgtatgcacatgtagtgggaatcaacttggatatccaaaacttccatgcatgtattagatgctgcctgacctattagttttagtatcgtcatgttgaccaccctgtacagttgtacatcttcatcacacaagaatcccaagttgctatgcatgttaaacaacaatttatgcttcctgctgcaactgtacagttgtaacaacccatggattggagcttgctcaccaaatcaacctgtttcctactatccacctctgtatactagtcttgacgttcactgccttgcagggaaatggcagctgaaaccatatacagggagagatgcatagctgtaacaaatgnagatagttgggccaagtacatgtctgtctctggttcgcaagagnacgagcacaacatatccactctgcagtacacagaggaaggcttactgaccatcgatgaganccggnnatggccatgctgcagcttttggtgatgatattgctatcgagtgcctgccaaccgagttcaagagagaagtttatgtggtaaagcccgtgtgaatgttctgcatgatagtttgctagtcaccatagatctggcacttttatcttgcatctctgtttcatagttttctcagcacttttatctgcaatctaacaggcccttttgtttgtaggtgcaagcacatggagcggatgcaatggttgatgaggacaactgtgtgttcttcctaccacaccgccctagaggagaaatttgcgagccgccgatttttcttttcatgaagggaacaggtaactttgggaatcatttgcccagcaacctagtacgaactgaaaattggtgtctcaacaaaatttagttgctgtctatgctgtcagttgcaatgtgtctggacttaaggtagatgtccaattctttttcttgcagcatggtgtggtgctggtgccgaccattatgagcctttgatagccactgtcctccagaatgttactccagacaaggcagctgttgtactttgaggatgacttccttctttttcgctcccccagttctagtcactgatggagtcgagccaattttgtaatctgagctagattgctttattgaggagcaacgtctatgcccaagaggatctaactgtgcgccgcagggtcttgcctgcttctgaagttgtgtactatgattcgttttgtatgctgatttgattagtgtgtgttttgataggttctgactgttgaggaggagattcagagtgtggtagaatatcggatctagtttatgctgtgaattgttgtgcggcattgtaaaccggcattttggtattgcctcatgcctattgtgaggttttttttttttttggttgcttgcgttctagggacatgattggacatttgagaatgaggatcattcttttcagttttgggctacccgttgttccagtccttgctgttgccacaatctgactggagcggggatgaattgatttgcaaaagagatgtaatacttgttttctcatgcaaattgtaccaacattgcagagggatatggctgctgtaaaagtctcttctttcctttgcaaaaataggatcatccttcgttgtatttatagctttgaactcatttcatgcatgaggaaaccatgaaagaacgctacttaagctcgtgaatctgtcccaaagatcactgtgatttccgagggatgaccggattgacatttttcacttaccatcaatttaacgatgactgattgatctaatcttactcagtaattgctcactccatttgttctgtaaatggcttggtgttgggtaaattatctacccatcccaccatcatggagatgaatgaatcagtagtcatgttgagtggagatgactgatgagtaatcagtcatgttaagtcgattacttatcgtcatcatgaattactggcatcttgtaacggatcccctcgtcaaaataaaagagaattaaaacggggatggagaaacaagagatgttgggtgaaggaaataagagcttgaatggtcagaaatctcatgtggaattagtgtatcatcgcagcggtcagctggctcacaacagttaatattaacgtttcatcactccattcaagcatccaaagcagcactcggaataatcagagggaaagaaaacaggggggaaacaagaatgatcagaaatctcgtgtggaattcgatggttatgcacatggcatcacggatgctgctgcaacctaacgagctcatcatatcatttttcatgcattgaaacagccattcatcctccaatccaatccaacgccataaccataaaacagtatgataagcgagaaacaacaacaattaaaaaggaacaaaattcagaagaaaagacggcagaagaacattgggcgatgggtgaaatcaagacaaaacccatccaatctagtgatccactgtctgttgtgagaaaacatgggaggggctaagaatggcggcggcggcggaggaagatgaaccctagaattggagggagcaaggagggagggagtgagtgagttttataaggggaaggaagaggagtctggcacgtggggcccgcatcccatcgcacaccgtccatttacacagcaggggcggagatattattttaggtgggacccacaatt

SEQ ID NO: 26333 - DNA, 3079 bp, Oryza sativa
gctacctctgcagtgaagagctgctggaggatgttcttggaggcaaagatgccctcaatgctttccgggaatccgacctcaacggctacctcgaagtcgaggtacccttatttcttcgtgtccaacttactttatcttccaagttccaaccaatctagacatagatacatcccttgatttaacacttgtcttctcttgtaaatgatggcagactgaaggcctgaaacagctcacctccatgggcagcctcgtgctttgctgtggggatggtgctgtcatgaactcaaccaatctgtatgctgccttcacccaccattctctcatatctcacatccgccttctcatcaactcttcttatgctaattctcttagagggctactgaggcatggagtctccatttggattgatattcctctggaattggtggtgaatgatatgttgaagacacaagctacttcagaccctgattccttttctgaggttcatctgtcctcctcttgcacaatcctctttaagactgcaaccttcatagtttctcggtttttacacataatacatataactctggctacactatgtccagcaaccctttatttgttaaacaacaatcgactccagcatttgttaacaacagcctgtgaatatgtattcaagtatactcccttaataatcttttcctatgtaaaacacactgcctcccaaaatccacatcctgttgcttgatgcgttgcgagtctaggttgactccatggctggctatatttctgactttgtcgttgcattaaaatgactttattaagagccaactttgttgtcacttgactgcttaatatctgccggtcacatctgaaatgtcatgtttgcaggcaatgagcagagtccgacagcgacacgatgaactaaaagagcgctatggagtttctgatataactggttcagtacaaagtaaacagagagatgcataaacatcattttctttcataaaagtggaaaagaaaaggaaaagaaagcaaattgtgaattatatatatgggtgtggtattattgacttggtggtgaatacctttcagatgtggcatctcaactgggctacagtagcatcgactcagtgaccctagaggacatggtccttgaggtacccccaatcagttagatagataaaagtagtaaaaaagatgttgtagagctggggaagaaagaaagaaagaaatgggttttgcgaaagaaagaaatgttgacagcattatttttgtgtgtattttgaacaacagattgtgaggcaaatagagaggctgatccgagcgaagtcgatgatggaagctgctgggaagcccttctaaaagaaggaaggatccattgatgtatagactgttggtcatgtatgtacctcctgatccctgaggaattgccttagatgttccaggaccaggaagcaaaaagtgccgccacagctactgattgattaattttgtaccgaatgatcaatcattcgattgatatttttacattcccttgtgacttgtgagggagacatatgtagcagaatgaaaaagaagtcgaatttattttcaaaaaaagaagctgtgagtgtggctagaatctacacttgttcatatctatgcttgttcgtcagttgtgtttgtgtcaaatgagcaagtttgtaactgtggacaggatgacaagtgggaactcgatggacaatgcatttgctttggtgcggaggcccatcaaatgcagcccagcccagggaggtccctatcgagtagtaagtgagtagaagaaaagtctgatctccacccacgggcggagttgacatactagtagtagtagtactagtacacgaggagaagaagcaagaggaagggcatccagaatcagatccacaaggcagcagctgcagcagcatcgaccatggcgatggcgcgatccatcctcctcctcctcctcctcgccgccgccgcctccgcctccgccgacgcgcccttcctcgtcgcgcacaagaaggtttcgctctcccgccccaagcctggcgtcgagcgcctcgccgtctccctcgacctctacaaccagggatccgcgtaactactctcctctcctcctcctcctcctcctccgatctctcctctcctctcctcgttgttgcaagggaacttcacttgtctttttcttctcggatctgcatctgaggatccgtcctctatttctatagatagatccagaccccttccatgtcgtaattgccaactaatcaaccattactctgctactgctttcttttctacgcttaaaacaaacaagcaattaactagaaagccaaaagattcactgcatatgctagtatctttaaattgcatgggcttgtgctccatctcatcatctactgttatgtctttcttgccagattatgttatgctaataggattctacttgtaataaaccacacatggtttagcctatttacaatggtttcactctctgttatattcgccttattttgctgaaattacatactaggtgacttgccagcttattcaccctatgccttttttgttccctccatatgttcttacaatgcctgctatcaacatttctctctctcaagtccaaacttttccatgctgcccaaagcaccagctttgcccaaaactaacaacttaactttcttccccgagaagtaataacaatttcaagctaaagttggtagttcggacacaacaacataactgactctttttatgtacagaaatatggattattgctaaattttagcttggaattatttactggatcttggtggaaattctgttaaagattagcttagcagcccatggagaatgagaatgttttaaatattatttttgccagtgtttacctggacaccaacacaggcctcaaactctgccttgattcgcgtgtctgattcggcagaaaagaattgtacatgcaacgggtgcccgaatcctactcagactcaggatgtcagactcgacaaaaaaacatctgccattctgatatgatgtcaaagggtgttctggtttatctattcttttccctgaaagtgcattacctatagactac

SEQ ID NO: 26334 - DNA, 2059 bp, Oryza sativa
acttgatgttcttgctgagaggcctccagaaaagaagtttgaatgggtaagtaattgtgccattgcatgtacattctagtctgtttcgctctatgatcctaatgtgctgatgctgtttatgtttctggcatgcgccgtgtatgaattcttgatgttctctccttgttggtccaggctaaggtaaatttactctttgttttattctacaaagagcaccttttttagtgcatctatggtagaagaaattactgagaaattatccatttgcagaggcttgtgcgaaagtacgggtcgctggtgtccgttgttggcttggttggagtgtttatctacctggttgcaagcccgtcaaaatccagcggtgcaaaagcaagcaagaagaggcgttgatatacttgcctaccatatataaggcagtgtttgttcttttttattaaaaagaggaagagatggtggcaggttttttagattgatagcgcgagagctttaaggctgccgcatccttgaactgtatgaattttctctgtttgtgtttttggaagttgaaaacctaacccagagaattggagagtagattttgtaacagatgaaatctcaatgcatcattttgaagttgcctgatacagatacctattcattgcatttggtaacagatgaaatctcaatgcatcattttgaagttgcctgatacagatacctattcattgcattgtatgttgttgagaatggcgggtgaggcttcacatttatgttgtatgtgccaatgggattgatgttggtagatctcgcttagtaaatcgagaagctaagcttatggatgcgtggtgaacttgtttctgacatgtgagacgaaatatgatgcgttcgatacaacaatctattatgttttcaagtggcgaaaattggagaagaaatatttgagctattagatcatctataaattacaatgttttatattgacaacatagtttgtgttcaacatagcgaaaccgttggtaaaccggtaaaaactggtaagatttggaaagtttgattattttttttttaaaaaaagttgggtaattgtggggtttgttttttctccgagcggccccgttgagacttgagactgtgagctatatatgtttatttattttaattgtacttttgatatttatttttgatacaattgtatactatatggaagcagaatgtaagagtatagatgttatgaaaatctatgctcgcacaaaattatgtgattggggtgcgacatagggaatcaatatatacttcatttacatagggaagtattccatacgtaataaatgaaaaaagaaagcgcgggaaattctaaatgtaacacttgaaagacgctcaataggtatttagtgaggcattttcataacaagaggtaagcaaataaatatagtatagtagtaagatatatgagaaatactttgaagtaagttatcgtgtcatggaagaaaaagagaaataccgaaagtcgtcagatattaaaaatgaaatactccaatgggttaacttagggtcgggaaggggagaggcggtggcgggcggctgaggctttttgttctcctcctgtgagaagagaggaagaggcggatcggattgggattggggatccatccatcgatcgattttgccttgccagttttcatccggctccgattccgcttctcatcctctttccttcccttgattcctctcctctcctctcccctctgagtcgggtcggggtcggggggagtagggtttctctttcgacttgccgcggggcgtgggcgaatcggcgcacaccacagcatctatgccctaagactcagaggtgagccccttgccccgcggacgaaccctcctactcttcttcttcttcttgtgttgctgctaacccatggatcgatggagtttttttctctcttttcaggtgactagctccatggaggacgatgacgatgaccaacgcttgcttcacagccttggtgtcacgtccgcagacatccacgatattgaaaggagaatcatatcacaggtacgctacgcaatgcaatgcactctt

SEQ ID NO: 26335 - DNA, 3198 bp, Oryza sativa
  unsure (1)..(3198): unsure at all n locations
agccgacgaggagacggcgtacgggcactacatccaggcggaggtcgacggcggcgcaagccgcgacgtgatggagttcctcctcaaggaatcccagtcccagtcccaggaggtggtggccgcgtaccgatgcgtcgccaccaaggtcatcttcgtctaccccttcaccactgccgtcggcgattcaagagggcagagccagaggatcaccgccgtcgcccaggagctcggatggtacgccccggacctactcaacgccgccaccaccgacgaccactctatcctcgactattaaccaaggccatacatatgcttgcttcattatctctagtctgtacaagtacaactcgtccaaattcattcatccatccatccatccacgacacatatacaaatactaatctattattactactaagtagtactagtagccaccgatatatatacacaacaaatgtattaatcaaaatgctaatttatttctacgccggccgacgtccttgcacttttggatgatattgggccttaattntcatcgtaggtcaccgagttagcccatgcactcgttactgtgtcatgaaataagcatgtgggcctcacaggtatttttaatttttttaactaacaccagctgacagacatgtagggtgcttttgaattttttgtcccatgtaaacatcatatgggaccaggctggatccagaaaaaaaaattgaggggcttaattacacagttttttcaccttcagccatttagggacctttagtttatcattcatggtgaaaaaaataaaggggtgctctgggggtatccatgggtcttgtgggtgtaggggggactcgagtccccacgcatccacgttggatccgcccctgtatgggactaatatcaactaaacaagccacatatagattaggactatgcttgtatcttcatatctctatttggtttattaggccactttgttccatgtattttatacttccgagacctcacagatcaaaacatggactcatccaaggcccatatgatttcgcctccccatctaattagatgtatagggctagatgtccctcttctttgtagttgtagggccctgtcctgttgacaagaaaatcgaacacatcggcctaggagatctgcttagctccagtgcaggtccaaatatgatgagatgcaggcgtgccagccagtttgatcctacaactgacaagatatgcaaatagtagatcaaattagccgatcggctaacaagccgatggagtagttccagccgatagccgataatagccgatgtcgataccagccgatagcgatagggtttaagcaatcggctatatgtcaaatatagataatgatataaaggcaatcggctgatgatgatgtaatatagcaatataatccagtagaaaccaatcggctcacaaatatgatatagtagaacaagtattgatccgaaggttaaagcacccatcggctggaggtctgatgtcatgaaatccacaagattagattaaacaatgaaacctttgttgtcatcggttaaatccaacttatatgtatatgcaatccttatgagccgatgcaacgttcagataactcaccggctgaaaccccgatgaaacccttattggcaatcaagaagcaggctagacattatggttctaagcatgacttagtagatcaaacttaactgatgcagcactaagtatgaaaagaaacataatatctagacaatcaagctgttgactgattttcagggtggtagatgcctaggctaatttaatctagcaacgcgatttagccgataccggcagaaacactaaagcgagagacagccgatagagctaaattgatatgctaagactagattaacagagacatgataaataggtaggcaaatatatcatccaaaccagagcaatccaagaggtcaaatgtactgatgcagccttgaacgacgccgacgtaaatgatacaattgcttgggccgacggaacttacccattcgctggagatcgaacactgatgcagccccgcgtcaggtgccaagtcccgccggacgataaaataaagtagaaaaggtaaaaggtggcgatgtgccgaattgtattgattgtgaggataaattacataaaccccgggtgtacatatttatacccatgggttgatacaagtccttgtcggacaagaaagaaactttcctaaagataaaaggaaaagataaagtccttataggacactaaatacactttcctaaagataaaaggaaactaacaaactattcctaattaatagataacttgccaagccgcattctctttgaactcggtctcttctagataagcttcctctagtagatcaattttcttaccgaatatagcaagaatccgacaactgacgacttgataactctcattggctaatctcaggacttcgaagccgatgctgactctaagccgatgactactccgggcttaccaaatttcactgttaacatgtcccaaatggggacatttccatcgttggcaaccacacaagtattgagatgattatatatgcaagtaaagaaatatattggagataaaatgatcgtgtatccacacttcactacctcaaaaaacttaataaaacctatggataggtgatcggtaaggaagacgttcctcattaaattatagtagagaagctatctgatttatgcacgaaaataggaaaaatagtaaatttatgtgcatacttatattcgcaaacgattgaaataaaatatgctttgaaaatgaaacaggcggagcacatgacaactggcatatcgtgccaaaccgaaccctccagaaagatgaagtcccaaagcatagaaagcactataaaagtcgacccacaatatgcactaggagcaatcgatggattgagtagcttctctagccttgacctcctagcgctcagttgttatacttaccctctaagggctactaggcctcactcatctcttcgtgtatatttagccttttatgctacccgtggatctctttcgtcattgatgggtataccgtttgtggttgataccagttttataattatctacgggcaaagatgataaatgccatatatcgaaatgacaaggtaattttatcttctccttatgagtttttcaactcaaagttttttttgcaaccaataattagtctctaatattaa

SEQ ID NO: 26336 - DNA, 2758 bp, Oryza sativa
actactgtttttaaatgctagctttatgcaaaagaacctctagcctcctttggttatatcctgcatcatacctcctcttccggtatgacttgctgagtacagtgggtagtactcagtcttgctctcttttcccccacaccagagctgaagatcttcctagttggagctgttttgtcaaagttggtttcgtcgctgccgtcaagaattgcctgtgaagtgaagtcgcccgctgctgaagtcaagcttcccggtttagctcgcttttatcttttccgctgcatttgtaatattttctatttttgtaagacgtggatctgtatgtcaacaattgtcgtttgtgtaccctggctggtcctggacagggatttaatgcacattcagcttagaaattctggttcgagaatttctgggcgtgacaagttggtatcagagccgaccttgaccgtaggacaagccaactggaaaccctaagagccctctgaacccctttttcatctgcatatgcctttttgcacctggaattgttttgggaaaatttggagttttgcctctttggtttgcgggaaaaatcttggtcgttcattcggatcggattttttttttttaaaaaaaaaatgagctcagcctagggctttagaaaaattttagttggagtttattcgatagtcagtcgggaatttattgggggttatgcattaggtcgtgtctatattcgatgggggcaatgttatgcgcatcattttccatgcaactagtctatgcattaatttattgtttagttgcattagtgtctttatttgagttcatgaaaaatgttctatgcataaaaatcatcctgctcggttattgatttgagtcttcttttgctttgtttaatttggatttgagcatgaattggttcctatcccttgtctactttagatgtcagtcctatccctcgtttgcaagcgccgcctcgagcttcagagtcaccgcccttagctttatcgccttcttagtctgtttgcttgctagttttcgtgtttaggtttgatgcttgtgggctagtcggcggtcgatatcatgtgtcagtggtatgactgcctcaattaggagttgcgtgcctctttttcagtgttttaatcaagattaagataattgcacttaaattcataagaaagattagtttctgagccccctgtttttcttccttttctcatatttctacctatccccttcagatggagacaaggaatggttcacgtgactcgaacaacgctagtggcagtgaaaagccgatcaatggagcacgtgccaacagtgcatttgacaacagtccgtccccaccgcccgagaacccaacaattgctcaggtgttggacaatcagactcagatgatgacaatgatgatgcaacagatgcagcaacagtaccatcaggtgttgcaacaggtgcagcagcaagcacagctgcagcagcagaacctgcagtttggttctccacctcctcagtccaaactgctagaatttcttcgtgtcaagccgcccaccttctcaagcaccaccaacccaatcgaggcccacgactggcttcatgccattgagaagaagctgaatcttttgcaatgcaacgagcaagagaaggttgcttttgctacacaccagctgcaaggtcccgcttctatttggtgggacaactacatggtgacccgtccagctggggcagaggttacttggacagagtttcgtcatagtttcaataaagcacaggttcccgagggaattgtggcacaaaagaagagagagttccgttccctacaacaaggaaccagaacagttatagagtatttgcatgagttcaacctcctcgcgcgctacgcccctgaggacgtgcgtaccgatgccgagaggcaggagaagtttttgtctggtcttgatgatgaattgactaaccagttgatctctagagattatgaggactttgagaagctggtggataaggctatccgtcaggaggagcactgtaacaaaataaaccgtaagaggaaggcagctcagttcaggactccccaggggaagagtcagaagcctcgtttcacgatgggacgtcacggtggaccttccaccatgattatccgacagcaccgtccctaccacccgggtagcttcaacaagaaccaccataatggcagtcacaacaacagtgagcagcacagtctcaaccctactccgagttcactaaagattccagctcaatcagttcagccagctctgccagaacagcccaagaggttgggagaaaaacccgaactctgcttcaattgtaacaaacccggacacacggttggaaagtgcccgaagccaagacgtgctggacccaagttcgttcaggcccgtgttaatcatgcatctgcagaggaggcgcagtcagcaccagaggttatattgggcacattccccgtcaactcgacaccggcagtaatattgtttgattctggtgcaacccattccttcatttccaagcgttttgctggtgcacatgggttatccttagtgaagcttaagataccaatgcgagtgcatactcctggaggtggcatgaccacaactcactactgcccatctgtgacagttgaaattcaagggttgatttttccagccaacctcattcttctcgaatccaaggacctagatgtcatacttggaatggattggttaacaaggcacagaggagtgattgattgcgccagccgcaccatcaagttaaccaatgcaaaagg

SEQ ID NO: 26337 - DNA, 685 bp, Oryza sativa
gttaaggaaattcatcatggagttcacagatggaaggagtcctactcgaacagagctgggtcatcattttatcgtgcaacgtccgatgtctcggagtcctacttggagaccagttaacgtgcgatataaaagggacctccgggaggacctaagggatcaaatttcatagtcagcacatccaccacagcctacggagttgaagccaagtcgccaggtgatctagtcgaatcaactcgactacgatctcattggtatcatcgagttctgcttctccttctgtaatctgtggtttccattatataatcccatatcaactggtttagggctattacctatcaaggggcctgaaccagtataatctttgttttctgtctgcttgatgtcgtattacgtagatcctcgtaacagcataccccactaccctctatatccggtctacgggtatcccccgtcgacaatattgattcttataattaattaatgtaaaactatatatgtgggtttatagaaactaatggtgaaagattaaaatgtttggcttataacatctagaatgacaaattaactcgaaatagagggagtatatagtttagaaatattagctacatgttttacaattagccacactaattattttttaaagtaccatcgtccgtataattatttttaaagtactattgtaaaa

SEQ ID NO: 26338 - DNA, 3928 bp, Oryza sativa
aggccttgttcggttagataaggattcaatctgggtcataaatgataattgtagtaaaaaaattatgatagatagaacaagggaccgagatttatttcagaccggaaattaatttactcataataggaataataagaggtgtggaactaatctaaatatttttgttgtacctaatatgagtaaattggttcccgagccaaaataaatctcgatctctagttatacttattataaatttattgttatacctatcattttcagcctggaacgaattcttcgtaaccgaacaaggccttaattggaattgatgaatcatccatcactccatggctccatgcaactagctaggagctgctgttgtggtggtatactcctgcaaccaacacgtacttgtacaagttggttggtgtagtggaggagccactaccactcgtagtgctagtgcctgcaccaccactcaaaatgccaccaaatggactcgatatgaatgagttgaccaatacacctgtctctctttctctgacctcgattaagaattcttgctgtttgctttcgcttcttggctgctaaaaactgtgataatcctctcctaccatatttacttcgataacgaaccatcccactattttctagccagtaacaaatcaaaatattacacattgattataaatacttatgtgtataaatacatacatcaatatcaacttacttcaatacacaaataacaaatatatttaataaataaatataaatataatgatcatttaaaaataaccttaaaaaaattatatgatcatcattttgtaacggagagagtactatgtgtgtgtgtcaatccatcacatatatgagtaatacattcacgtacgactgttctttgatagctagtaaaaaaaataattcacgactgatacagctaccggtctccttaattgctgatgctgctgctctctcctagtccctagtacattcctcttgtgagggagggaataattaatattttttaggctttgacttatttagagcaagtatagtgaagcacagttagccggggaaataactgaccacgtcacccaaatctgaggtggaagagagagaaatcctaatagagaataggacgagcgattggtgagacgctcgcttgaagcagcagaaccgagataaaaagcttcttctcagcctgctgcatgcgactaagccagcagctccttctctcccatttgctactagtacatgcaagcattaactcttatagccaacctctacgccagttcactatctgcaatgaccttctcaaatgcttaaagtgacatggccaccctattgcgccagctgccgacgaaaccattaaccatgctcttataagttaaacattttaaaaaataataattaaatttataggaaaacatcattgtcggagcgagaatcctcacactccatcgatggctcggggcaccacgggagcaaagtgggagttgacggacaaaggtgacccgaggacaacagtagccttaagacaagctttcattacctcggaacccctacggccgctgcatatgggccatggccccaaggatagcgccaggaggtctctctgaacgaatttgcttcgttaaggagatttgatatccggtcctacgtgtactcccttagcctgtcattctgcattaattgtcgggtaatacagtttctatgaacatatcactggcgatgtgggggatatggccgtgcatgcttcgccttgcttgcccacgtcaccccggagtaaaagatgtgtgacgcgcatttgctccgtattcacctgatggacccctctttttaccaacgtcgtgggctgataggtggacccttcacatccggtcaccctgcttggagggacagcaataagaccaagcatatcaacccctatgggttggggcccttttttttatgcatgcatgggactacggactccccttgacgtataaaaggagcatccgtgccacatagaaagggatcggactcaagcaaagttagtttctagccacattacaatgaacaagggttcatcctctatcacttagacaacgaagaagagtcaatgctctctcacttaagacaaaccaaacatcctcttgtaaagttcattatccatagcaatatcacatgagtatgtgtattatgttttcgagcggcatctgtataaaccacttgtctccaacccacacgcaaaccgagtacgagctcggaacctgcacactaacagaattctcaagggagggtactttgccttcccactagaagagcttattgctttgacaatagcaatatttttaacagaaaacaaacatactatcaaaatgtattttatgctacatttaataaaaataatttgatgtcatagatagtgtttagtttttctataaatttgatcaagctaaaaaattaactaagaaaaaataagtcaaatatggaagggagggagtatgactaaggaggagaaagggaatgaaatcaaatccgattaatggtatgccggatagggccttccctggcccaatccacagcagaattcagcatggagcccaacctcccgtcccccattccccttctccatctcatctcactcccaacactctctctcctcgctgccgctgccgccgccgccgccgccgccgccgcacacacgcgccggaaatgaagaagatctttggagccaagaagagcaaggacccgcccccatccatccaggacgctaccgaacgagtattctcctcgtctaggccatttgctcgcacgccatctctcttagtttgaacatttcctctctatgtgtatgtgattgaagatcaacaagaggggggagagcgtggacgacaagatcaagaagctggacgaagagctcggccgttacaaggagcagatcaggaagacacgccctggaccctcccaggacgccattaaggcccgcgccatcaggcttctcaagcacaagcgcatgtactctactctactcttactcactattctactactagtagagtatttgctactactccactatgcaactctgatgaatgtacgttgcctgtttcaaggtacgaagaacagcgcaacatgctctacaaccagacctataatctcgaccaagtcgctttcgctgccgatggcctcaaagacgctcagcagaccgtacgtactactccacatatatagcccgccttgtttgttcctactgtctccatgtctatgaattattgccgaaccattcttttgtttgttaatttatcgattcctcagatgaatgccatgaaggccgccaataaagagctcaagggaatgatgaagacagtcaagattgaggacatcgatgtatgcttctctttctctttagttgctacttactacagctaccttaccaagatattccttcctcatgtgcatttctttatcaggtgctaccatttgagctgtccccatcctgtgttttgtatcatgcccattccttgaaaaaaacttgctgtcaaatcttttcttttttatatattgaaagggaaaaacctgcttatagatttttcataaccatgcaaacagaccaattgttctctcaaggacaattgctccagtgcagatattttattgggcattgcattcctagtttcagacgctatccttcattacatttcaagctaatctgcaggatttgcctattgtttagatcatcaacacattttacaccagtatatccattgatttacaagaaaaccatacaaaaaccacaattgtcaatcttttttaagtgcggttatcaaccgcccttgaaattgcttgttggactatcttgagtattatcatcttttttcgcgtaaaacgaatgccctgatccacctgtagaatatgcaagatgaaatgactgacctgatggatgtgagcaacgaaatacaagaat

SEQ ID NO: 26339 - DNA, 842 bp, Oryza sativa
agttttgaaaatgctttgggagaaatattgaaacaatttgcagaattaaagaaaaatatagagactggcagtacaatactcttacataaacagtacctgcatgtcagttgaaggattccagtcaggatcatatataataatccggtttgcaccagtcaaattcgtacccagtccaccaactttcgtggtcagaatgaaaataaaaatttcatctgtgttattgaattcatcaataagtgccattctttgctttgcaggtgtaagtccatccattcttcggtattggtattcgcaagctgtcaagaagttctccataatgtcaagcatttgttgtgtctgagtgaaaagaagaacacgatgaccttgttctttccatactttaagaacttgctcaaccactttcatctttccacttctttcaggattcccatagtcaggattctgagcagcatgttctctctcaagtagatcaggatgattgcatatcttccttagaacatctatcccataaagggaatttctgttaccatcaaagatttgttccacctccgaactagcaagaaatgcacgataagtagcacgttgctcagtagttagactacagaaaagaacatgctctgttttcttgggaagctgtgcattgacatcagctttcattcttctaagaaggtacggcatgaccaggtcacgtaggacaacagcacatcgatacgccgtggacacttgcaatggtgttgcattagcgtacccaccaacagtaattggaacagaaaactcagcctcaaacacaggcaggacacctagttttccagggaacacaaaatcaaagagagaccaaagct

SEQ ID NO: 26340 - DNA, 6554 bp, Oryza sativa
aattatttgccattcttacggatggctaaatgatttgttactggatccatatgtctatgtcatagacatatgagaatccacatgtcataaacagcgagtgataaataattaattgtcacatcttaaaattggcatggagttaaatgtcccttcggttgagcacgcatgtcgcactggattatcttagatccttccttcaatataatcgcccgtacttactactccctccgtcccataatataaggtattttgagtttttgcttataacatttaaccacttatcttattcaaaattttttaaaattattatttattttatttgtgacttcctttatcatctacagtattttaagcacaacttttcgttttttatatttgtaaaaaaaaaattaaataagacgaatggtcaaacgttacaaacaaaaactcaaaatcccttatattattaaacggagggagtactacagctaatatatatatatacgtgtgtgtagtacgtgcatcgtatcaatcgccactagctagcaaaactagaggtgtagctagtaatttcttgttgaacatcacaacatgcatgtattgccttcaacttgttgtgcatcatcgcatgcctttcttcttgtcatgccgtgcgtacctaccactatgatgcataaacatcgatcggcagatgttccctctattaatactcctatttcctccctcctaaaatgtttaacgccgttaatttttttaaaaatatttgaccgttcgtcttattaaaaaaatcaagtaattattatttcttttcctatcatttgatttattgttaaatatatttttatatatacatatagttttacatatttcacaaaaaattttaaataagacaaacggtcaaacatgttttaaaaagtcaacgccgtccacgagcgagtattaatcgattcatccatcggcggctggctaccgacaaatcaataactgatgtaagatctatagacatgcatcctccgtatgcagtactagtacgtaggaccaaattaaattgctttgctgcccttgccctgcccggactgtcctatgaacggaaccaaccttaatctcccgattacagtacaaatggagtatcccaatgtggccgtgttcagtttcaaactttttttttcttcgaactttttaacatttccatcacatcaaatatttgaagcctaattacgccatgatttaacaatgtggtgtaacagtaaacatatgctaatgacagattaattaggtttaatagatttgtttcgcagtttacaggtggaatctgtaatttgttttgttattagtctacgtttaatatttcaaatatgtgtccgtatacttaaaatttttttttgacacacgacctaaacacacagcctacattattaatgtcctttcccgtgttgcaaaccccattccatttcattcatcgactaattgatggaacttacttactctctccgtcttatattataacaacctataattagatagaatatttacatgttacaaagattttgattagaaaatttattcatattcattgtaccatctaatatcatatttgatcatagattattatattatgggacagccgaagtagtactccctccctccgtttcaaaatgtttgacaccgttgattttttagcatatgtttgaccgttcgtcttattcaaaaacttttgtgaaatatgtaaaattatatgcctacatcaaaatatatttaacaatgaatcaaatgataggaaaagaattaataattacttaaattttttgaataagacgaacggtcaaacatgtgctaaaaagtcaatggcgtcaaacattggagtacttatttttgttttgttttgcagcttagctgttgttttagtagagcatttgttggttggtcgttcccagcatttgtgcattgcaggtagcacaagtagtacaacctccgtctcaaaataagtgcagtcttgagtttccgcgctcaactttaataatccgtcttatttgaattttttttataattagcatttttgttactatgagataataaaatatgaatagtactgtactcatgacttatatttttaatttttttaaaaaattttcaaataagatgaacgattaaaattggacgcggaaaatcatggctgcacttatttttgttacggagggagcagtagagtacaggcagggcagggaagggcgttggtggttcatctcctctcctctgcttgtggcgcgctcattgaatattgatgctgctgcatgctacctgtatttctgtactactatctacgactacccccattaacaaactaaaatgacagctccgcactgccccaacatcattttcttgtactccatacgtctcataatataattttgagtttttactttgtaatgtttgaccactcgtcttattcaaatttttctttataaatataaaaaacgaaaagttgtgcttaaagtacgtagatgacaaattaagtcacaaataaaataaataataattttaaaattttttgaataagacgagtggtcaaatgttataagcaaaaactcaaaatctcttatattatggaacggagggagtagtattcaattcagatcagttgatttgagccgccgtcgacgatccggccggccgcttgcttcttccatattgatcgaggagacatcacatggatcatcatccaattccagcagatgagaatgagatgactagtactagtccccagatgcagatgaggagaaacaagctctcctcccacttccaaggagatatcgatgatgatggtggtgttggtgttgtggacatccgggggtcgccgatggggtcggcggagctggcgcgcaccggcgggtgggtggcggcggtcttcatcttcgggaacgagatggcggagaggatggcctactacggcctgtccctcaacatggtcatcttcatgttcaacgtcatgcaccgccccttcgccgcctccgccaacgccgtgaacaacttcctcggcatctcccaggcctcctccctcctcggcggcttcctcgccgacgcctacctcgggcgctactggaccatcgccgccttcaccaccctctatctcctgggcctcgtggccctcaccctctgcgccaccatgcccgccctccaggccccgggccaggacgagtgcgacggcttcgccaagctgctgggcaagtgccagcagccgcacccctggcagatggcctacctctacgccgcgctctacaccaccgccttgggcgccgccgggatccgcccctgcgtctcctccttcggggcggaccagttcgaggagcggagcccggtgctggaccgcttcttcaacctcttctacctggccgtcaccgtgggcgccatcgcggccttcacgctgctggtgtacgtgcagaggaaccacgggtgggcggcggcgttcggggcgctggcgctggccatggccgcatccaacgcgctcttcttcatggggacgccgctgtaccgccaccgcgtgccggggggaagcccgctgacgagggtggcgcaggtgctagtggcggcctacaggaagcgtcacatcaagcacaccacggaactgttgtacgaggtgggcggggccaagtcggcggtgcgcgggagcggcaagatcgagcacacggaggagctgaggtggctggacaaggcggcggtgagggtggagggccaagaagaaatcaataacccatggcgtctttgcactgtgacccaggtggaggaggtgaagatcctggtgcggctggcgccggtgtcggcgtgcacggtgatgctgagcgtggtgctgacggagttcctgacgctgtcggtgcagcaggcgtacaccctcaacaccaggggcctccccgtggcgtgcatgcccgtcttcccctgcctcgccatcctcctcctcctcgccctctactacagggccttcgccccgctcgcccgccgactcaccggccacccgcacggcgcctcccagctgcagcgcctcggccttggcctcctcctctccaccctctccgtcgcttgggctggcctcttcgagcgctaccgccgcgcctacgccatccgcaatggcttcctcccgctcttcctcactcccatgccgggcctcagcgcctactggctcctcatccagtactgcctcatcggtctcgccgaggtcttctgcctcgtcgccctcctcgagttcctctaccaggaggcccccgacgccatgcgcagcctcgcctccgcctacgccgccctcgccggcggccttggctgcttcttagccaccgccatcaacaccgccgtcgactccatcaccggcgacatcgacgccggacgcccctcctggctcgcgcagaacatcaacgtcggcaagttcgactacttctactggctcctcgccgtgctcagcaccatcaacctcatcgtcttcatctacttcgccaaagcctacaagtacaggatcaagccccccaccaccccacataactagttcatagtatttctacaccactacagtctagtactagtagtatctgctaagtgacattatattgatcaatcaaacaaattaagggcatccaatatcttcttttttattgatctactcctacatagtgctacctaaactattggagtacgccgatgagttttgcagcatatggcacacgctagcttcaagcgtggtaatgatatatttatcaaccctgctatacgtacgactcctccgtccgaccagtgtgtacgactggaacggctgagcacgtcgctacgcgcagcttctgcctgaatttcgtcaagctaaatccaaagcttgctatcttaatattctgtttttcgcgcatatacacacacaaaaaaaagtacagtgacatcaaaaaccataaagcacgaagtatactgtactgtccaatcattgcataaaaataaacatgctaatgtcttgtttaatctgtcgattgaaattagacttagcatttcgaagcgaagggccaacaagtttgtaggttctgcacgcctacagcccacgaagatcgacgttccgcacgttaacgttgctgcgtactccgtagtcggacaaaagtcggacgatccagtcgtgtgtgtagcattttcgtatatttatgctatatcaactttgcaattgcagttcctcataattgcattattacttgtaaagataataatgaggaggcacttttccacaaatcaggtaagctaattaaaaagtaatccagacttagacattttttgatttttttatcttgcaactgtaactgcggcaattcgtagatacttgatgtataaattattctgagtatactctgttcagcgattcctagttattattagctgtatattgtcagtgggaggctagctcttgcccttttattatgatgggaatatatatccgttaatcagctaaagtcattagcagaaggttctggcgctttaggtcttgctgttacagaacgtacggacacttggctgctgatcgaagcatgtcgatcgtgatgttgcgtagtatccgatcgatcaggtataaggaaatttattgtgtttattccgaattttagttagttttaaattcatatatggactctatacgctacttctaatattccttattttttaatttcgaatttctattttttttcttaattgtatctctatatggactctatactctacttctaatactccttacttttaattccgaatttcagttatttcctaattgtatttctatatggactctagtctcctattctaatattccttattttttaattccgaattttagttatttctaaattgtatttctatatgaactctgccttttctttttctctgattaatgtgagaatttctaggccatgagggcgaacgtggaggctctttttctatttctttaataatataatagatagatagatttctatacttaatttcaagatgaaaaataaaccatggcataaaagtcttgaccacaaaaaacactagagatcgagatggtcgactagcaccatgaatatgcaccgaatcccgtcttaaaccgtccctctttcaccaattaattagtactaaatatgcggccaggaaagttgagatggccgagttggtccaaggcgccagattaaggttctggtccgaaagggcgtgggttcaaatcccactcttaacatcccctttttttgggttttctagtagtctactaggtcaagtatcacaataataataatgtacttactactttacttaattagataaagagttcatcgtatttcaccaagtggtcgtgccggagtggttatcgggcatgactagaaatcatgtgggctctgcccgcgcaggttcgaatcctgccgaccacgttttcctttttcggttcctccaatctcagactgtagattgaacttggggaccccagctgatttagttgcattttgcccttctatttgaaattggcatgcttcattaatcacaaaaaaacttcaactcaaatacctgttgatctgtgtgtgtgggggggggggggg

SEQ ID NO: 26341 - DNA, 4380 bp, Oryza sativa
tgagtccgagatcccaggcacattcctctcagtttcaatctataccgtgatatcccatacatcttggtgaaaaaaattgatgagccagattgaagatcattctatttttatatgattttaatttttgggtttgtacttttctatctaagtccctataatttttatatttacatttgagtccctataatcttgcaataagatacttgaggtctttttttaagaaaaaataataaaagggagagaacaagggtataaaggtgcataaaaagaaaaagaaaaactacaaaaaagaaagggaaaaaagaaaaaaaaagaaaaacaataacaataaaattttgtttcccttaagtggcgaaaaaaaaccgtagatccgattcctataaaaggcaaaaaaaaaagtggtgaaaaataaaggccagatccgattcctttaaaaacggaaaaataaagtctgattcctataaaggcgaaaaaatctgaaaaaacatctaaaaaaattctccctaagaaagtggagaaaaaaatggttcgtaaaaaaatgcacgcgagaaaaaaatggaaagggcgaaacagatttcgatttctaatcagtatatatctcttctctatctctaatctaatctaactatttaaaaaaagaaaatgcacgagaaaaataaaaacggttcaaaaaaatacgtgagaaaaaagcgcaaaaaaatgctaaaaaggttttccatcttccattaaaaaaacgtgcaagaaatattatttccatcgtcggtaaattttttaaaaaaacatgcaaggaaaaaaatgtaagaaaaaatgcgccatttctaaaaaattattgggttaaagtctcacatgctaaccatatttgttactgcacaaaagtagaagtgttaccacataataggtgcatgttaccacttccaagtagttatgttactgcacgataatcgtagttttactatgtcagttttacgagatgaaaatcgaataggtgggctataggtaaaggctgtaggtggcttttagtgaggtctgattgatgtacgagtgttttgaacaattttatacatttggtaaaaccatgttactgcatgtatatacccatgttactgcaaattacatattctgttactgcatatggagtgctaaagttcaaaatgccaatatttgaaaagcaatatctcacaagatatgtattatttttaaaaccgttttcacaatgatgctatagtgttactgcatgtggaggatatatgggttaatgtctcacatgctaaatatatttgttacaacacaaaagtggagtgttactgcaaatgtaagtacacattaccacatgtttatgcagtaacactatccaaaaaaaaaacaataaaacacaattactgcactcttacagtaacaatgcggtgggattgtagtaacgtgcaactgacagtagtaacaagtaatgctatagcattactacttgtgaagagtcaaattctaaaaaagccaagatttgaagaacaatatctctcacgtgatgtactattttttaaaatagtttgcaccatgatgctagaaaaaaagcgcttatcaaaagtagatccatcatgactatattttaacattatttaagtgctgttactacacataaaacgtaatgttactgcacgttgactgtcgcgttactgcaccgttccgcgagacaaagcttaaaagaggtgggtggtgagaggagttaacaagtggtttgaccgcgtttgactgacgtgagatgcctttgaccgacctttgactgatgtgggagatgggtttagccctcgagagagggggtatagaatagctattctatgagtaaatcccttgtatacccatgaaaacttgcccaatctcctctatacccctcaattttactcgatcctctctgtacccctgaattttcgctttgatcccttccatgcccctcccgttaggttttcttcatttcccagttatgtgtaattgcaaatgtcgataatacccttgtagatggaggagcaacagcaggtactaggtagattgaaaaaaaattaaaaaatgttgactgcacagtatgtgtatttatgagactaataatgagtttagaacttttattgtggtattggaaaaaatgcaatacatgaaacttttcgttttgaaaaaaataatagggttggaaaatcaaaaaaattcctcagtacaaaattttggtacagtcaacaggaagcggaacttattgcggacaaaggagaaaatccattgcaaaaaatttggagcatctatacaaaaatattagcaccattaatagcaggaaggaaatgaaaagagtatccatatagaaatttgtgaaacaaaataatccggatcagtaagagcatcaagagcatacatcatcaatcaaaacagtagcaaccatacaaagcactttatcaattttattttcatcatccatacagagcacttcatatcaatctcatttccatcatccatacaggacagttcatatcatactcaatagtgtaggaaccaaaccaactttgcactccatacacaaatgttgcaaatgacaaatcaagttaactgggcagtacatcatgattataatgtcataagatccataacagtacatcactgcatcatgagaaggggatggtggcctcaactgtttcgcttaccgacaccaatgaacaacccactcctctgaacaagaaatcaatcactcatcaactgcaaatgttaaatacgcaagaagaaatttacattgctgctactcgtacgcggtgttgggtcgcgcaacgatgatagggtggtggactttggctgcacgacggcaggacgttggacagcggcgcccgcgacgggagggcggccggcggtggcctactgcgcgacgggacgggtggtggccggtggcgccccaccgcgcgactggagggcgggggccggcggtgcccctaccgcgcgacgggaggatgggggccggcggcgccccaccgcgcgacgggagagccttggacgccggtgcacgcgatgggaggccggtggccggcggcgcgctcaacgggagggcggtggccggcggcgtgcgcgacaggagggcggtggctggcggcggcgctcgcgattggagaccggcggcgcggcctgcgcgtggagaggataggggagaagagaaggtactggatctatttagctagggttcacactgccaggggtattttggtattttttgaaaatactgacaatgtaacacacaggttacgttacaaatcaaacggaaacctaacgggaggggtatagaagggatcaaagcgaaaatttgggggtacagaggggatcgagtaaaattgggaggtatagaggagattagggaagttttcataggtacacaagggatttactcctattctatacaagaccatcagggcaaaaccagctaattcgcacataccagagaacacaaggaaacagacacatatccgcacggcaatttgcaattaacagtctttcttcacttgtctgcacaaagagaaattggttttgtctttaaaagggaaaaactgaattaacctgcaggcttttcaaaatggcaactccctgcccttttatttcttcaagggtaaagaagagcgagcttgaatgatagaggataaacaaaacccaatttcttttgcagcaatacataatagctgcataaagtcacatccaattaacactgatgttccctccaagggtacaatgcaatttttcagtaacacaagggtttcaattgcaggaacaatgatgttgttcatagcacaaatgtctattaatttccaaccaaactgtgactaaggtgcaccctttgcctatttagtcttcaccttttcaccttgaaatgctgcacaaatcttcttccagctccttatggcgatcatagttggtataacaacccacgagctgtttgcaccaatgaaataagcccagaagtagaacgggctagtccagaagttgaagccatccaagtaggctgtaataaagtacaccaggcatccatagagctgaccaagacagacagtgaactggaggatatggctgtaggacttgcccgatgcgatggcatagctgcaagcagcaaactttttgtcaggtcaggtggaaactataaaccacaaaaggctatattatactcatatcaactgtctagggggcaaaagaaactcctatcaactagtacatggaatgcaggatgtacaatagtgaatagtctggcttaataaccagttacatattgatattgacgcttgcagacaggtcaatccaatgtgtaaactaacaaaaaggagaacacaaatattctgaggatagattttataggcatcaaacacatacaattcctatagc

SEQ ID NO: 26342 - DNA, 1970 bp, Oryza sativa
aacattggattctgctgtccacgacgatttatgtcttgtggcaaatgcaacatgcgattggcatgatgtaaaaaaaatgcattcacttggagcatgtatgatggatgcagatacatctaaataaatgaaagatgaatcctttcttgcaaagttaacgcatccacgtcatcaacaaaacttcaaccattcgatattttcatgagccaataagaaccatcagattccccaaatggataaagaacataaacatccttcatgaaacttataccaaaactagatccttccatacccttagaatcgattcttttatatttaccccctcctccctccccatctaccaaagcacgacccctcctctcctttgcgtgctgcgccacaccaccgcctccactccaaaccccctcgtcatcccagctgccgcatcttcctcctatcccccaccgcctccgaagttggctcctcatccccaccgtggccaaatcgaggccgccgctccatccaggccgcaccgcgttcctcatcagattcaagcaccccgcactgagctcgggggcaagccaccgcaagctcaggaatcgctggatccaaaccataccgacggtgaagatgggtggcggcgaggctgaggtaccacatgcatcctctttcactggctgagcagctcaacaattttcctctgggagcaacagagtgggatgatgcgacgccgccatcttccacttcttcctccctatccctgcacttttgcctgctcccacgcatcaggtatgggagtggagaaggtggcagcggcagggagacacccctggaatcgtggatgccaataaaaaattgcttctttccagtttagattgaaatgagcaaatagcaaaatggcatgcccgttacggtaccatcagctcatgagatagagaccctgtgaggtcataagcacatgacttcattgcaaggttagtgctgcctccttcaatgtgttacagtaaaaagttgctcaattgactcacggtgactgaacaatttggaatgaatatgcaactgtccaagtaagatgttgacctatagggatatggtgactcactgtgactgaacaatttggaatgaatatgcaactgtcaattgagatgttgacctatagggatgaattggaaagaagtacagcaagatgactgaatttactgcaaaactatgactgaattatagaagttcataaattaaggttgagtccatgggggcttagataggaggcatgattcgttttggcttgactatattttttatgctctgttaatgattctaactttcctttcgatttaccatctctttctgtttccagcaaacaaagttcctatttaagccttaatgttttgtttgcatatatgcagatccagcaaatgcttcagttaatacttggtttggtggaattcaattttgcatatatttgctgaaaggagttttagttctttattatcgattccccagttttttttcctatgaaagtaactcattttcaattagtacacgacaggagaactatatgcagaactatatgcacatgtggctttgtatgatttctggaaaccttcaacaaagaaagacactgaaacaagatgtacttagggcagtaaaacagtatgctgcggttggatatgctaataccagctttagtaatcttgaaaacactttcctggacaagcacgtcagctcatgaagttctaatatgagcctagcttgccaacatatttttttttctaattccagattgagttgcatttagataggagtatttgggctgtaaatactatttccacaattcccttctaatcatggctgttgccttcctttactaattacaagtccaaaacacagaatttaatctgtctggcaccaaaatacttttccattgcctattattccatttccgcttatgatatgaatttaaagtcagctctgtatgcgaacaaattttcagt

SEQ ID NO: 26343 - DNA, 1457 bp, Oryza sativa
agtctctctctctctctgccaaggacctaggtaggtcaatgcctcagccagatcccatagccataaacccttgttttgttaaagggcattcacaatgggccgacgtggcattcagcctcaacccaaaaaagcgaagactagtattcctttgcctcgtcgtccaaccgcgcgccctcctcagctcagtgggacccacaccaccgctagaggagagaggagagggggcgaagcagccgaactccaggggaggagggcgccgaccgccgcctcgcatccgcccgtcgccgtctcccgctccaagtcgtctgcccgccgccgacatgccgccgccgccctgctgctccgagcagccccgccgctcgggggggagaggagggggtggtgcgccggcgagcgcatcccgccgctcggcgctgtcgccccgccgtcgctccaccactgcttggtccggcgccgtcgccgtctccgcgcgccaggctctctgcggtgggggaaaggaagagaggggggagagagaggggaaagtgaaagagaagtgaaaatgtggtagtccaccatacctacttgtatcgtggtcttgtagattttgcactgtggaacatatggcttaacatagttgttggtctaggtgacataccaggaacaccaaagtgtggagagtggcttgtgggggtgggggcccaccaccttcattccattacacggtcgaatcgaggccccactgtaagtagaaagaaacacaagaagaagaagaagggttaccggcgggcggcggcggccatggccatgcaatggagcatcgacctcgacagggctctccgctcccgccaccccaccccggtcagtactggtacagctacccctcagcaatctcagtcaatctaatctccctagcatgcagccacgccatcgacgctagctattgcccctcgtctccgggacctcggacctagcttcttcgccccccgccttgggcctccgaaccgcgcctgttcgcccacaccatcctcgtccgcctcctcgccacccacttcaccaccgcccacaacgcccgcatcctccgcgccctcctcctccttcgccgcagcatgtgtgcaggaacccaggccgcctaccacgctgcctgcccccaggccagggcactcgcgctgcggatgttcgcccaccaaagccctgcatatccgctctctcattctctccaccttctcttcctccaatgcacggcgccactggtctatttctttctttaccatttaccactacaccagcgcaaagtttagacaccactaattattatgcttatcatttcgcaggtcaacgcggcattgtttgcggctggctgtttttaggctatcagtggatttctcttacattacacttgaagcacttccaaggttaataattgcttcaccaacaacacaagctcaaattatcatggcagcaattaagattttccc

SEQ ID NO: 26344 - DNA, 3045 bp, Oryza sativa
  unsure (1)..(3045): unsure at all n locations
cgagtaataagcttaattctttttatcaatgattcagccaaaccattttgtgtgtggacatatggaacaaagtgttgaacctgaattcccaatgccatacaataatcatcgaaagcatgggatgtaaattcggcagcattgtccatacggattgattgaatcctatgttcagggtaatttgccttcagccttataatttgagacattaatttggcaaaggcatggtttcgtgtcgatagaagacacacatgagaccatctagtagatgcatcaatcagaaccataaagtacctaaacggtccagatcttggcacaatagggccatagatatctccttgatggcgtacaagaaataaaggggttcgcttttaatttgagaaaaaaaagggtctaaaaagattttcccgggtcacatacgaggagactacaaattgggggattggggaatttggcagtgaccaaatgatgaccaatagagttgccaataatttttctatcatcccgatactagggtgcccaagtcgatcatgccaagtgtgaantgcatcaacattttgaaaaaatactttgtacgtaacatgtgcaatgggcttaatgtatgtatagtacaatcccgatgtgagagatggaattttctcgcaaatgcattngccatatctgttttgttggnntaagagaagaaattcttctcgattatccatatgggtttcaatgtgaaacccattttgacggatatctctataacttagtagggtacgggttgaatcaagatacaataaagcatccttgattgtaatttgtgtacccattgggagtgtaataattgctcatcctgagccaactatcacagtatcgcgcccagtgatagtcaaaactttgccttctctctttttgagagtttgaaagtatttgatctccctaagtatagagtttgtggtaccactgtccacaagacataattcctctccaatcggagtgatatccttagacatctataatgaaagaagaattgcttgattaagaattctttatccaatatatatacatacataaaataattaaaacatcagatacatagtatgacgtttacaaatgttaatagtacatactctaatgactagcaagtcttataaccttataatataagggagtttgtactcatcgacttattacaaccattattgttttaacaaactataggatatcaatatactgtctcaaacacactgagattaaagcagctttatctctaagtgggacgcactgagattacagtaaatctccaagtgggtccgttgagcagtattcgatgagcatgtcatccattgcagaaaatgcagcggtatcctctgggagaagagcgaggttgttctctggttcaataggagcctagtgagaactttcaacatccggtctttcttttgtaagatgaagtgagcttcaaatcttagttcctcagaagactttttcgcctttagggatttctgatacaggagaacaagatgtttttgggatgtggcaatctttagtgacatgatagtcagatccacacctgttgcaatgcctgttgctattgcaacgaggttgtggtgccttacccttctcttttcctttctatcgaccattggatttgcaccttgttgttatgttgcgttttccagtcagattcttagggttattcgaggaatttcccttgaatcctttaagtgcgatactgttggtttagtatcttgtcctccggaaacatagttgatagagttttctctatctttctgctttcgttggctcttatcgcaaaatatcaacttggagcaaatgttgtgaacagcatgattgtattctgccacagtttaaaatcctgtaggcgtaaatgaatccagccataattagcctcatgccaaatgtgttccttttgctgatcataacgctctattagagctttccattggttgagagggatcgtctccaacatgtactcatgtttgagatctttatagatgtagagcctcagaaggaaaaaaggcaatatatagctttctgttctcaactggtggatcccaatcattgggttcctcaattgcatttgaaatcccgcaagaagaaagaaaaaaatattttgatatcggaagcccaaattgggtagttactcccatcgagggcgagttcgtcgaactctatagttgccatgtccctataatcatgattatcattattaattacagaggtaaattaataaaaacatgatattgtggttgtaatctcaatgcgtaatgtaagacttcatattttgtaatgtttcgaaaagatgtaggctatagacctgacaatttgagttagagatcgaaattagatggcacaatgtggataatctccaagtaattaaacagtggagtagatctcttaatagtgggcaagttatacttgctgcctaaaacacggtctccaggcaaatatattctggtgaatataccgcagccaatgtttaggactccactaccttgtgctcaaccaaatttcaaataatctcatttttcaaaacatattctcggaaaataacacatgtgggtaatcattgtgagatgtagacctctgtgagatgggcgggttactcgctgccaaagttatggtcgatatgaccaaagtataggactccatctacatgtgattaatttccgagtcaaagtttgtagtcgaacatgcattaaatcctccattaatcatgttgtacatagttgagagaatttgctaaatcaaaatacaaaatttatagaattttgtaaattaatgaagcgagaaagtagagtgtgtcttgaaatagtatgcaaaaggtatgttattaagacaacaaataaatttagtgaagcagggtatttaaataaacacctatgctaagtaacatataacatcagtggtttacaggaccagtacatagtaatttgtacaactgaactgcttgtactaaattatcaaagatatagggactaataagaaaatgctgctaaattagaaaataaaaactaaaaaaaataaagggtaaatgggtgg

SEQ ID NO: 26345 - DNA, 1636 bp, Oryza sativa
aacctttggccaacatttatgaatattaaccttttgaaaacaaaatgcatgaataatgttctacagcctaaaattttagcactattagcattcacaaaaatcgtgaatattagacgtaggagttttttttttccttcggtctataactttcgtgagttcttgccttgggggaaattgatgagtattcaaattttggaaaataaaatgcatgaatattgttctcttgcccaaaatttcaaggatattagctttgggattgttacacacaaaaattcgtgaatatagttattgcgttcggaaagacatgcataaatatttatctccagcctatataatgtcacgagttatagtgttggcgtcacacttcaatttctttgtcatatagtactcactagtgtatgcactatgcagcaggtatcgacatatattgtgctccggcccgttgctgattgattccaggtaagtttggcaaagcgtccatgactcatattgtcatattgcctccatgacaacaagcgaggggaaatgctttaggtgaataaccggaggaagtatccggatgatgtatttgctcctggtctaggtgaatagccttctctggacactgttgtctgccctggaggtaggtttgataacattgacaggtatctggattggcaggtcccaagtacgacggagaggcccgcgcagattagagctgatctataggtaatcacatatgtccataatatatggtttttttaatataaatgtttccgcacaacaaaatttgttcagtgctccctcagtttctggcgccaactttcaatagttgtgagataattaattcatatactgtacctgttgctatataagagcaagttcaatagtatagccaactactagctccaattcatctatagtcaatctaatagcccattcatacaatagttacatactacactattaatatctagtcccacctgtcatagacacactgcgtcttggagtccgtgctacagctggctacaaatctgtagcccgttgctcttctctctcttgatttatcttcgtaaaatatgtttgtagctggcttatagcctgccattgtacctgctctaacgcagcaaagtgtgatgaatgttggtgttgatgatgggatcatgggaagtaaccatgagataacagaggtattgttcgatggagtaagtgtattatatgtatgtaaatattatattattgtaaatcattttgaggagctagactagcgtgccttattaacaaggagatatgtaccattacatgatgattaacatataaatctgtagctacatggaattaaggtagtggagcagaggaggaaggatgatagaagactccaattctccatggatgggaatgggatcaggtggccttgcagaactctccgcccagatcgtcgcacgcctcctcggggaacaccctgcgtgcaattttgtgttttccgatttcagttccagttagttacactagatttcatcagttgggtagtatagtagtagagcttaattaattacgtggtgggctcgtcgtaggataggtagtccctgtcgacttcctccgccgccgcacgagaaacagcaacagcagccgatgatgagagcttggcctctgggta

SEQ ID NO: 26346 - DNA, 1212 bp, Oryza sativa
agggccccatccccaatgccccgcatctttgtactcttgtaaagatatttctaccctatctcttcatacttatcttacctcaattcttacaaaattgcaaaacaggcacagccaaaaaaggacagcatgcagttgatgttgcagtaagaaaacaacctacctccgagatatttcttcttccctccctgttcaccttctcttttctttgcacaatccactagaaagaatactttgtacaatttttaggtggcaagcaagcagaagcaggcaacctattgatgttgtacttgcaaccaagcacgcttccaatgacactaggacagtattccaaattgaaagaaccaccaccaccgacaaagcatcatatgatgcatctaatcaacctcaacccatcacaactcgaaatccccttttctaaaaggcagagtggaagatataagactgcaagctcggtttaacaaatcaaggcgactcatgaagagaaacacatacacagattaattgttcaactgcaattgcatagcaatgggttctcacgtcaatgccaatcacaagcaaaggtacatgaattactgttctaactgcggattgatgctcgagggactgctggcaatcctagctcatccacctgcaccagatagcaccaggcaacattcagtacaagcttaaaacaggtaaactacggaccaatctaattggttcatacaaaacatggttgttttagctgttgatcaacaatgcacctagtctatgcaagaatatttgaacttgggatagtgaacaacagacactgctaactcatgaataacaacttcttaagaaaaaaggaaaggaaaattcatcattcattcctctagtacatacatgggactagatagttctcgaatcatcatgacaaagcaagcatctgaataaaaataacaataatataaactaacctgctgcctgcttactgggactgctgcaggagcggtaggtgcagctggcaaattaagctctgcatcgaaatcggattccttgtctggttgaagatacgatgggactgcacttgactcaaactccatatcagcctccaaagcatccagttctgcaatgttcaagaaacaacgacagtagatagattattatctccagccctgcaatggtcccaggaagaatgaaggcatggcaacaagctaggcaatttatggcatgaatctatgttattacttc

SEQ ID NO: 26347 - DNA, 15833 bp, Oryza sativa
ttcggttttgatcttgatttggggttgtgcttctgtggatgtaatacactcgtccactgtattgggttattgttagaatcttgatattagtttttacagcacaaactgtgtatatgcgtgttggcggtatgtcagcatttcttttcctttttgtgcttgggtttttttctttcttttttttctgtgtttggttgtcttgatttaggagggctgttgggtattggtcggtcactcgatggagatgtcgtgttggaggctgctggatcggtaccagggtgccgctgaatcggcagattcagtagtagaataagagttgatgttaagctttttgtttggagtgtatgtttggatttaactgaaaccattgcaaaaggacctgccttgggacttggaggagatgcttggagttgtagctggttgatcataggttagtaaaaaacattaattattggatctagttttcctgaactgccattttgtctttttgatgactgtaggtcagtgtactagaatttggccgcgaacggcaaaagagtgtgcgtgcatgattatatttgtaagcaatccaacagttcagttgtgtgcgatgcatacgtgctgctgttggatcttaacagaaatccgtgactgccaaaaaaggcgaaaaccaacgcaggaatgaggagaacaaagtatccggtgttcggtttcattagcaatagtagcttgctgtcgcgggatcatttcatgttgccattttgctggtataaattagccattttgctggtataaattagcaaggcgcaaaggcgtcggagacagcgataacaatcacttgttttaataattttatttttactctgctcttgttttaatacgtcgagatccggtcgttcgttcgttgttatatcagtttttggctccattcagaacagcgtgggtaataagtactcccttccctccatcccctaatataaagtattttgacattttatttgcactgtttgaccactcgtcttattaaaaaaatttgtacaaatataaaaaacgaaagttgtgcttaaaatactttggatattaaagtaaatcaaaataataataatatttttttaataagacaaatgatcaaacaatataagtaaaattgtaagtaaaatgttaaaatctcttatattagagacggatggagtataataatactgtctccagctgactctgcttgcattcatgcagagccacatcactacagcagaggcggctcttcattcttgctaaaaggttttatgatgaggaaacttgctgcaaaggcatactcgttcaaggggaggctacctacaaattctgacctaacccgtactgattgtaactatgatctatatattaatagtaagttaatatcagatctacaccttaaaatataaattgatatgatgagtggagagaacaaagcagcaacatatactaaatatcgatgactttgcatgtcgacaccttattgggtccttttatatttgattgatgatgatgtttcatctattccatgccatgccatagaagtactaactagagtactcaactatttagagaaggaacattgagtttcttttgatatcatcatggcttgtgtagcttggtcttaaatcagccatgacatgaataacgaaaatataataatactattgaggtagctctcttccctctcttggtgaaaatctcttgggcgggagatggcggtgtccttagtgtcgtaacctttatggaaatgttgtttacgaagagttcgctatgtggttttggaggctcgccagcgatcggccacacatagcggcgaccatgctatgtggttttggaggctcgccagcgatcggccacacatagcggcgaccaatttaatttagtgctgggcttcctcctcaaggtcatacgtttgtgtttttagcgcgtgttttgggtgcgcttttttttcctcaatcttaacggtatttggatgacctcctgggaaaaagtaaaaagtaatactaatacaatatggtgttgtagaaatgtactacacaatccacaacactacaaaagatccacgacactacaaaagagtaaataacacattaggaaaagttattgtcggagtacatgactcctacaatggggaagcgtgaacccgccatgaaagattcggtcaaggggcgagtcaagcctgagtcaccctcaggaatcaaatgggcacaaaaaaaatatacaggttcgagcatatacaaattcgggttgtgcggatgcgtaacatcttacgcctgtgtgtatatggaccatacgtgatcaaaacaagattacaatgagatatggatcttgtgtgagctctaatctccaaggagtcaaaccatttatccgttaacatggatcctccttttatagactaaggaaagtccatagcgccaacaaaaatatagaagcggtttccgtgccaaagagttgggtatgcttggacttgttgatgtcccctacgacaagctggttggatgttacaactttgctctccagttgacacttagcgtaggagccaggtgatctctacccattcaccatggggcccaccagtcggcccttgcgaggtggcaaggttgaatgtgctagagtgatgtgggcacgacacgtcatgccccttctattcctctagcagacgtgggcatgcgggaggctgcatgcagcgttacgtcactgagatgtaggtggatgagctgttctccaaacggctcccttctacaacagaaatcatgatgttggattggagttaagcccctaggtccatctagagaggcggagaaaaccccaaagtgagcttagggcagtggggtgtgcttggagcccagcttggagcccctaaaccctatactgcaccccagggtaaccctcgctcctcggggcagtcgtctatccggaacttatttccatgcccagggaacttagtttccttgggccctcggtgacctctctccatgtttcttcataggtttccattgtactttggatgagtttcttgaagatgtcggtgatgaatgagtttatagtgatcacctacgtcagagtggctcgaagcagttgtctgccgcctcagcacattgaaaatgtagatcttgacgttcttcttgagatcttggatgtgtagatcttatacacctcttgaagatgttgatcttgtacttcttgaatatgtagatcttgtacatctcatgttataacatatatctttgggtgccctgacgactccggaggacggggacccctattctcattcctccaatggttttaaactagactaagactaacttaatatattcacttaacactacaaagtcttgtggtgtatgcatactatcaatcttctcctttgcacgggtatatgtgccttggccaccaccactactgcccttgatggtatccatactagcccaagggtgccttcatcaacacctgtttctagggttagggtgaaacctgcatttcatggcacaatatgcgtgttgcttcttgatatttctctcgtcagagtgtcgagattagggggtggaattgtcaagttagaagtgatatcttcttgttattgtttcccttagttgtctgagatagccacaaggataatcatgaaataattgatcaggttttgtggcaatagatagttcgtatcaatctgcgaagcaccgcatggtaaagaactagtcattgtgagaagagagcagcttgtcgacatcctccctactccatactccctccgtttcaaaatgtttgacaccgttgactttttagcacatgtttgaccgctcatcttattaaaaaaattgtgaaatatgtaaaactatatgtgtacatgaaagtatatttaacaatgaatcaaatgatatgaagaggataaataattatttaaattttttaaataagacgaatggtcaaacacgcattaaaaagtcaacggtgtcaaatattttgaaacggagggagtattatctcaatctcacatgtgagctatcgatccaaattgatgaagtttacagcagcagcagtaacagtttgtttttattcagggtatagtctatttatttattttcttttcgtatttttttgcagccagcaatgggtgcgccattggcagagctgttgcaaaagaagaacaaacccaacaagaacccaaaaaaaaggagagagagagagagagagaggaagaagcaaagcacgggcaccggtggaagcgaagcgaaagtgaaagcatagagagaagagaagagccatgccccatctcgccgcctcccccacctccgccgccgccgccgcccctgcctccgcccgcgttgccttcctgcgccctggccgcgtcccccgcccgccgctgcagacagcgcgtggccttcgcccggacttgggcaccctgcgcacggcggagcagcccacgttgtacgacctactcgggatctcctcggagggcaccctcgacgaggtccgcgcggcctacaggcggatggcgcgcaagtaccatccggacgtctcgccgcccgacgccgccgccgagaacacccgccgcttcatcgaggtgcaggaggcctacgagacgctctccgaccccagccgccgggccacctacgaccgcgccctcgcgcgcggcgtctgccggcttgccttctcctcctcccgccgcgtcgccccctactactaccaggtacgtttcgtctcctctcctctcctctctagtgattttgatttgaatttgtccccaaccttcaacacaagcccattcagtttctaacacacaagccccagccttacatgatgtttgatccagcagcctgacttaatatgtctgctccatcttctcccccattcaattcaatacttgattgcaattccttctatctttcttgtatcaccgtcgtctgcagcacataactcaatattgcgcctgcatgtgcttgtgtatttgtacagattttggcttcatatatatatatatatatatattattgctcaagttcgctggatcaattcatcataactctatgtaggatgcgagtagagatttaccttttgttcaggcactagcagtgccatacatacaaataaggaaatactacatacataggcattatctcttgcgtgatgcatatagggatgcaaaattcaccctgatgcaaattatatgcatgtaggtgatgaatagtgaatgaacaattatacttacaaacaaaattgaaaaaaagaagtctttttcgtgtgcctcatagttaaacttatccaggacataagttagagaggtcgtgtcttccgtgtaaggttgaaactgggagaagctttgcttgtttggctattctgttagctgatttctactttcactcggttcatgatgttgatccgcaagttggtaatttccatttggattgtcaaaccattgtttcatatgctgttttttccatgctaacttgccacccgtgtgactcaaaaccataggatcaggaagacaagtctggctggaggagaacttggggagaccaaattgaggagctgaagaggaggagcatgacgaaggattcagaggagaacctctcctggggagctcggatgcgaagaagaaccgaaacatcatcctctgagtaactgtgatcgtaatgcttccaaagtgtaaccctagtggtatatcttttgcatcagctaaattatcataagctgttaacaagtgcaaggttagaagggtgtgctgtgctggtattaagctgtgcattttgtatttactcctacaaaagatgatgcggcaaccctatgcacaaggaatgctaagcactcctctactatagatattagtggccattctagtggtggcatagttagaagcccgtatgggggtatttgtgtcagtatactgtatacccaacccaagctatgaatgaacgatgaagtgaccaagtatgatgtgtatatttgcgtaggaggctctgcgtttccttgtgtgctctagtgtaaatatgggatatgatatcatatgagcaacttgtcaaaataagcaaagctaaggtgtatcttcaattttgaccatctactatttgtgtgttgtgccttgagtatcagggattggactagactgaacgatgaattggtgacaaaatcgtagtaataacaaaagatagttgatgtcattttcacttagcaatgaaaggctgggagggactgggagactgcctgcctctagtagttgtgaatgaatcaaggggtggtccactcaatagttggagttgagtaaataatgtgcaccagtctacatctgctagtctatactagaatccattctgacacttgtggctggtggtaaccggtgagaatgtggttttcacagttggtattttcttaaaaaaatgagtgaacattttacaagtggtcactgattaaactttttcacaaatctggtatcatttttatataaactaaatgataccctgcttttgtgatggaaaagcagacggaatatatggatgaatatatattgagtattatacaaacaatgaatagatatgttgaaatattgtggaaataatgtgaggtgtgatgattagatatatttgcatgttgatttgttgaatttaataaattataggtgttgttacaagcttggatatatagaaggtatagatggcatcacgaaatttggtcagtgtttttatacttcttaaaaagaagggagtggtggttttggtgaatctgtcaccgcccccactcgcattgtaaattttgcaagttaacccctaaacttcttataatattaaaggagattaaatctaaatggatagtcacataaaaaattagaataatatgaatatttcctatagcaaaagaatgggtaacacattaatacattttcttttatctgtagcaaaaacggaaagccaaatgtcatagctggtctgggctggactaggctttgtgatggaacggcccatataaaagcctcagtcagctcgtgggcggcttttgggcgcgacccttgcttgttttggcgccaagcgaaccagatttggcgccaaaatccccccgcccgcgccgcttcttctccctccctcccgcccgcgaatccattcagactgcaaactctgagagagagagagagagagagagaggccatgcccacacagcacctgacctctcgccgccacgctgagctactccgccatctcctcctagatggcggcgccgccgtgaaggacctccgtctccgccgtgtcgtcccgctcacctccgcgccccttgacgactcctcccccgacccggccggccctgctgccaaatctggatctgcagagacgacgccgccggaggcccaagacggccgggagcgaaagccggtaagtcttcccgactcccttcatcttcatcttcatctcagacgcacaataaaattcgttctagcttagcttggtgttggtggccatctcatctcatctcatctcatatgtgttttatccgggcggggcggattaggtcgtccagcggtcgaagctcgtgcacgccccggcctccttcggctaccgccgcttactgcctttcctcaaccaactgaccaacaccaaccaaggtagtactacaacaaacaccattctcctcctcccaactaaattaaatggcccttgtttcttcttaccccattcccttcccttcccttgcgttcgtgtggttcagaatcagaatgccctagtggcaaggacaactccaagattgatgcatatgccgaatctgaatctgaagctcaacctgatcctgtgcattgctctatcagcaccaccaaggaagaaatcaacatttcctcttctcatctttcaagcaccaagatggtgagtactgtctttgatgtctccttttggtctcccttgttatgctatattcagccagatctattcccatctcctcttctcttcaaaataaccttgtattaaaaatgtatgcatgtatgtttcagtgcctttcccggtgtcagaggtccaggtttgttcaccaccccagctcatttagctacaagaggatgctgccatttgttacggagaacggtacgatcagatgcattctcacatgacgcaactgtctacttagttcagggtatcacatcgccaatttatctcatcatgtgctactgtctactttctcagagatcacttctcaggaaggtcacaggaccaaaattccaagactcgtacaagaaaagcaatcttcaacggatgagaatcttatcttgaccactggacagcatcactttgttatgtcaggagactctgctgaggaatgcaaaacagctcaagtcgaaagattagtagaagaaaacgaatcaaaatcagacaggattcatcctcttggtggaaggctgcttcagcctgctgtttctgaagccgctcatctagaactacaagtcagtacagttgaagggcaaaatctcacacaggaaagagtgctagcttcagatgcacaccttctatcttcagacaagggtgagtgcacattgaaatggaatgatgtcctgcctgctggacagcatcagcctgctgcctcagaagacttctctgaagaaagcaacaaagcaggagttgaagcagtattagaagagaggaaatcagttccagacggaaattctgtttttgatggcagacagcttcagacttttgtttcaaaagcttctcctccagaaggcacagctgaaatgcagaaggccacacaaaaacaagcagtgacttcagatggtgatgacgaccctctagactcctgcaagggtggatctcttgccaaagagcagcctctactgcatgctacagagttgtcagtaaaagataatgctgaaggtgatgaggtacatcaatgccaaagcccagagttgggaacttctgatgtttgttttggtggtcctaccaaggttgtaataccatcagtgaattcccacaatgcactagagcaatgtgattctatggcttctctagatgaaccgttgcttgatgtggagatgacatgcattcctttggacccttgtgctactggtgtgccctactcagtgaaggaaacgcctgctggtgttctgtgcacgtctgatcattgttccactggcacacccttaacagtggaagaaacctccagttccgtttctgttgtgcacattgagccaatgtcaagcaaagtcagcccagtacggcaaagaggttccccttgtttggaaaaacgaggcctttcccctaagaaactatctccaaagaaaggaatacttaagagacatacaagggggtgcaagggaatctgcatgtgcttggactgcagcacattccgtttacgtgctgaccgagcttttgagttctctaggaagcagatgcaagaggcagatgatataatagataacttactaaaggaggtgtcaagtcttaggaatctcatggagaaatctgctggccaagtaagtgtgatcactggcacttcacttttattttcttgtccttacaatgatcaaattttatagtacccttttccaagggaatgaaatgctatcatcttattttcctgcttgtcttttacattaatcgtgcaaattcatcaaatttaagcacttgagagtcaagatcaggctctgtacatatcaatacatggggtggtagaatgtgataaacttttagcaatcctttttgagagaacacaaacaaaatggggatatcttctcgtacatacgtggaatttcttgtttagatcgatgatgccttgtattactatcttgtccaaatatataagtagaagaagttggtagggattgctttgtgcagtgaacgtatatgtatcagaatacatgcatatgttcagtagacatgaatggcagaacgcgtttgatgccataatttatcatttctcaccaggaccaaaatttatgctatcgtaattaggttgtctctggctctgtcagttcttcctgcatattactgatggacactttcactgcttgaagtatgttgattgaaatatgaaattgagagaatcctgaaattgacaaaaaaacactttggttgagttgcagcaggagacaaagcaaacagcctgccagcgggcgtcacaggtggaggtggtggccagagagcgtcgtaggcagatgttgatggagctgaactcacattgcaggatccctgtgagtactgtagctacctgctctaccgataatcagcaatattcgctttaactaaaagtagtagcagtgggaattcatttgtttgactgtgactgactcagggaccaagggtgaaatttgcacaatatgttgaagagaggatggcgtcgtctccatcacctgattcacctagcaggagaagataaacaggggaggatgtgtcctgtctgatctatccagcttacctggttaatttttgtgtagtgcagtgcaatactcctacttggttaatgtgttgtagagggtgggtggtctgtttttggaggaacagcatgtcatgtgcatcctttgtttgacagaaaatggaaggaccatgtgcgtggcgtactagatatattaaatatttattattaccaccagtccagtgaaatagtagaatgatactatctatatacacagttttgagggaattccgctgtttttttttgtttctttttgtagaagtacaatataactagtaagtagtagtagcagcaaacatgcaaagcgtaatatatagaggagtgaatatgtatgaatgaatgaaagagaaagaagggagggctaggctagccggcgtagaggtggaggccgacggcgaccatgaagatggcgcagaaggcgaagaagaggagggcgtggacgaagatggaggcgacgctggtgcgcatgctgtggaactcggcgacgcggccgttgctcccggggatctggcacagcaaccccggcgtcagcagcacgaacaagaccaacgcgatcagcactggaccccaatcaccagaccccatcttcttcttcttctcaggcttactaattccttgtaggctactagctgttgctgagcagtgtgcactgcactttcacttcacttcactctggtatatatgctgtgctggctgctacaagtacaggtgcaagaagaacaaatcatctacaagtatatgcttattgctggacctggacgatcgatagatgcatgaatcaaatggccggcctgccctgacaagtacgcctgctagtactaaatcgtggagtaagaaattgttgaggccggcgctggacggcatatccaattgcaacttaggtacgtatggtatagggacaacaatctcaaggacagcttcgtatcctccaaggcaccagatagcaggcccagacataaaatataagggatgtgtagtattcattaagtaatctttcataaaaaagaaacatgagcaaaggccacccatccctcggtccctctctgggctgaaaatctgtgtgatatatatatgatcatcgatatacagtaattaaactaatggagtactccagtagtaagtatatgggtaggggattggattagctaaggtaggtaattaattaaattaataaagagactagtttagtgtactacagtaggtaactaagggcagcaggtggttgcagtagtgagggatggtctcatggttacaatggcggagtcgtttgcacctaagcgtttggcccgcttgctggcctccaggaaacttttgacggctcgcctcacatacgcatccgcctgcttcaccgtcatcgtcattctcgactcgtactcctgtgcgaagcttgacagcatgtagtcgccgttgaggaaggccgccagctgcaccagctcgcgctggaagttcgacagccatcctccgtcttctttctggtcgacgacgacgaggaagatggcggcgggatctccggcaatgtctccgggcaatccgtccttggctcgtccaggtccgtgaagaggtgctcgaaggtgcccgcccacgcattcctcctggtgaggaagtcggagctgaggttgaatatcttcttgatggtggccgggatggaggagtgctcgtactcggacgtgggcgttggccctcccggcggcctccccaccaccgtccctttcctgatccacggcgacaccatgatggtgggcaccctgacgccgaggcggtcgaacctgaagaagaagggcagcgggccacggatggcgtcggggctggggacgccgacattgggcggcgggacgtggtcgtagaagccgccgtgctcgtcgtaggtgatgatgagcagtgtgtggttccactgcgggcccgcccgcagcgcctcgtagacgtccttgaccagcctctggccgttggcgacgtcgtgcgccgggtggtcgtcgtcggcgggcgtgccggtgaggtcgaagtagcgtggctcgatgacggagagcgccgggaggaggcccctgcgggcgtggtcgcggaaggcggcgtcgtagcggcggaaggtgccgcgggcggcgttggcgacggtgcggaggcggcggtagaagagggtggtggggatggtcttgaagtagacccggtagtcgagggcgtcggcggcgagggagtcaaagatggtgcgctgcgggtagccgcggaggaggttccacttgtcgtgggcgacggcgccgtgggaggtggcggagtagaggaacagccggttgggctgcgtgggccccgggatggaggagaaccagcggtcgaacaccgcgaaggaggaggccagcgcggagaaggccgggagccgcgacggggtgaacccccgcatgacggcgtcggtcaggagcgcgctcacggagacggcgctgcggacgaagcccgacatgtctgagggggaggcggcggcgccagtagagtcattgggtcggaaccccagcagctgctcgaggacgtcctcgaaggcgtgggcggggtcgtcggggacgacgaggtcggcgtcgggggagacgcagtggaggagggagtcggctggacctggtcctggagccgggttgcactctgcgccggtgaggccgtcgatggggaggcccagcagccgctgcatccaccccagcatgtggtcgaacgaccggttctccagcgccaacaccaccacgttctttatcttggaatccccattggaattgggtgcctgtgccagcattaggaagagcagcaacagccgccgacccatggcgccggaatgcccgtgctgctggagatgccgtcggtgaggagagagcggccacattactagctagtggtgtggagtaccaagtacaacaagctagagaaaaagaaaataaaagatggcggtggatcgatcacttcactagtacagctgcatgcgctggcttcatttggcgccactcaccacctgctcgtgtcacccactgccaagtgctactgtcgatgtttctaccttctcgcttaataacaatcacgatttctgtattaagtaaatactctctctatcccatagtataagggatttcatatagatatgacgcattctaatagaatagatagagtgatgtatttctaatagaatagatctgtatagataaactattatagagtgatgtattttatgttattaattctagtacaatatatcttatttattctttatactccatctgtcccaaaatataaggaattttgagtggatgagacgtattctagtactataaatctggacatatttactgtctagatttgaaatattaaaatgcgccataatcaactaaaactccttatatttatagacagagagagtaactatttaaatggtacgtaagaaacaacacgagatgaactcataaaaatacttccccactgccgcttcctttagggagcaatgttgttctagccttgcatatggatgtggtggcgacagccgaatcgattatgtatgtactccggcgaagtttgttgtgttgtgccgtttgaagatgcagtggccctgtagttacgctgcatgtgacaggtacaaacaaactggccgacctacatatgtcaaacagattgcccgccgttgttggttcacgggcttattgagatgggattggaacagctgcccacccgttctctcgttaattgttgctcctattatgtacaagtattagctatctgcctatctctatctcagagactcagactgagttcctgcttctgttctttgtttcagagctggtacttagaaacctgagttttattctcagcccctgtttggatcccctcaaatttttcatcctgtcatatcgaacgtttgaacactgtatgaagtattaaatataggctaaaaaataactaattaccaaattacgactaatttatgagacaaatcttttaatcctaattgctccatgatttgataatgtggctacagtaaatatttgctaatgatggattaattaggcttaataaattcatctcacggtttacttacggattctgtaattagtttttttatcagtgtccgaacaccccatacgacaccctatataatattcgatgtgacacgccaaaactttacactcctgatctaaacaccctctgaatgtctgagacagtgcccactctgtgctataaactttgtgagtgagtttttacccagcgctccccccgtttgggctttcaatataagctgggtctctgacctctctaaaaaaaggtatgtattacaacttaattgataaaacaattacattacttatacaagtagttgtagaaaatactacatccatctaaaaatgacgaacgtcataaaaaagcaaagggaggatcatgtgttgtcattgataaaaaaaagtagattaaaaatgttcaatccgatttaccccatcaactatcgtaaaaagatagatataccctcctcaactatggtatgtacagggatgcacgtgggccgggttaacccatgtacccagcgacccagcccacgatacatggggtcaaaacctcgtgggcttatccatgaaatttcatgggtcatcatgggctgacccttctgttaggttacacatcacagtaccaggcaccagctgcgccgctgccgcctcacactccgcccgtccgctccagcgctctacccctccaccgcgtcgcccaatctttgttcaatattgagtgatataaatagctgtaattctaaaagagtgtcaaaatctaccaaattattaacttattttgtttgaataataagtacgttaatgatgcatgttttctagctgctcatttgatgcatcatgcttgctgatgatttagatgtgttgatggatagagttttctgtgcctggagaatcgttaatgggttgacccatagtggctccgtgggtcagcaagtcaggactcagcgtgggtcgcgagtgacccatggcctgtaattcattaccctgggtaacatgggttagaccgtgggttgacccagaaaggcccacgtgcatccctaaattattgatatgagatgactttacaccccttatatttttaaacatgacaaaataaccctttagccgaatgcaagaaagtttcacctcctatctggtgacgatcagtccacatggtagcggcgtggcagtcagttagctgtttcactcttctctcccccttcccctcttgctcttcacatgtcgcattacttccccacggttgggtgcaagttgtttcgctgccagatcgatcagtgccagcccagggcccgggcagggcgagcagtgcggctgcgccgaggtgccccatctcagtatgtatgtgtattgttgtttccatcactaacttaatcgctattatttccttgaaaacatatactacctcagtcccagaacataaaaagttttagagttggacacgattattaagaaaat

SEQ ID NO: 26348 - DNA, 794 bp, Oryza sativa
caaaatcgtctatttatgcagttgatggacgtagtgacagcatatctttatgggtcacttgattatgatatttacatgaaggttcttgacggaatcgacatcccgaatcagaaggtaaatcgtaacatgtattgtgttaagttgcagaagtcactttatggcttaaaacaatcgggcaggatgtggtacaaccgattaagtgaattcctttcgctaaagggatacactaaaaatgatgattgcccgtgcgtctttatcaaaaagtcccccacaggattttgtattatctcggtatatgtcgatgatctcaacatcattggcaatacacaagatattaatgaagcacgtcatcatttaaagacggaatttgagatgaaggatttgggtcaaaccaaattttgcttaggtctacaacttgagcatttaccttcaggaatccttgtgcaccaaagtgcatatatccagaaaattttggagaaatttaatatggacaagtcatatccttccaaaacccctatggtggttcgatctctagatgtggagaaagatccatttagaccaaaggaagatggtgaggatgtacttggacctgattttccatatcttagtgctattggcgcacttatgtaccttgcaaatagtacgaggccagatattgctttctcggtaaatatattagcaagatacagcgctgctcctaccaacgccattggactggagttaagaatgtctttcgatatcttaatagcacaagagatcttggacttttctttaaaaagaaccaggattcgact

SEQ ID NO: 26349 - DNA, 3740 bp, Oryza sativa
gatcggtcgctctctcttctcccagacctgccatacttgtctctatcatcccgataagatcgatcactaccatactttgagtggtaagatcttgatggtgatcgtgatctacgccctcgtgtgtgtctaaccggcggagagtatgatctagaccgcctgctccggcggtacttgataggtgatcttgaccgagatttcgatctacgggcagaaggtgatggcgacctataaaataggcatactagtcagtgtccatcttgcaatatgtataaagtaaaaaattgaagtattttttcttttttctttttgttcaaagtaggggcatgtctaaggttaaaaatgtgacaggtgaaaatttcatgctcccatgcagttaatgagtcatgttgctcatcgcaaaaaaaaaagtcatgttgctgaaagttgacatgccgagacatctcccattctcttatgaatgcttcactttgaatattgatacaagaaaaccacacatacatatatacaaaaaaaatgtgaaatatatatggaataacagaaccacattgttgaaaactaaagccaccacttcaaaataaagcacaactttctaatcgcatgtgccccatcaatcacctctagtacgaaaaaaaaaacatagcaagattttctgcacataagtaaatatattatctaatttcatttcctacaattgaagctgataagaaccatgagggatgagaacacagtctctgtcacctaaatcttacgagcaaatgaccataatttgttacaatatgaggagaaaaaaaaaatctaatcaacaaatactaaaagcataccgtagcagttcaggtaaaattaaagaagaatcaagcactaccttgacttccctctggcatccttctcttcgacagtttccccaccaaagccctccgctttcaacttcctgcttatctcagcagcccttgcagctgctgcttcagtggcggatttcatggtggctgcgcgcgcagcagcctgttgagctgctattgtctgctgcattatcagagcctgctggaattgcatctgttgcaactgaacagcttgctgcatcatcatgggcagattgctatttgccaaattagttttgggagggagggatttggccatctcaacattcaaggggcgaccaccaacatccatgttgttgagtgccagcgctgcagttgcttcttcttgtttggagtattctacataggcaatatgttttgagtctgtgatggtgcaatcaaccactttgccacagtatccaaatagctgcttaatatgatccaccgtaagaagtgggcttaggttgctaatctgaaccattttcttcagaacatcacctttatcagttttatctgttgaacctacaacaatggaacgtgcaacgtaagcaatgtatcctttggcaaaaaagaaacactgtttaagttcttcagtattacatattaggcccttcaaataccattgttttctcattttgtctcggctacaaatttaatgttttctagaaagatctaagatgactgaatagcgacaaatatgcacagtatcaaagctattttcagaagcactctcggtgacaaaagtatggagggtgtattaatgataaaaaaaactcagattcgtttaatctgctcagaaagtgtatgatttgttttcatccatagcaattatacaggcatttagctagcttcagcaaaacaacagaaatattgatgcaattaaactgaagttccatatagagtttgtagtagtaaagatgactaagatagtaaaaatcaagagcaacagcatagaaactgaaaccaatgcaaatatgcgaggcagactatacactcataaccctagagcatctagggacaagaaaacagcatcccttaaaggttgagggattacctgaagcctcccctcctgcagccttggaatcagcctgcatctgcgcagcatgtgcctgcagtgcctgtgcagccatgatggcctgagcagcagccatggcagcagcagatggtgccatgggcgcctggctgagcgcaccgacagatgtagtggcagccagcacggacatgagcagctgctgtggcgggtggttgagcttgctacagtctgtggccttggtgcacttgccgttgatgtgctcccggcaaatctccccaagcgaggcaccaacaccaggcagcacaaccccaccagaggcaccagtagacgcagcagggaggaggccgagaaggctggggaaggcagccgagagggcgccagcgtagtttggcatgttgggcatggtctggttgaccatgttggggtaggcggaggagacagccggaagcgtgggcgggaaggtggaggtgacgacggtggcggcagtgttggatgcgctgaagaagacggggaaggggctccccatgacgggcgacccgtcgaggtcgacgtggaccatgtagttaccgcgcttagggacgacgtaggtgacggcgtaggagccatcgccgttgtccttgactgcaccttcgaggtcgtcgccgccgacgccagctgccggggagacgcggacgcggacgcgcgcgccggcggttgggaccctgcgcgagtcccggtccttggagacgacggtgaaggtggcgggggcaccagcggaaccaccagcgatgccggggccggcggcggaggacttggaggggtcgactggaccgggaggggcatggggccggtcgtcgtcgtcgtcgtctgcgtcggagtaggcgtcccgagaggcttgggccggggaagaggggcggtggaggtcgtcgtcctggtcggggtcgtcggcggcggatgcggagagggccttgaaggtggcgtcgaaggcggccttggcggcggcggcggtctcggcctcggacttgagcttggcctcctcggcctggcgcacccagatgggcttgggagccgccatgcgaggagagggagatcgacggggctagggtttggtttcggcttggagcctggaggaggaggattcgattcgattcgattgtggggaggagaggggaggtgagcagcagcagcttctcaaatcccaaatctctcaacaagagggcaagggaaagggacttgtttctcgtgttgttgggccgtaccaggaccaggaccaggcccaggcctaagcctacgcccactattcgttgttggattaagtttaccaaatttatccttaaaccgaaataccatatataacgggaaccgcctgtgtatcactcgggtgatttttgagagattttttcttcccttggatttgcatccaacggactataaaataaacatatgtaattttagttatataggactgtaattttatattttagtttcaaatgtcttaatgttttaaccgttaaagaaatcaatttttatttagaaaagaaccgggcctaagcatccaacacacggccttatccatgcatgcagccccaccaattcttgcataaatcttggcccacatatggtgcgactaaaaaaacgtgaaatgcctaagaaaaaatcacacgatagacgtgtagcaaaatcatatataacgggtccctcaatatacaaaacaggatcgtccgaggttctaaggcagtattatgcccggttttagctaacatgtcaaagctgagtcaatgtgggactcatgggacccacatgtcagcggctaacgcccacaaatcaccacctaggaatagcaaatttccaagcgaccccatggtacaaggcta

SEQ ID NO: 26350 - DNA, 711 bp, Oryza sativa
tgcaagtagctcatcaaaactccatatcagtatacaatttagaactaactaaactttggaattaaaaaaagaaaatataagtagaagtttgagtctatattgaaatacaatttataaccttaatttataaaaataaaaaataaaaaatattgaaataagagtttacaatctatataaaaatacaatttagaaaaaaaaatgaaaatttggaatagaaataaggaatattggtagctagccgcgcagtttgcgcgggccaccatactagttgttattgaatacaaatccagaataagcctgtattcacttcgattgactgaatgaatgttctttgtttctcaaacaattgaaatatactgattgtcttgcaaatgtagcaccaagagtatgcgtgaagatggaggatttgaggtgatcaagaaggcaatcctaaacctatcacttcgccatgacttgcatataagtgcatatggtgaaggaaatgaaaggaggttgacaggtttacacgagacagctagcattgacaatttctcatgggtatggtttcagcggcctttttatatctttatgttttaatttctatttttaagctatactaacgaaacatttcattaaagggtgtggcaaaccgtggatgctctattcgggtggggcgagacaccgaggcgaagggaaaaggtatatgttcttccatgtcccctgaaattgttg

SEQ ID NO: 26351 - DNA, 524 bp, Oryza sativa
  unsure (1)..(524): unsure at all n locations
gaagcctgctgctaacagcttggtcaattcctccttgatcgcgtccttcctgtcttgtgcaaatcggcggagtcgttgtttaataggcttggcgtcttctttgacatgtaaggagtgctcaatcacctctctgggaataccgggcatatccgaaggtttccacgcaaagatatctttattattttgaagaaaggggatgagcgcgctttcctatttacaatctaactcggcgcctattacagcagttttggtaggatcggaaggatctaaaggaatctttttagtctcggcttcggtttccccactttttgaaatcttggcagctggcacttctccttcgctcaccgtggttgcagccagtcggatttcctctcgggcagacgccatctcgcgggtttgggccatatcacaactctccttgtcacatgtgacagcttgcttgatgtcgctccgtagggttaggactcctcggggaccaggcatcttcatcatcatgtatgtgtagtgcgggacggncatgaact

SEQ ID NO: 26352 - DNA, 19673 bp, Oryza sativa
ggtcgagttacgactactgcctggtcctcgaccagcgatgtagcgtttctcccaccacttccactttaagtggtcgagtgacgactactgcctggtcctcgaccagcgatgtagcgtttctcccaccacttccactttaagtggttgagtgacgactactgcctggtcctcgaccagcgatgtagcgtttctcccactacttccactttaagtggtcgagttacgactactgcctggtcctcgaccagcgatgtagcgtttctcccactatttccactttaagtggtcgagttacgactactgcctggtcctcgaccagcgatgtagcgtttctcccactatttccactttaagtggtcgagttacgactactgcctggttctcgaccagcgatgtagcgtttctcccactattttcactttaagtggtcgagttacgactactgtctggttctcgaccagcgatgtagcgtctctcccactacttccactttaattggtcgagttacgactactgcctggtcctcgaccagcgatgtagcgtttctcccactatttccactttaagtggtcgagatacgactactgcctggttctcgaccagcgatgtagcgtttctcccactatttccactttaagtggtcgagttatgactactgcctggttctcgaccagcggtgtacgactctcctactacctctatttcaacaaagttgatagctggtatacaatatcgccaagtgttttacccagagatcccttaccacgacgacacctagcgttgaaacctatcctactgtcccattacgccgtcttgacaaggcctccgaggaacctaagggacttcgggctggggacgcccagagccgataaggccttgtcggatcctgtagagacaaaagaccatgtaagatctggtcgtgtaagagttctcgccgtgcgtattaaccaagccgtgtatcggaaactgagctttccaacttcacggctgggggctaggatcagtgtttgttcaaccaaggcaggtcaagggtccaagagccttatcctccgagaacgattctccgacgacaaggctgggggctagggagagtgtatgactctacaaactgactgatcgaagtcggtaagagagaagacgctcatacacaaaacattggtcggtaaatttaattcattttcaatttaccatacatattataacattatcaccctttgggcattcgctcgggggctatttctatctaatattcttttctgagtattgatttcaggaaaattctattcgacattgacgaagactctatgtctctatggttctacaccaagatcgactatggcgagtacgacaaatgttgacaaggctccgtcgcagactctacgccttctcgatcgctcgagaacggttgctggatctcgacaaggaatacggaatgaagagatggtgtaccagccgagatagaatttcttgacttcaatccaaattctcgattacagcaagacgggagacttagtcgtacgctctgtacttccttggttgacatcagagattgacttagacaaacccttttggtgcccgcacgaggctgataaagaaagtctaacgttatctctaaactcaccgagaacggtaacgtgagcacgacaacagttactccagggtctgcggttgagaatatgaattcgttcatttgcattgaagtcgggggctactgtcagggttatggataccacatacctaatagtagttgactaaatctcggcaggacccaccacataccatgtcttatacagaaactaacttcagttatggagggagttccggataaggaaagacaaccagagttttacatggaaacgacaaggactactcggattgtatccatattggtttccctagttctacttggacaatgggacacctataggtataaatacaagcccccctaggaggacagtgggacacccaccatgacaggatcaacacagtcaccacgatcgacacagacgaccacctcaatcaacaaccaccacaatatacggaacaacagaagccacaacatacaagccaacatatgccaagacaagccgccggatatcgacttcagggataggcatggctattcccctacggtgtctccggataccgtcaggagagacgaaagcgctatctctgatctcgccggacacggattcgaggaggaaggctaccctgttgtcgactacgagtcagaccttcagaccgacatgtcgacaacagttaaataggctaccccacatattgtactggtgtgattatggtgaataaaagcaataccggctccggccaacaggatgtagggttattacctgacaactcaggggcccgaacctgtataaaaatccttgtctccgtctctttcacctcagtctcgcgtatatcctagcaccgacgatccccatactatgcaaataccagaattgcgacatcaaacgtcgatagttgcgtatcaagtagggggattttggtgcttcaggatttcgacttgatgggtttaagagatggattctccaataccatgctagttttcattatcgacgaggatttcttgtgcacgtacattcactgacgtgctagtaccaagtaataacaaactactcttgttttaaaatatactcctagtactcgattagacactagctatctagtagtataaatctagactgatttgatagtactatatgatgtttttttcgagtacaaggttttctgtattttagaacgatgagatataacaagaaaacatatggctacgaccacatcgtctgcatgcatgtacgtaaccccctgcataagtggccgaattagctcttgctgtggttgatggcgccgcacttgttcctgatctcccccttgctccccaccggcatgggcagcttgctgagcttgagcagcgaggcggcgaagtcgtggtcccagagggcggcgttgtcggcgtactcgcggacgtggccgcgcgcctcgtcctgcgtcagcagctgccagtccgagttgaagttgttttctgatttgctactactgcactattgagttgagttgattctaagtaattggattggatcattttgttgtcgcgtgtgcttgcttattttgttgcacaagcttcctagttattgctactgcactattcctccgttaaatgcgcctaacttgttgtttcttgttcagtccgccgccaccttcaccccaccatgggctttctccgcactcgcccagccccgctatttctccacaagagctaccagggtaaaattactgctctaattgccttgcctatctgctacctctgtccccaaatccaaatatgagggagtttggctctgcattcgcattgccaaaatcccttgtatttcttttcggggacggatgaaatcgattctgcatttgcatccacgattcctaactggatgagagaggagtgacctggagaagctacctgtgatgctggaagttttaccccctcgttgagacttgagaaggatttattgttttgtgctgacaagcaacattttgatgcttttctggtgcaaaaggttatgatgaggcgccttgagcagcgcattaggaaacaggagagggcggcaggaagtatgcatggatggcgtattgctcatctgaaggcaaaccacaggctagatttgttaaaatcagacatgaggtaagaatgaagaattttgtgaaaaaaacatgtttgtttaggttaggttttgacaaagttactatgttttgacaggggtgaccaactcaaggtgaccgcgcacatgtacagggggacctgttcgtcatatttgccggtgcacacacggtgatgagtttggtcgccggcgccataaacttcaaggaatccaaggaggcccctccgcctgagaagatgcaccacccccgggaagccctgcaggtcttgggctcttggctattatagatcgatgtggacctgatgtgggaaaaaacctgttatgtaactaaaggttaagacaagtaaaaaagaaaacctagctttcagatctacaagagaagatagagcaaattcgagtagaggtgtgtgggtacaacgagagagagagagaaaaaaaagagggttctggtgcgtcggcaaggatgctcaccgcgcaggaacgagctcggcggaggccgaggggatgggggcggcgcagggagcagcaggacgccgtccggaacagctgctcgccggcggtggcggggatcggctccacggcggggcggcgggccgtgggcgatcaaaacgggttcggaacatcctctgaactcgtggagcccacatccagtttttgatgacgtgttcacggttttgcttccaaatttctaaaaatttacccagatgtaattcgtagtgtaaataaactataatgtaattttgaacccttatgtaaaattaaatttgtgtaatggagtattacatttatatttgatgggtggcctaatctacgagtttttctttaaagaaccgacagcgggagctctgccgaataaaagaaccttggaagactaaccctattcttttctccaacaaaattgataagcttttggatactcgtggcacgcttttctaaactgctaaacggtagtttcatgtgaacactttctatataaaagttgttctaaaatatcaaattaatatatttttcaagtttgtaatgattagaacttaattaatcacataatattatcacctcgttttacgtgaaacacttaatcttcatcttaaaggaagattcaaacaccacctaagtttctctctcctgattagtattcccagaggtctcctttgccttttgtgccgtatttgttttggctatcttgttttcccaacatctaatcgagaatactgtgtcggccgggttgtcaagtttcccggtacaaatcaagtccaaaggcacagtttctgaacaggtgatcagtatcctcaaaagcttctgagcaaagagagcatatccaattgcacggccacaaagtttatggttttgtgataaaattgttagctatccttgcaattttgtgaaatgcaagactaaacttgcggtgaggcaaattcagcaatggatactctcaagtctgaaccccaaaaacatgttcttgggtgaggttgcagtacagtgccactacgcctggtgtttagagaaacattaggatataactaatccatatcgagttagtatttctttatctctatccatacaaattatatatatacaccggtcccagaagcttaatacagtaatccacatatacggtagacatctccagcacacgctatcaaatgccaacgagacaaaaagatcataagctggagaaaatgtgagagacatgacagatattagatgaacacaaggaatctggaaatctggcaaaagctttttctcagtcttggcatcctctctgaagagagattacacagggcattcattcagtttgtcaatgacccccaaaaaaaaggttaaaatgcagagactaaactttacaatggtgcatcagctgactacatctgttgtacattttggtggttgttcttctggcacatgaacagttaccattatacaacacatcacatgcaaaaaaaaaaaaaaaaacaagaaagaaacaaaaaaaaacgaaatatgatggaagggaccagaagtgttggccaattcctcaggtccctgcaaacgttgtgcaacgaaaaaatccagggctcagggagggcaagccaccatggctggctgccatccttgaagaacaatggtcaaagtccccctaaaacgcgacaggatcacgctgcccagatgccttattattgttgtcccttgctcgagagcctccgcttgtatcgcttcagcacggaggccaggttctccttccccttggggaaggcgacatccccagctgcggtgccactcctgcccttgcgccctgagactgcggtctccacatccttgatcatctccaggaccacagatgcggtggtgaaggaacctcggatttgccttggaatggagtttgttgctaccaggctactgtggcgcaggctgttgagcacccggatatctctgtgaaggcacgcacacgcgctgagagcactccgaggcttggagaatgcaggatccaggatgccctgcattacatttgagcgaaaaaaatgattgacagagttagtcttgtacgttgaaaatgagcagtttcaggtttgcagtcaagtcttgggcactgaaaaacaacactcaaattcagactagttcaggactgaaatagctcacctgaagacggttgagaacataggtatacttgccccaaagttctggcctgctttccaccagagacaggtctagcacccggcggatgcaccagacaccgaagctgacaacgagggaggcgcgccagatgcagtcgtctccgcagttaggcagtacgcgcatgtactggatgtctgccttatcacatggtggttgctgagtatcaccaagcagcagttggttgtcactggttccttgttgcaatagcttctctaccgcagcaacttgatcaatcagatcttcgtcgctgccaccattttgcttgaacagccaccctgatccttctagcttcaggagcttcgagatgcagaatctaagagactgaagaagcttcgcctcagactccttgtaagagaaatcatccttggtcatgccacccgatctgcctgcagggttgaactcgcttttagtgagctccgcactcgacacaccaaacagctgctcaaaaggttgcttagcccaaagggatcttgcacttgggtttgggctttgttgcattgagaagatatcccctgggagcttaggtggagagagctcatcaaacgccaagggagctgcaggcctggccaccgagtttgtatactgagatctttccgatgcaagcctgctaaggtacgactgggatccaatggtaccaccacccaactttgattcattcaacagagcactcctgcttgcagcaatcagtgcagatatgtctggtgagctgtggtacttctttgagtaagctgatgaaccagcattttcattcccgtcaagagtggaagggacataataggatctttctgccatcatagtacctatccgggatgttgctgcgatctgtgaaggagtagctcccaatgaagcaagcaagttctggttacgagcatgcatgacagaatcgacataggttggcacagccgatgcagaagattttggaagtcgctgtgggtccaatggcatgctagagtaaggatttcgattagcattcatctgttttaggtatgatgcgagctgatacccatgaatcgttgcaggttggtagaattggttgttgtctgcgtatgatggcgtgctaaaatttgaatttaatcttgcaccttgatcgagtaagctgttgcttgaactctgcagttgggtacttggtaactgcatgccctgagaccaggctgatgacccaatgttattgcccatctgaagcccatatgtcagatccaaattcgacatctcattcttagtagacatcagatcccttgaacttcccaagaaggcagacccttgtaaattgtctcgtaccatgggactcttcgggatttcattagcttgactgtctgctcttacagttgagctaggtgttcttacgtctagcccaagcaagatgtcaaaccttttagagctagcttcttgagtgagtttcccatggtaatcaaagagatgcccccagaactcatcaagtatggctgctagttgcctccttgctgcacggcccaaaccagataacctcgagagactcccgctgccattgcctgcatctgagcctttccccctgctgaaggtaagagatggtgggccatcatccgatgcacaggaaggattattgcctccaagtgacttgttgtcagactctagaatatttggagcctccttatcattgtccatcaaaagagctggttctacttcaatatccctttcgcctgtgctcttggagtccacactctctactgtactttcctcagccacaatagcattagaaattggctccagaggctctggccagtcaacagcaacaactgattttgactcttcaggaatgaatgatggagagtgacaggattcaggagcggtagatgtatgagcagtggaatgttgagaatcatgatcagattctatagctgtgtccgaactatcaatgtagtccagagctgatttcagacaatccacaggctgaatcctaggagaagggacaacatcagatctctgatcttcctcataggtaacattgcccgcacaagtctcttctctgtcttgagtagtattcaagagctctttctgagaaggcacagaccattcctgctgcaattcagcttcatggcttcctgatttcagtggtgtaacagccatgtagagtgaaaatgcaacagagacacaagccaccgtgatgagaaccgtagatggaaacaccacagggcttccagtattccctttcagagtgttcagccaaccactgtcaccaaacagcatttctgccataaagatgatattcgaaaacagcatgaggagaaatgcaagaaatgttaatatctccagatgcaaagacactctgtgggcacccattatcaatcttgatgaggcaacacggaagagtggcacgactgatgatggaaggagcatggcctggataatctggcagattatcagtaattggtatattccttcagcacctgcaaccttagcacagtacagagcaggaactatggcaaaagccttcagtatcagatgatgtccagagagaggaagattaatgccaaacaaatgctgcgaaatcacttggctaccaatagcagatgtcaacgagatgatgtggctagagaagagaagaaccactagaaatatagttggagccatagggtttacaaatatctgcaaaatgataaatgttaggtagtgtatatcactttaggattgctactgaaacaagatttcttcagcaccagcttagcatatcacagggtgaagtagtaggaactatagtactaacctggttcattagttctacaacatcttggaaggtgagaagaagggtgttagtggaatcagctgctgcagagttcattagaacatgattcaccagaaaaattccagtaaaaataaataatactgaaaacaagtgatcatgaaataaggcaccaacagcaaaggcagatcttttctgaccctgaaaagagattatttgattagcaaacatggatacaagctgaaaaaaaaagacaaccaaaagcataagacacaaagggcaatgaaatgtagctggttttgctgtcaaactcactaatgctatccatttttatacactttaggtaatatatatatcatatactagcaaacctaaggcaaagacctcatgaacactagacacttaccattagtgaaccaaaatatgtacacgcgaaagtaaaaaagaaaacaaatagaaataggccacagttttagggaacaaacatttactcaaggaacattctagatttgtgcttgtcaatcagaaatagtattccgcatgtggcacaatagcttattaaatactatagtttcattggccataattgttagttaagctccaaactggattaagtgagaacaaattctttcactaactaacgatgagcatgcctaacataatgctgcaattcgctagaagatgtatcttggtgttttgaaattaagtcaatgaacatcacttcaactctgcgcaaacaattgaaataggacaaaccatatctttttcagttggatacagcgtacccacaaaccactggatctattagaacaaaaacattctccactacatccgatattagactggtataactagtctaatatagtgacccttgctatcagtttggaatttctgaactgttcgaaacactagcaaagctagcaacatgtgtcattgtgtggtgtaaataattgtggcatgccattgaccattgtccaccaaatgcccaaacccccctcaccccaaatgcatcaaatcaaatataattctaactatgtaatgggcacaaagaagcatcataatttacctgaacaactgatgaatggatgtaaaagttgtgtgccattacgtttgcaccaagaagagccatcagagaataagcactttcaccactgagcttggggaaaattacattcgttgtcagaggaatttgtggttggctgaccaataaaccaagaacgtagcaaagaagcgcaaagcctgcaatgcaagcatttaatgtccccaccatcttctttccctagaataggtatatgaaagtaattgacaaatattaactccaaatcagattacaatataggtttgaagttttctatatgagataatcttcttctttaccaggtgtgatatagcatatggtagcagattaggaacaacggttgcaaaacatatcccagtgatgagatcatcatattcaaatagaagattgaatccaagtgctatcccaaaaatctgaaattgccagatattacaatcagaacaaagcatgtgcaaaacatgcagcatttatggctgaaatttctcaggctcagatctcatattaaatatcgaaaagagaagaggctgaaaataccatcgtcaattctgatgtcaacaaggacaatcctgcttgaacacccagaaagatgcatgttggcctgctgtattcttggtggcagatctttgttccatgtggaaaacacaaaaatgtcagcaacctcgaaagaatttcacgaacaaaacgaataacatagaaggatcaaagcacactgttttacagggaaagttggtttttccccctccgcaaaatggccagctagaaagggaacttgagatgagcaaaagttccttttccaccatttccgaaaacaaaacacctcctttctttgtttactatcacaacatatacaccataagggcaccaaaaaaaaagaataggattcttttgcacaagtatagttccaagtgaaccatcattttctttatcaacaggaattcacatacgagatttaggaccttcattatgaagatgcttttcctactcatcagaattcgctcagagactcaattcagtatcaaaaacccatcatcatttctaccatttgcgaaacgacaaaccgatgtcgatcaattgactgatcaaggccagagaggctggacacttttagagggtttgctcctacacttggtcaatgggggctcacacatttgcacactagtagagaagtgctttttagtcctgattcgtaaccttttgtagacctgattttttaaccgggactacgaatccgggactaaagatcgctatctttagtcccggctatctttagtcccgattggtgttaccaaccgggactaaagaggttagattcagttgctcctttattcttttcttttcttcattggtggttttaatatattgatttcactccatcccatcccaaaaatcccaaatcaatcatccccgaattgcctccaaatcctcaaatcgatcatctccaaatacatcataaaatcttaaaaaaaattacatcacaacttctacaaaattcatcacaaatgcatcacatattcacatcacacacaaatctcagatccaaatcacaaattctccaaaaataataataataacggcgttttcgcttagtggttacaagagcctcagtagcacctgaggtcttgggttcgactccccatgggagcggattttctaagatataacggcgttgtgcttttagtggtaggcgacatatccgtcgacaacgaggtgcctatggtgacttcgtcaatctcaaggatttgccggcccagttttcgaagatgcttataggggtagggtttgcgtgcgtgtattcatagatgtgagtgcgtgtgcgttgtgagtatctacattgcactgtgtaattctaaaaaaaaaagccccaaatcttttacatgagccatacaaccaaaatactataaccagagtgaataacaaattaaggtggttaattttcctcctcttatagaacaaggtggcaataaaaaattgcaacatgaatggtgtgtgtgcatggtgtagattggagaacaaaaacgtttaattagcacaaggtgcaaacttgccactaagcaaaaacggcacgcacaccaatggcacaagtgcgttcttcactcgagccagccagtatagctttttagctgttggtgacgttgcagaacctcctgacctccccccgcgccccggtgagcacctcgatgccgcccatcttcaccatcgacgccgcaaaccgcgccatccacgcggtcaggtcgccggcgttctccctgaccttctccgccgtgtcgttctggccggtcagcagcgccgcgtccgacgtgaacagcacccgcccggcgagcgcgttcttgaagtactggttgcccagcgtcgccggcgacacggggctgttgttcaccacgccgtcgtcggcggcgctgccgtcagggcacgccgccctcagcgccgccgcgtagctcgcgtccagggacgcgtccaccgtcgggtacagccggttcttgaacccggagcagtgcgcggtgccgatggagtgcgcacccgagagcgccaccaggtcgtcgacggtgagccccttggcggcgaagctctggacgagctccccggcgtcgaagaacggcgacgggatgctggagaagacggagaaggcggacgacacgttgccgtcgcggctgccggcggggaccgggtagacgaagccgccggacttggccaccgagtcgcgggcggcgaaggcgaggatgtcggcgcaggagaccttgccggggcagacggcctcgacggccgccttgatcttgttcacggcgtcgtacccgcggagcgggatcgctgtcttctccggcgagccgtttgccttcgtgggatcaagaaggatggacgcatcacaaccctgcatgatcaaaaaacaaaaaaaaaaaaacttcgtttacattttttttggggacaaaatgaagtaattaaccatcaatatctaagctttgcttgcagtaatatatcttgtgagaaattaaaactgctatcaattcatagttgaaaaactaaattaacttgtggttagcaattacattaccatgacaaagcaatcatggaaatgcaaacgcagcagcgccggggccatggaagggtcagcatcgatcaagccgtagacgacattgctgatcgtctgctcggcatttgggcacgacgagccgtagaaattgtactgcagacttgcagttgatatggagatgaggctcatagcctggaaggctaccatgagaattagcttcatccccctgctgaacattctgaattctgacaaggttgttcactaggagacagcaaagaaacgcctgaaaccgaatgaatatatgtgtagtgatcgctacctcaaaggattggttgatgtttgatgatgtgacaggcaaacattcgatgtatttataggtacaaatggatgtgcaaattgatcattgataattgagctactccttttgaatgaggagattgattaaataagagatttgaggaatatttggagagcaatcatcagaatagttatttgccagttcttgttgtctaacaacatggggagcaaaacagctagtaactgataaaacgtgtaggcgttgacatcgatccatacctggcgttgtgacggtgaacttaatttaaattcggctggagctatatagagtaaattaattggccgtccagatgcatcatgcatgtgtcaaccgaagcacagtatttgatggaaggatgcatggcggagctagaaagatttttgagcccagacaaatttcaatataactgatatttgctatagaaatttcatcatctatttactcattaatattaaaattttgtgtagttttcgctaacgagcccaagcagccgcccggtggctagttccgcccctatgaaggaggtcagtttatttggtcgatttgacaacatgtatctttatttcaattcaaatgctgttacctaagagcgatgtatttgtagaatttctttccatgtacagtagtaaattaattaactttcacgtcaaaagcttgtgttaagcgtatccactggaaaggacgctaacgccatacatatctttaggattttgagggaactatagcaggcatgttcgctagctcaaatataatcgagattatagtggtctcatcaatatttaatcactccattactgttatctagcatccgaaccaggctagattaattaaacattttcttatttgacttcccttttgtttaagaggtcctgttgactggttgggaagcagctaacctacgttcatcccagccgtgtgtcagatcacgtcaactactgggcctatcaattggcaggtgcaaagcgagcgaccaatagactagcaaccccgaaaatttccatgtacatgcatggatctaaacaaatgtgtttcaacatgtttttggaccccatttttcaaaagttctcatctgcactctctattgatttggctagaacaaatttatttttttctcccataagtgttcgatgataatcatgtcaactgcaaatcagtactacaaaaagacacataaaagtcagtattataggtgccggaataactaaaaccggcacctattatgcttttcccacccaccggagcgcccgcggggggcgctaaagggaaaaattggcacctttaagtatttataagtgccgattttgaaaaaagtccgacaactatactatagatgctggtttgtttatgtgtgttcatcttgtgttcttgatgttcatgtgtgttcttagatattcatgttgtgttcttgtgttcttagatgttcatgtgtgttcttagacgcctcaagtgcaaccaccccaaattcttagatccagtctatggaagtcgcggctgccacgtatgtcatccatctcatctcctggcttggaacccatggattgttggctttaataccatattgttacgaacccactctatgtgatttagtgaattccagcacaagcacacaattcttcctccaacacttgatacacgagtatttggggatacaaatgggagaaatggaatcaagactgagaattagcagtagattggagaagaagagatagccagggattgaagagaagagagatacagaggttgaagaagagagagcatcggaaggaagaactcaggtttcatctattttgttcgatcctcccatctgttggatctgctccttttgtaacggcttgaatgattggcttatcgcagcggattgagcctagctagccatgggctcaatatgtataccgattcagcccagttacatgacaatccacgagtactaaatatgtatgggatttagtctatgcactaacagatgcaaaatcagggacgaaggtagtaacaattcataacaggtaaatatatgggtaaccacaaatacaaatactttatattatactggagtagtctttttttttcgagtacaaggttttctgtattttagaacgatgagatataacaagaaaacatatggctacgaccacatcgtctgcatgcatgtacgtaaccccctgcataagtggccgaattagctcttgctgtggttgatggcgccgcacttgttcctgatctcccccttgctccccaccggcatgggcagcttgctgagcttgagcagcgaggcggcgaagtcgtggtcccagagggcggcgttgtcggcgtactcgcggacgtggccgcgcgcctcgtcctgcgtcagcagctgccagtccgagttgaagttgaccaccttgtcgaggttgttgcggtagtaggtgttgtccagggcgctgaccggccgcagcttgccgacgaacgccggcatgaacctcgccacggtggcgaggtcctcgtcgcgggcgttgttcaccaccgcagggtcggcgccgccgccgcgggagcacctgtagttgagcaggttgcggtaggacggggtgatctggtcgggcggcgcggcgaggcgggcggtgaaggaggagcagtggccgtcgccgacggagtgcgcgccggagaggacgacgagctcctcgacggtgaagttcttgcgggcgaagttgtcgatgagctgccggatggtgaaggtgggatccgggagctccgcctgggcctcgtaggcggaggagacgacgccgtcgaggcggcccgcggggacgtcgaagcggacgcggccgttgctgaggatgctgctggcgtcgcgggcggcgaagatgaggatgtcggcgcaggagaccacgccggggcacctcctctcgagatcggccttgatctcctccaggatgtcgaatccttccagcccgatgctcaccggcgctgccgtctcaggacgagggttctcgtcggacgcgttaaggaggacggaaccatcgcaaccctgcaatactcatgcatgcatgcatgcattgtgcaaccactcattagtcccaagtgcttcaaagctactagtacctccttagtgcttcaaaactactactccttttcactatataagttgttttggtcctctgtttcgtactcccttcattactttttatagttatattttatcttaatacaccgatcaaagataagtaattttacttatcatccatttaaatatgctactagttatttctcgtaaacaagcgatttattaatatatttacatttctcgatgcctatatagccaatattgcgtggaagaatggagagtcacgcattaaattccggaaaagctgcgcgagttaagcaaatagcgcgcactttttttattgagaaaggactcgtcgtttgtgttttttctgttaggcccacatctttttcccttttttttcacgttttgtttttttagttattttctatttttgtgttattactttgaactcaaaattttaaacttttaactgatatttgaatactttcaattcaaatttgaaacgttttcaatccatatttgaaaactttcatctcaaatttaaaaactttccactcaaaatttgaaactttcaatctagatttgaaaattttcaacccagatttaaaaacttttaactcaaaatttaaattttttaaagtcaaattttggaactttcaacttttcatcttaaatttgaaaaattttcaacccagatttgaaaactttcaactctcgacttgaaaactttcaactctgatttgaaaactttcaactcagatttaaaagttttcaacttgagattaaaaactttcaactcagattcgaaaactttcaacttaagatttgataactttcaaatcaaaatttaaaattttcaagttaaagatttaaaaattttcaactcaaaacattttttgaaaaaatatgtgtgctaaagattaaaaaagtaataagacaaaagcgaaaaaaaagataaaagaaaaaggcaaaaaaatcgcaaaaaaatcttgcgaaaaaaaagaaaaaaagaagcctgatgggcttccgggccggggccaacaggcgggcgcgcgccaattagccacccccatgaaatccaagaaagtcattaaaagaataggtggttggattgaaatatgcctatcaaaagtaaattttttagatttggaatatgatggagagagtattataactcattttaattttttttcaaacctttttaagtttgattaagtttatgaaaaattttagcaacatttacaacaccaaattaatatcattaagattaacatttaatacattttgataatataatattttctttgtgctgaaaaagttactatatttttctataaattgaaagtttgactaggaaaaaaaatagaatgacttataatgagaaatagaggtaatataaatgaattcactcataaatccatttaaaacccgaaacaatttataatatgaaatagatgaagtaccgatatgtactcactccgttacacaatgtaagtcattctatcatttcccatattcatattgatgttaatgaatctagataggaaatgtatatatctagattcattaacattaatatgaatgtgagaaatgatagaatgacttacattattaaacggaggaagaaacaaaatataccctgacaaaacaatcatggaagatgagacggatgagggagccgcctatgccgcggtcctgtatgatagtgtggagattatgggtatcccatatctacacggcgatggtattcgaactgggtacaggatacctaatgtagatagaatatcttatctgtatctcgggtttgtttcttaacttgtgtatcaaggaaacacccagagacttagtcggttacgactgtattttatctgtatcttcatattccgttaggaatatagattatcttttgtaatccggactccttcccatatataaggggggtccgggcgcctctaggggcatatgctgattttttcccgaatcatacaatcaataatacactcggcggattcatccccggacaggagtagggtattacttcttttataagaaggcctgaacctgtataaatcctttgtttccaaacccatacactttcctagcttgatagccacccccttttattattgccgaaatctagtttcgacagttggcgcgccaggtaggggtagcgtcaagctttttcgccgatcagtgcaatgggttccatctccggcatcgacgacctcgtcttcccacccgggcagacgtttcggttcggcagcctcgacttcatcaccaacaacttcggcaagatttctctcctcgactcggaatcagaccagtcgggagagaaccggctttcggtcccgtttggattcccgaacgcggctgaaagctatttcaagaccacctcaaccgagtcggcttcaaaccactcggccgagatcgcatcttctccacgataccagatcaggatgatgggccttacccaccggtcctgatgaagctccccgacgatttagcggccgtcttcaccacgacagcgccttcatcccgtaggcctagccggaagtcggcttcaacaccgatttcgcctagcttcagggaagtcggcgtcatcctccaaccactcggcacggtttcgacggatcagctggatgactacaacagctctcccaccgtcgactcacgtcctactgacatcgtggagtacgacgaatttagttctcgctacaacgacttcgacgacttcgacgacttcgacggaagcctagatgacaactacacccctctctactttggcgttttcatggccaataatgagacggaggagcaacgccaagccagggagaacgaagaacgtcgccgactggaggaggagcatcaagcgcaagaacaagaacggctacggcgtgagcagcaggaccgtgagcggaccgcgaaggaggctgaggatcgacgtcaacgagctttggaagcagggcgccgagcgcgtgatctcatcggccagcaagatgtcgaagggacaccggttttccgcacccctcaacagaatgcggttgccgcgatcacccttctcgacgccctcctcaaccaaaacgagctcaatcaatccgaccacgtcgtcaacatcttgacccagacgaagaccatgattgcggcgacggtccct

SEQ ID NO: 26353 - DNA, 3886 bp, Oryza sativa
attcatgcacaaacatgtgtacaaataggggtggataaagagactctttttaaggaaataagtcgctcgatcgagcttatcttaacgagctagttagggcacctacaatgattatctataagctctctacaagagatccatgtcagcatattttcctacttggaagagattaaatgaagagagagagcaaagctatctactaacatggagatagtctatagagaaaaacgaggcaatggattagagagctatagatactcatgtagacataccattgaagtggtttactattaatctagtctattgttgaggtatacatgttttatagatagcaccttactttaccattgcgggtgctcttaggttcgactcgttaaaagcctagctctgtttgacttgcgagctggtttgttaaactcgttaggtaatttgttaatgcattgataccacattcaatttttaatttagtattcatatataaacttaataataaacattaactaatggagattcactaaatacaactagtttggatgtaaataaagcactagttatgcatcagccatacttagacgaagaaatgatgatcttttgtattaacgatctaaacgtgaagctcgatcgtgagctagctcgttaagctcacgagcaaaacgtctagcttggcttactacaagttaaaattggtccgaggcgagctcactacaagtcgatccaagtcatgagttttaagttttttaattccctatatagaaattagaacggaactcgtatgtaattatagaaattaaactgataactagcctatttattattcagtattgttgagatcctaatgaacatatgtacggttcagccgtgcttcatgcatatgccatcgtttgatcgactgatatgatcccaaaattcccaattaaggtttattcgatttcaatcaatattagtgtagcttaatactgtgtatttgatttattttcttgaattatagtgagccaataggtacaattgttgtgaactagtgatatgtatttctcgcgacgtgattgactagtaactttatgcttgatatgtgctaccaccttttctctcaggtaatgctaccatagccagcgacctttcctcgcttttattagtacaatgtagttttattgatcactgttgccaatttcatatatttatttcaaaaattgtatttattactagctgattattcttttttggggaaaactctgactgattgtgaatcatatatatcatgcatggcgccatgattcttttagagctaaggaggcttaaaacagttaaccccgacatctagtttttaatagtcttacaaaaaccatttcaattgattttcaacagttttgcaagtcggccgattgatattttggcttgaagacataaaccagtagtgattttctcttatctctaaaaagattcataaccatgaaagtttagaggttattttttttggtaaagtgtactttcattaattgtgtttaaaccgtcattaatgaccttatctaattattgcacgaattgttagagatgactgctacaaattaatcatcagaggttgcctttttttataatattgagtgagacttccggttgagctcttaataaattttcagattcagatcaaaatatttaacaaactcattaaatcccaaaactatgtcacggaaaaaaagatccttcattcaatttcatacaacaacaatacaaactttcatctcatgccttccaaaaataaagaaaaaatgcatatccaaaacgtgggaatgcgaaaagtagcctatgccaaacagcattactactgtcaacctcaaagctagcttgcaaattaaaaggattggccacgttgacactttcaagtcctctccaacagtgaaagcacaacatgggcaaagtaccaataaaaagtgataatgttataatcttgttgctttgctatgcaaccttgcttatttctaattaataacagtgccttttgaattattggagagcaccatcacaccacaccacacatggtagcaagttcattaccatacttcaattgctgaaagtcttccatgtctttgacttaattagacactgttaagtgatagttgtattagtactagttacatccattgttggtgactgagaagccataaaagtaaagtcacattattcccaagagggacttctcatttaggcttccttcttttcagttgaacgaactcagctcattctaatagggtaatgaagataaccattaatgcataattacttaagtggagtacttactattataaagtattttttttaaaaaaatatttaatattaacaaaacttgtaagtagaaactttttatataaaatataaggtttgacaattcagaaaacatgctaacattaaacaaagggagtagtactagcatgtaggactatcactgactggtgcatggaccaagtccatccactgctgaacatggggaacaacactacacagtaagcacagaatcttccaaataatataaacaaaaagatcagaaatttttttaagaaaacaaaaaaaaataaaaaaaatagtgaagaaaaagagctagggagaggagagagaaagagagaaagctgaaagctgtgaaagaaaagcctctgctgctctctgctagcttcttctcctcctcctcctcccccttctccccgtagataaggaggacccggggaaaaaggggaggcaaaaagctgcgattttccgctaattaaccccggggattagctgcccaagaacaggaggaggtacgattcttgcattacttcaccccacgcgattccctccccggtttcccccaatttcctcccgcaatttctacttgttcttggctcctctctgctgttcttagcctcgccgcgatggcgtagtcttggagaagatcagatccatctcgagttcgattggggttttttttttctctcttgaggttgctggtgatgagcttcactttcttggattgattttttttttgttcttgttcgttgagtttttcactttgctctaatccaaatcttttttttctctctctctctctctaatatccataattaatctgcagatttccatgattggtggtggagttcatcggcaaggaattcagcagaagagatcagattctgtacacagttcgtcttcttgctcggtgactaagctgggttaggagaggaggaaaagaaaatctttttttttttttttgcggcgccatggatgggcagcagctacgtagctcggaatctccggcgagcggcggcggcggagtcaccggcggcggcgcgccacatctgttccacgcgctcgggccggcgctgctgatctcgattgggtacattgacctcgggaaatgggtggccgcggtggaggcagggtcacggttcggccttgacctcgtgctgctggccctcctcttcaacttcatggccatcctgtgccagtatctcgcggcttgcattggcacggtcaccgggaggagcctcgccgaggtatttcgagatgcttctcacctgatgtttttgttttgtctgattttgtagtggtgaatgattcatcatcatcctcatcatcgtcagtcaattgatcgacatcggtttgtcgtttcgcaaatggtagaaatgatgatgggtttttgatactgaattgagcctctgagcgaattctgatgagtaggaaaagcatcttcataatgaaggtcctaaatctcgtatgtgaattcctgttgataaagaaaatgatggttcacttggaactatacttgtgcaaaagaatcctattcttttttttttggtgcccttatggtgtatatgttgtgatagtaaacaaagaaaggaggtgttttgttttcggaaat

SEQ ID NO: 26354 - DNA, 574 bp, Oryza sativa
cgggcacaccgttgagcgtcacctcgtagtgcagattgcactcgttgtcaatggacatccaggccatgccgacggcatgtggattctgtgcatccgcgtgctcctgtcgcttcagcagaatgggttccgccgagtcccgagcatcggccactggacggggcactaggcggccacggatcaggctcgtctcatgctcggtggccacattaacgcccagttcgccggcatacagcgactcgaggaccttgggacccaacttctccacactaccaatggcctggttgaagttgaagctcggcgtcagatcctccagcttggccttccgcttgccctgctcctcaatcaaactgatgttgggcctatcccgggtgttcacgtgctccgtttcgatgttgtaggccagagatccatcggtgttcaagtagacccacgccaaaccggtgctcttggtcgaggattcggcactgtgcgacgccagcagggtttggaagatttcgcagctggctcgagtcacgatgtgtccctggatgcgcagatgtgggtacttcttggactccacggccagcaggagttt

SEQ ID NO: 26355 - DNA, 2646 bp, Oryza sativa
gctccaaccttgggaattcagcttctattacagatgatcgattgacaactttcatgactaccaggtttagccaggtctgcaatagccaccatggtccacctgctccaactattgagccgacggctatcttagccgatgcattgttcaacatttggtatagatagccgagaaggattttgcccaaagggaattgtttctatgatcctaaagcttcgactacaaattgccaattggtttgtgggaccacagctggatccacagaagagaaacttttctagccacattagcaagaaagctacgtgctcccgaggagtgacaggccatttgcccatgtatgccgctacataaccagaccaccctcctatgcttttggtcttgaagtggttcttggtgttcatactcatacggttacccgataaagttacatctaatctagtaatcatgatgatgtcgatcaaagttggagtcatcggcccttcgttaaataagaaggcattgatggtgttggaccagaaataggtggcggcagccatcagaggttcattcttagcagaattggctatggtgagagcaagcgcttggccgatcccaatctcattctagtggactttcttactagccgatatgtgttggtaccagatggtccagctcttatcaggggtaggcttttcaagagatggccaagacttgaaggtattcttccagtgacccaggttagggttggctagtctaaaggggattctgttggtttcaccaataatgaaatcagtggggtcaagattgccgattgggccaagaaaatagtggtttttgtgcgataggctgggaatcgcaactaggttggaaaggtgctgcaaatccaaaggaatcgggaagcagaaaacataatgagaaaaggagaaatcgatttcatgcgaggaaaagggatctagccggtgagaacttacctcagcgtactcggccgatggcgcagtagacgggctagtggaagacgacatcgccgcacgcggagatctgatcaaaagcgaaatcgcctggggatcgcttttgcgtcggaggaatcgccggagagagaaaggacaaagtttcgcttgagcggtgaaaatagaagtcacggtgtgaggtttctcgagggcaacggttggtatttaaagcgatagaacgtcacgactggcaataacccaacgggcgttccttacgtgcgtgtattactccttgtcccaggaggcaaggtacaccaaaagttgatacaattcagagtttaacaagcggaagcgtaattaattaatttattacatgggcggcgaaggcccagtacacaagaagacaaacgaaaaacagcggaagactagggcgacgaccacaggcgcttgacggtaggcacgagctagacaccaaagccttcatcttccaggaactcctcttatgggtttgggaaaaattgagcaagactgagtacaaccaccgtactcaataagacacacccacaagtgcagaataaatgcaagggagtacaagggagccataatatagggtgttagggtttgcagtaaacagcattaaaagacacttagttgctcaaagctattttgtaaatacgatcctagagctatacaagattattaatcaaggccgtgaacccacacgaacctgccttaacccaaggcctactatgattcagaccgaactggcaacccaaccctgggtcccagctcatcccaagccaacccaggccaaccattccacattttagttgttaggcaggttttaagaattaaaaacactaacttgggtacattgctcggcttgcccataaccgagggcgcggctattcgaatagattatactctgatcagaggtgtacatctttacccacaagacacatcttcctcacgtgtaaccacgtgccacataccaccacggtatacggacggaagacgtgacatagtttccaacccatcctagccatagacaagagtaccgacccaactccacctacggccggaacccccgggacaggtaggcaggactgagcccctagcagcaggacaccggccctgtgccatgacatctcgactaccgggccgcagctcgtgtagccttcatttgtcctagagatgtccatcgacccccgacttcgtccatctccatccgtgtacttttgtttataaccagactgagccacaaactaagccttacccactagacatgtggaagtacgatagtgctttgcaacagaggcctgaagaccggtccttatatggccgaggtgctactatcaaaaccatgcaccccgagcccagcctaaaaccattttgaggattttgaatagagagggaggtgtgaatccaattccacaataatccaaccattccatagtgtccaggtgatgagaatattcccaaagtctagagttgtaaaaccacctaatgttgcctaattaaccagcgaagcatctacctaaaatcatactagtggtaccatgagtagagtgtccactagttggggttttgtttaatctagggtgaacaaggtaataatatcaataacaataataataataataaggtcataacaaaggtaaataggcatggctaaataaaacagtgataacgtgggcatttaagtaaagcgataagcaatatt

SEQ ID NO: 26356 - DNA, 2357 bp, Oryza sativa
accagtcaatttggaggtctgaggttgcggatctggtctgatcgttggccctccacctccctgagcggtgtgttggcgaggagaccggcgctgagtgactggtggatctgacttcatcaatgcatattcctgaacaagatgcttccatagttagtcaactcagcatgaagataaaattatgttctgatcacggtttgagggtttccgatgcatacctgtggaggcggattgaatgcattatatggcacaactggcagttgatgagagtagctgactacaattgcatttgagaagattttatacatcctctccttcatgattttgaaatccagggaatctggttcttcacggttgggatcatgtttgccgtcgaactcgaatgctgtgcgggatctttccttgattggcgctagtcggcatttgatgaagtgccgagtgatctgctctccctgtaagccttgttctttaagatttaacatacgatccaacaactccaaggcttgtactgcttcatctccgattggaagagagttccaagtatcttggtacactggaggaagacaagagtacccgggaagagcaagctcgggattctgaacatagaaccagtttgcatgccagcctttgttcgaagtcttgaagggcatcgagaaatatttttggctcagagttccccttagttggaatcctgcccccccgactacacacggtttgttcttgtttggttggggcttgaggaagaagatccggcggaatagggcaaagtgaggtttgatccccaaaaaggcttcacaagcatggatgaaattggcgatatgcactatggaattcgggtttaggtgatgcaagctgattccatagaaattcaagatcccgcggaaaaattttgaggtcggaagagcaaagccgccgtagaagaaatgcgagaagaccacaatctcatgagtatccggagacgggaaaacctcaccgtgcgctggccgccacccgatgatctccttggcagggagaacgccgtgcgccaccatctccttaagattttcctccgtcacgtcggatggcgcccattggccttcgaagctttctctctcttccgccatcggtttcactcaaatgtgctgatttgattcgagggatggcttgggagaggtgagggattgaggcggtggatcacgggaaggattttgatgcacttttcggaggtggatttggccggagctgtgaaccctagttcgccggcgcagctttacactgtagcagggagtggggaaaatggcgagagttccggcggggaagacgaagcgtcgcttggatatcggatttttcagttaagggtatcggaggtgctaatgggcctaggcctgaacagtacttcagcccaatacttttaacagcgtggcccattgtgttccttagggacttaggcatattttgctttggcaatattatgcgcacaacagtgttgcccaatgctgatgaaatcctttttatgcggtcatataattctttggaattattgcaatgcaaattaaaaaggtgcccgacagaaaggcgttatgctgtttttgcaagcttttttaggctacaaaagctgtttgggttaactagggatgacttgtttttattatagtcatttccttggcgtattatatgcctgttttcatggtaaatagtcatggcctaggctatttgacttatttattaccataatctttataatacttgatgggtaatctttagagtttttatattcggatgcctgtcaagtgtgttcattcgtgaactttttagagtgtaaaccactcggatttcttttattgtggctaaaaagcagtcggctagcatgcctatttaggcgccgcgtgtgcttttgtcatataatgcacaattgtgttattattttgtctttcaactatatgtttagtttgttaactaatcacatagttgggggctacacctaattaggtgcatctattcgatgcaccatattctttatcttttcgccctttacagtccactcggcagattttggcttgaagagtttgaagtactcggattatcatctttgagaaggctatgatggtcgactgcaaaggactcgggggctactgtggagattatgggtatcccatatctacacggcgatggtattcgaactgggtacaggatacctaatgtagatagaatatcttatctgtatctcgggtttgtttcttaacttgtgtatcaaggaaacacccagagacttagtcggttacgactggattttatctgtatttcatattccggtaggaatatagaatatcttttgtaatccgacaccttccatatataaggggggtcccggcgctctaggg

SEQ ID NO: 26357 - DNA, 10718 bp, Oryza sativa
ttaagtttgtttgaatgtccgaaaatgtgttacaatgtctcaaacctatttgcatgagtggatatttaaaatttctaaacgatatcagatagacacaaaacctatataaaagttgtagatatagataagatctacatttttctacacttttcattttatcttatctatggtgttaaatatggattataagttcaaatgatagtggtctcaaaacaatagcatttgtttccaagacaagaagtgtttgtaggtgatatggcaaggtgactttgtgtgaagtgagatgtcttgaatttgaatttttcttgacacatttgtatgaatatggattcaaaaattatgtgacttttgggaacgagagtgtgattgtataggtgcctaataaaaataccaaatattttttttgactttttagcacctgaaaaataaaaaacgaaggtgtgttggttcaagaaccggcaccaatgagcattcatgtagtactgcgagcagatttaggattaattcttatgacgagtttgaagataatctaccacgtctagattgagtacatattctcattatgataagtaaatatttgaagtggggtatttacctaagaggaaaagcacagaaaaaagaagaagaatatttgagtcgacgagagggagcctcactcctgtctagatcacaaggtgatccaattttctgacaaattttgctaccatcatacccaacataccagtaggttattgggagatccaagtactttgtcttgtgcactagagttttgcatttctactagggttacataaatttatggcagcatattcaggattttattccaatagcgagtttgaagtttgtgcatcatgtttcgtgtctatgctaagttcacaccaatggtaagtttgaagtatgggtcatctcttttctatcgagggtactacatgatgttgtttggagattgaagatttttatggaggacactacggaacgggtgcccgatttttggagaaaaaaattgggccccctaagcatgcatgcaatcttttcttctgggaaacctccacatgcatgcacgcagtcatttcttctcttccacatgtgaggtacatgcaaacttctcccatccccttgtctcttctcccatactcttaattagcaaattataaaccattttttcttatgaaatacttatccaatttgtgattcaattgcaccgttgaatttgttgcaattaaatctttacaaagagatctcacatgattatattttggagaaataaaacatatgtaattatattactaattgaaacatttttattataagtgggacattgatttgtgacctctaaaacaatacaaaatatacattgaaatattgaaagaacaatacgtgcaagatcctaaatgatctagtgaaacatctgctgaaatgtccaaaaaataccacgtgtaaaatttcaaatgagctagtaaaatacccagtgaaacatcacaaaatacatgctgaaacatccaaagaacaccatgtacaacattccgaataagctagtgaagtatcttgtgaaacatcacaaaaaaccttctaacacattcaaataacatcacgtgcaacattccgaatgagctagtgaaatacgttctaaaacatcacaaaatgccttctgaaacatccaaagaacacgacatgcaacattccaaatgacatagtgaaacatcacaaaatacctagaaaaacatcaaaataataccatgtgtgcaacacttcaaaatgacctagtgaaacattagctgaaacatcacaaaatacctcctgaaacattcaaagaacaccacgtgcaacattaaaaaatgatacagtgaaacatcagccgaggacatcacaaaatacctccttaaacatcaaaaaaacatcccgtgtaacatttcaaaatgacctagtgaaacatcattaaatacccattggaacagtaaaaaaatccattataacatcacacggtttgaggagagacgcatgagaatccgattgttttccctacaatcaggcgtctggacaggagcgtttcggatttttatgctacaaggaaaattcgtcttaagatggagattgttaaatatgtgatccaaatttcagcatgcaatatgttcagattgtcaaaacttggtggtacatttggctacaaaggaacgcaaagatcttcagaggagaagaaccggacatgcaaaggacttcacaccagatcatccaagatattcaagaaagcagttttgaattccaaccgtcatgagtgtatctcttcccttctcaaaccaggatctatggttctgagatgattctaagttgtttttccgcattaatcgtgtaaaccatacttttctctccttctaatatattcggcaatactcttgccgctttcctttcaaaaaaaaaaatagcatgcaatatgttcggattagttttataataaaacacttgattagtttcttattatgattgtaagtcttttcctactaggacttatagatttctcttttacatgtctcttgtaagctacacgagaagggtgcgacaacccagtgtgtcgtgcgtttgtattcaacttctctatatcgatcattgctagtcggtgtccgtggttttttcccgtaaggattttccacgtaaaaatttgtgtgtatgtgtgcgtgtgtgtatagaactactatgtggcaccttaaggtgctacgtattaaatggcacgtgatacagcccccagccccacccactgctcaaccccccaccactgccgctcccaaccctgtcccccaccaagtttatagcatgcagttaaaattttactcactaacgaccaatctcgatcccacccctgcgccccctgcccccactcctatagtccaaataattttttttactaacagtgagatagtttcttgttgtactctaacgatgtcagcatcttgagttatttttttactctatgcgcattaaattgttacagaacgtagagaagcgaatcttcaggaagtagtcattgcaaaaccgccacataacagtgatcacgcatagttatcgtcttctcctaaatatctggatcggcttttctcttgccacagcaagcccctcttccttgtgtcgcgactggctaatcggtgatcgccagcaccgccgcagttgctaccggtggttctctccctacgacgaccaggtaatgcgctatccacaatccgttcatcttttttttttctgattttatctccacctcgtagccggtatctatgatggacctcttcgtagctagcattgacgactgcttcgctccaccgccgccgtctccatcatccctgatgacaccatgtgacgaggcaggatgacggatccggccatcgtcggcccagatccacgagcccattagcaaggtggcgaggagaccttccctctacggtgctgaggaggatctggttaaatttttgtctatttctcaaggaaattaaaaagaagtcaatggcaagccataatggtttgcttccaccgtacagctagcatgccaaccactttctgtacatacaaccaacctattcctttaccacgcgcgtctctccaggtccccccccctctctgtctcaatcccaatcgattttcttctacccacgtgggtcccacaccgccacacgtcagcctcttcttcccctcccctttcaacctctcttcctctatcctctcctctctcatcccctctcttctctgtatctgtccgctctctcccatgggagcagccgaccagaggggagcagaataggcggagcggcgccgcatgaagccggcgggtagagcaagcaggcgaagtggggcgacggtgggcagagtggcaacgtgcgaagccgccagcgcggagcggggtatcggcgaatgacaacgacgattgcgacgagttcgacgagaaggaggaggacgcgcaccacctcttcctcttccccgtctccttcatcttcgcgccgacgaggacgtgacgtgacgatgacgctggtcctccccatcctcatgcatcgcaccaccattgctgccgacgccacggacggctcgcttgctcccatgcccgccggccggcggcgagcgcacgcgaatagggaggaggtagggagggacaaccagcacacggagagagggaggatgcggcgcaagagcaggccggggctccaagtccgccgagtccacctccacggcacccggccctgtctccgcctctgtgcccaatgccgcggcgcctgcccgcacggggcggaggcgacgcagcgccgtcaatgccattcgcgaccgtccgccaccctcaccttctcccgcgtcgcagccgccgtcgcctcctcctcttgcgcctcgccctggcggcctcctcctcagccactggccggtttgcccagagaagagaagagaagagtaagagagagagagagaggaggaagggagaggagggggaagagagagggtgcggacgtggcatcctgacatgtgggctcatgtgggtcccacactgactctgctcatgtaggataaaaccagggtcaaaaccaccgaatgacctaaagtgaatggtttttataagttgagggatgtcatatatttggttttgcgattgggggatgattttgtaactcgatgacaagttgagggaccttgggtgtactttgattggcaaataggcggcccaggccattcggcccctttagtatgatttgattttctttaggatggagggagtgcctcagattgttgctcgttaattgccacattgccgactgtcaactcttcgtcattgttgtcacactgccgaacgactgcccagaaacacttgtaaaaaaactgttgtttggtcgcctggactggtatagttccattttatttttaggacaacgaattaccatccaataaacgctatgcactagtatctctatagatctgcatgtttcattgttcataacttcatataggtgccgaaaagctcgtccaaaagtcaacaaacagtcaaaacgacatagtatttattccacacattcatgtttcatcatgtgcatgcacatatttcttccacacgtcccatttggccatgtcgtgcatggccagacctggcacagcaaggaccaagaacaagctccgcccggtcggccacagaagaagatcctctgacgtgaaatctcccttgacgtggtcactgacaggtgggctcgcgagcggttgggcccacatatcagtcaccacgtccctctgacttcatgtcagcggatcctaatccgttggccatctatttttttcacaatgattatcctaatttttctcatgttcttcctatttcttccttatttttccttgccatcttttattttctttcttttttttcctgttcctattcttcttattcttcctatttttggttttcccaacttcgatttcaaatgtcatgggtcacgtgttccaacagcgttgctaggcggcagatcatctgcataagcacggcattgacagacgctcgacctgcccattttgcgctcagaagcatgaaatagcgagccacatcatgctcgactgtgtgttcgctcgttaagtttggcactacatccggtctccctttggcttgcctaggcttgctcggcccctccgtagcgattctcttcaggtctggtggccggtagatagggcttgcctgccttagcatcttcgtaaggccttcgactctctggtcctcttggtttcctacagctttggaaagagcggaacgctagggttttcgattctttctctttcgccggtctcgatggttttccaatacattcactaggaggttcgtctctggtctctcgctggtcctgtctcgtttgggagccttttgggagattaggaggctcctccgccaccccctcccgcactactagaaaaacaatttttcatggcgtcacactataattttcactggcggttatatgctaaaatcgccagcaaaaacatgaggggtggggggtataggactgccagcgaaaaccgattttctctggtggccacgttaagacgtccgccataaaacatactctatttttcgtggtggatctcttaaatgtccgccagcgaaaaccgacgttttcgcgtcggttttcgctagtggttactaaacacttccgctagcgaaaaaacagagcccgctaaaaaaatttggcatcatttaaaatcacgcgcgtgctgagatattttcctttcacccacccactgcctctctctcctctatctcctcctctccacccacccatccacctccctctcctcctcctcccccacctctctcccctcctccttccctgctcctccagcttccacctcttgtcgacgaccgagatctgggaggggcgcggcgccgacgacgggcgggaggggcgcggcgcggatgtgcacggcgacaacagcgactacgacggaagcggtgacgatgatgaccacgaaggaagcggtggcgccgcgccctcccatcccctcctctaccctctcctagatctgtccgaggggaggaggctgccgccgggaaggacagatccgccccggcggcggcgcggggcgcacggccgcggggcctcgggcggtggagcacgaccgtcggccttgacctcgtcacgatcgacgctgcgccgtggggagcgtgaagccgacgccgccaggtcacgggcggtggtgctcagatttctgtagatttgtgtggatttgtgtgcatttttgtggatttctgtggattgtgaatggaaaattttgactgtgaatggaaattttttattataaattgttcgtgtaaatttatgtgaatttgtgaatcgaggagtggatttgggaataatttgaaccggtgttgacggaggcgaacggagcagtgttgctttgtcatttttttttaacctgggccactattttcacaggcggttggtataactcaaccgccagcgaaaatcgtttatcgctggcggccagtataacacaaccgccagcaaaaatcaattatcactggcggccgataaccgctagcgaagatcttgatcttcactggcctttgctttgtgacggtaccaaaaaccaccagcgaaaacccaaaatggccgcaacgaaagatggttttcgtagtagtgccgctagatacgagcaacaacttctagttttgactcttttcccttccgcaatctttttccttgtaaccgacagcgaccagtttggtcgattacgctgtataactaaaactctattttttttctaatatactaacgtgcaatttcatgaaaaaaatatttcatgggtcacacgtgcacgtcctggctcctcttcggccatatcttggttctggccttaccacgtgagccgccacggcatatccttgtcgagcagtgcataataatcaggatgtacccatcaagccatgggctagggtgggctgaccccacatgcatgcccgtttgatcacaaatactaattgttttgatataattcatgtcaaattgtattttttttgttacttatatcttctattatattattaaaggaatagaaaaggaagtctccacgttcgctttcatggcctagaaattctcacattaatcggagaaaaagaaaaggcagagtccatatagaaatacaatttaaaaatagttgaaattcggaattaaaaaataaggaatattagaagaggagactagagtccatatagaaatacaattagaaaataactgaaattcggaattaaaaataagaatattagaactagagtatagagtacatatagaaatacaattagggaatagcagcaattcagaattaaaaataaggaatattagaagtagagtatagagtccatatagaaatacaattaggaaataactgaaattcagaattaaaaataagaaatattagaagtagagtatagtctatatagaaatacaattagtaaataatagaaatttggaattaaaaataaggaatattagaagtagagtatagagtctatatataaatacaattaagaaaaaaatagaaatttggaattaaaaaataaggaatattagaagtagagtatagagtccatataggaatttaaaactaactaaaatttggaataaacataataaaattaaaagtagagtttagagtccgtataaaaatacattttacaaataactaaaattcaaaattaagaaaaacatttgaagaagagtttaaagtcaatataggaatacaatttagaagtaactgaaattcaaaattaaaaattagtttagagtccacatagaaatacaattagaaataataaaaattctgaaataaaaataaataatattggaagaagagcatagagtcaatattaaaaaaaatattaaaaaatgagtcaatatatataatttacaaataactaaaatttgatattaaaaataattaataactaacacgtatataaaatacaatatgaatattacatattagtagttttgtaaagttattgcaaaatttaaaattatgttgtcattttaatatatttgaataatataatgagaaaacatactattgtcagggttatggataccacatacctaatagtagttgactaaatctcggcaggacccaccacataccatgtcttatacgaaaactgacttcagttatggagagagttccggataaggaaagacaacaaaagttttacatggaaacgacaaggactactcggattgtatccatattggtttccctacttctacttggacaatgggacacctatgggtataaatacaagcccccctaggaggacacggggacacccaccatgacaggatcaacacagtcaccacgatcgacacagacgaccacctcaatcaacaaccaccacaatatacggaacaacagaagccacaacatacaagccaacacatgctaagacaagccgccggatatcgacttcagggatagcatggctattcccctacggtgtctccggataccgtcaggagagacgaaagcgctatctctgatctcgccggacacagattcgaggaggaaggctaccctgttgtcgactacgagtcagaccttcagaccgacatgtcgacaacagttagataggctaccccacatattgtactggtgtgattatggtgaataaaagcaataccggctccggccaacaggatgtagggttattacctgacaactcaggggcccgaacctgtataaaaatccttgtctccgtctctttcacctcagtctcgcgtatattctagcaccgatgatccccatactatgcaaataccagaattgcgacatcaaacgtcgacagtggcgcgccaggtagagggattttggtgcttcaggatttcgacgagatgggtttaagagatggattctccaatagcaaactactcgacgacttcggctgtggagatctaacccgaccggaacatgtcttccgacaagatcagaaccatcatcgtcatcgacaacttggtctatcgagatcacccaagcctcaagctccgcgccgtaccaaaagatgtcagatcatatgatgtcgaacgagtacgcaataaggtaattggtagattggtttttcaaattgatctactaatttcgtagatacatccggcatgtatctacaaaggtacgtaatattttatatgcaatttatcgtacctattcagatgatacaacattatcatatcagcaatttattatgtttacctagagcatgtttcttatacaacatccgttgtgcgagtacttccgacgatagaccaactacggtctaacgctgggggctcactccgttctcttatgtataaatcatgcttgtttacggtttacataatgccctgatatttacatctgcttattgtatcctgataatactagaagatccatgcagttctttgagtacatactcgatattatctgctatatatcttgccttctagaaaatatttttcaagaacaattgagcactcgagtaggttatggtcgaatatactccattatcgagaacattctcgacaaatgcggagttatcgcacccaacctaccaacaaagaccgacgacctatctcatagcaccggccatggctggactacttgagaaaaggttgttaacggataattccttgcgaacgtcgtcggcttgatcacccgacatgattgcgaacggacatccggatatgctataagttgggtacgtgagtcatgctggccacatgagatacacttgcaataaaccaactctagcacttccactggtgttcgagagataattctgctcgctcactggttctcgcaccagtacgtagcaatctctcacaccgcagcttccattggtgttcgagagataattttactcgctcactggttatcgcaccagtacgtagcaatctctcacaccgcaacttccattggtgttcgagagataattctgctcgcacgctggttctcgcaccaatacgtagcaatctttcgcaccttaacttcagatggtcgaggtatgactacggcatcgtagcggtcctcgcaccatgacttcagatggttgaggaacagctacgactggtcttcgaccggcagcgtagtggtcctcgtaccacgactccaaatgatcgagggacacctactcaccggttctcaaccagttgatcgtagtaatctctcgtacatttgcttctagtggtcgagttacgactact

SEQ ID NO: 26358 - DNA, 4829 bp, Oryza sativa
gtgacactatagaatactcaagcttaaggaagctcatgacaacctcctttccactactcaacatggagttctcattgatgttggcatatcttgtgatttgcttgatgatagtgctatttgccatattgctcatgttgtatcatctagcatttctacctcttgtgatgatcttgtggatatgcctagctctagctctagcacttgtgtttctatttgtgatgcctcacttgttgttgagaacaatgagcttaaggagcaagtggttaagctcaacaagagtttggagatgtgcttcaagggtaagaacactcttgacaagattttgagtgagcaacggtgcatccttaacaaggagtgacttggattcatttcaaagaagggtaagaaagcttctcaccgtgctactcgttttgtcaagagtaatggtaagtattgctccaagtgtcgtgaggttgggcatttggtaagccttccaagacttgcatgtttgattctcattatatgcttaggaaggctcatgatggtagcattattgctagatatgtgggttcccctatactccgtggtaaaaagaatgacatttgggtgcccaaagctttggtctctaacctccaaggacccaaacaagtttgggtatctaaaagagcttgatcttcttttttaggtgaactaccgcaccggtgggagccattgtgtgcttgatagtggatgcactcaacacatgactggtgatagggctatgttcaccatatttgaagtaggagggaaagaacaagagaaagtgacatttggagacaatagcaaaggaaaggtaattgggttaggtaaaattgctatcactaatgatttgtcaattgataatgtctctcttgttaaatctctaaattttaatttgctttcggttgctcaaatttgtgatcttggcttgtcatgtgctttcttcccgcaagaagttattgtttctagccttcttgacaagtcttgtgtgttcaaaggttttagatatggaaatctttatttggttgatttcaattctagtgaagcaaatttgaaaacttgtttagttgcaaaaacttcaatgggttggctttggcataggaggctagcccatgtttgcgtgaatcaattgagcaaactttcaaaacgtgatctagttgtgggcttgaaagatgtgaagtttgagaaagataagctttgtagtgcttgtcaagctggcaagcaagttgcatgttctcatcctactaagagtatcatgtccacatctagaccattggagctcttgcatatggatttgtttggcccaacaacctataagagcattggtggtaatagtcattgtcttgtcattgttgatgattattctcgctatacttgggtgttctttttgcatgacaagtctattgttgccgagcttttcaaaaagtttgcaaaaagggcccaaaatgaatttaattgcactcttgtgaaaattagaagtgacaatggttccgagtttaagaataccaatatcgaggactattgtgatgatcttggcattaaacacgaactttccgctacctactaacctcaacaaaatggtgtagtggagaggaaaaatcgtacattgattgagatggcaatgactatgcttgatgaatatggtgtttctgattccttttgggcggaagccataaacaccgcttgccatgcaaccaattggctttatttgcatcgtctcatgaaaaagactttctatgagcgaattattgggaggaagccaaatgttgcctattttcgagtttttggttgcaagtgttatatttatcaaaagggtgttagactaaccaaatttgaaagtcgttgtgatgaagggtttcttctaggttatgcctcaaatagcaaggcataccgggtctacaacaagaacaaaggtattgtggaagaaaccgccgatgttcaatttgatgagactaatggctcccaagaggggcacaagaatctggatgatgtaggtgatgaaggcttgatgagagctatgaagaacatgtcaattggagatgtcaagcctactgaagtggaagacaagccatccacctccactcaagatgagccatctacttccgctacgccaagtcaagctcaagttgaagtggaggaggagaaggcacaagatccacctatgccaccaaggatacacaccgctctttccaaggatcacccaattgaccaagtgttgagtgacattagtaagggtgttcaaactcgatctcgtgtcgcttcaatttgtgaacattactcgtttgtttcttgtcttgagccaaaacatgtagatgaagctctttgtgatccggattggatgaatgctatgcatgaagagctcaacaactttgcaagaaataatgtgtggactttggttgaaagacttagagaccacaatgtcatagggacaaagtgggtctttaggaacaaacaagatgagaacgggttggtggtgagaaacaaggcaaggttggtggcacaaggtttcacacaagttgaaggtttggacttcggtgaaacttttgcccccgtggcaagacttgaggctattcgcatccttcttgcatttgcattatgctttgatataaaactatttcaaatggatgtgaaaagtgcttttctaaatggtgaaattgccgaacttgtctttgttgaacaacctcccggttttgaagatcctaaaaatcctaaccatgtttataaactctcaaaagctctttatggtttaaaacaagctcctagggcttggtatgaaagattgagagattttcttttgtcaaaggatttcaaaattggaaaagttgacaccacccttttcacaaaaatcattggtgatgatttctttgtgtgtcaaatttatgttgatgatttcattttcggttctactaataaggtattttgcaagggatttggtgatatgatgtctagggaatttgagatgtccatgattgaagaattgagcttcttccttggacttcaaatcaagcaactcaaggatgggacgttcgtgagccaaaccaagtacatcaaggatctactcaagaggtttggcttggaggatgcgaagcccatcaagacacctatggcaaccaacgggcatctcgaccttgatgagggaggtaaaccggtagatttaaagctttatcgttctatgattggtagcttgctttaccttactgcatctaggccggatatcatgtttagtgtttgcatgtgtgcacggtttcaagccgctcctaaggagtgtcacttagtggccgtgaaaaggattctaagatatttaaagcattcctctactattggcttgtggtacttaaaaggtgctaagtttaaacttgttggctattccgattcggattatgccggttgcaaagtggatagaaagagcacattcggtagttgccaaatgcttggtagatcccttgtgtcatggtcatccaagaaacaaaactccgtagccctctaccgccgaggcggaatatgtttcggcgggtagttgttatgcccaattgctttggatgaaacaaacattgttggactatggcatatccttcaccaaaaccccactcctatgtgacaatgatagtgccataaagatagccaataactcggtccaacattctagaaccaagcatattgacatacgccatcacttcctaagagaccatgttgccaagtgtgacatagtcattagccacataagaaccgaggatcaactagccgacatatttaccaaggctcttgatgaaacccgcttttgcaagttgaggaatgagttaaatatcatagacttctctaatgtggcttgagatggtgcaccatggttgcttctttttgcctttttgcatatttgctccttttgctcttatgctttggatttgttgccactaaattcttcattgcgaaaatggagcatgtcacattaagggggagttttgcactcttgcatgtgctctacttccctttatatgtgagcaaatcaactagtggtgctagtagtattttcaaaatgcccaagtcaacataagtcaaaacttttgtaaaatcaatgtaatttgaaaactatctcttggaaaatgtttcaaaaggtttcctatatgttttccaagcctcacattgcaaggaaaatgatttttaaatgaaaatgcccttttggccctcttttgaagaaactatattcttatttttggccaaaatgagattttcctccaaaatgagattgagagagaatttgagaaaagtttcaaaacaaagttggtaaagaggaggatttgaaatgtttttggtattcaaatcatattcaaaaaccaaatatttcaaaagttatttgaaaaacaatttagcccaaaaacccctatataccataaaaggtcacctcctagcacttaagtgagttttgttgcaaatcattataatttttaaatattatgggtggttagcaatatttatactcacacatttcaaaaattgctttaaaaaatcaaatttcttgttgaattttattgtgtggggttgccggcttgtgcaagggctgtgcacagccggcagggggcctggcggtctgaccggcgctatatgcgcggtctgactggccaggtgcggtggtctgaccggccacatagggccggtctgaccggctgaggtgggcctaggcagttttgcccctttttcttctccatcccgcacctaccctctcctatctcatccccattcatccccaactcgaaaaactctctctctctctctcccacctccccttaaaccctaactctttcctccaccaaatcccctcggtttgaccgtggatctct

SEQ ID NO: 26359 - DNA, 4116 bp, Oryza sativa
tgttgagtttttgatccatggcatggaaccctaggtgaagcacgaggtgttcttcgatttgcaccaatagagggtagtttcttggtgtgattcaactcctccaaccggtaaatcactcttcctcttgtgcattctctcaaatcgatctatttcaccctagggctatgggtagttgttccaatcttgatgaaataggtccaatcctttgatgttctagttccaatcttgtgcaatcttgatgtagcaaatatttttagagtcatttgtatgtgatggtaaaagggattttcttgtgcacttgtcagaggtggtctgatcgagctcggtcagcggtcgacggtctgaccgagctcggccgacggtctgaccgacatgtggacggcggtctgaccggccgttatccaccggtctgaccggccgctggacttcggtctgaccgcccctgacatgcagtgtgcagtttccttttcgcctaaacatagtgtcttctaaaagttattgctaatatcccatatcctttgctctttgacagcaaatgcctccccgcactcgtcatagtcgtcgtgagcccacgcccgatcccgtgagtgaggagtcaagcggagatgagtacgctcaaagtgatgaagaggttgaggccaatgttgagggggctagtgaggaggaaagtggagatgatgtcagtggaagtggagaggatgaggatgaaggaagtgatgatatgcacattgatccctccatccagtttgttgtgaacatgaggaatccatcgcagtataccattttgaggcaccatgatcagtttttgaggcctcgggacacccggaatccccgttttcacaccgctttccaaaagagtgtgtatgagcaagtttatgcagggaaagcttttgcagagcataagtggatttcttggagagacatcaatgagactccagagtttgagggcttgcaggatctcttcaagactgttggcattgacggattgtgactctcaaacaagactacaatgaagatttaatccgacagttctatgctacagtgtgggtggctggagactatagtgagatgaagtggatgtccgacacccttcagtgttctatctctaggaggcaattctggcggctcctcagtattcgcttggactttggagatgacttgcatgaggagcacactcacaatccgctctccatagactacgtctctcagttttacgaagacggagtgtggtacacacatgggaaggttgccggcttgaggaccatcccctgtgtggttaacaggattgtgagagttaccatcctccctcgccttggtaacaatgatgacattaggggggtggcttggcacgtcatcgatgccatcattcagggccatcaattcgacattgtgtctcttatgatgcaagagattgccatctctaaggctacattcactcagggaatctattatgccccttacatcatgaggttgattcaagacaagcttggggctgttgggcaaaatttaaagaagcacaagcagtacaagccccgccttcagcttggagctccccgtgctcctagggcggcaccctcctctcatcctggagctagctcaagctcagcacctcctcctcctcatgggtatgatccaaatgcttttttctatcctcagtatgcctactttggaatgcaaccaaacgaatactttaacccggtacttggggctattaataccctaagtgaaagcattcaacgcttgtccaccgggcatgaagctttgcatgagaatgttcgtggattgcgcacagatgttggagacttgaatgcttctgtggggagattgcacactagagtgggtacattggattctcgagtccaaatgttggagagctcccaagcatttgtgtatcatcgtcgtcgtgatgctcctcatccttccacttcggcgcgtcctcctcctctacaagagtgaagacctttttggtgcttgatgccaaaagggggagaaaagtgtgttttatgtcttgtgggttgggactagtggtagtgaggttagtcacctcatatttaataagttaaggaggtttgggctatattttgtatgggtatgggctattactctatattgtgtgttctttgtcgttttgttaaactctatgtcatttggacccctcgtggtcttgtaatagcctatgtttatttgtgagcccttttaggatgatttgtgacttatgtgttttggatggttaagtgatgtgaacttgtgcgatgatggatggtgtatgtgatattaatatatgtgaccatcttatgcctatggattgaagttcacattgatatattgctaatgtgttttgtgcttgttggaatgtgatattgaaatgtgcattggctccatatttattgtctatgattgatatgcacatgtttagggggagcttttgatttccattgcaatatatgtccatgtgttctatgtttgattatatatatatatatatatttgtggtgtttgacatcaattaccaaaaagggggagattgaagcatctaggcccccgttgttaattttagtaattaatgacaagcgctaattgtggactaaccattgctattgagataatattttaagattaggtccacgtcatgtgtgcgtatggatgactatcgatggattaaaattgacggcgcaaagcaaagagaaagaaaacggtaaaactagtgctgtaatttagaattgatcgaggtgtagggcgatcaaatttgctagtttatttgctagtttcgccgtactattaagaggggtaatgacctatcaaagagatgattaaattgccacattaagtcattgcattttcacttgtgctcactttttcatcacacacacaaaaactcacctttgctttcactgagctcggcctgaccaggggcggtcagaccggccacatagtggcggtctgaccggcgtgccctggccggtctgaccggcggcacatgctcggtcagaccggtcccctggacgccgggatggtgctactcagggtgaccgatacagagccgacggagccgtattcggtcagaccgagccgaggccggtctgaccgcccactcaacgccggtctgaccggccaggccgatggggccttctgacagcactacaacggcttgttttctagctattgcagagtagcacggtctgaccggccacatacctccggtcagaccggcagagcacaaagttgggggatttcgcccccaatggctagttttggtgggtgggaatataaatactcccccaccagcagcaaggggactctcttggcacccaattcaattgcatacaccccttgcacctctctcacacccccttgagctttgtgttcatccatctagtgtgttagaggtttgatctagccaagagtcaagtgtaattgcttccattgtagagccagtgtggcacttgattgatcatctccacgccgggtcattgcttgttactgttggaggttgccgcctcctagacggcttgtggaggagttgcccggtgacctctccgagaagattgtggaggaggcccggcgccggtttgtgagtggtttggagttcaccaccttcggagtgaaggaagaactaccctagtgatcgaggcttgggtagtcctctctgtgggcgggctcccgccttgcccatcccttgacgaagggggcgtgcggtggcttcgtggttgagcggtggagttgggctcgcctcaacggggagtaggaaaccggcgagtttccgaacctcggtgataaatctcttgtctccttgtctcatttgattgtcgcatttacatttgtgtaatttacatttctagagacaaacttgagatcatatcaccctaggattgctaaacattgacataggagtgtgatttactttcctagagatataattgagccactatcaccctatgtttgcaaaacataacttagttgcttagttagagttgaccctcaccaagcctagcaacttaggttagttttgattaggtgtcatttagtttttggcaaaattggttatatagcatcgaaagttcacgtttttggttttatagccccgaaagttaccggttcactttaatagcacccata

SEQ ID NO: 26360 - DNA, 63916 bp, Oryza sativa
tacccctcacaagtacaagtgtaatgcatgtcaaagaggggttgaaatgtcatatcatgtgtgtggctggatcattaacgatcaagacggacagaaaaattgacggaagtgctaaaaatgggaacagggtgaactttggatgctattaaagtgaaccggtaactttcggtgctataaaaccaaaaacgtgaactttcgatgctatataaccaattttttcttagtttttaaatcgcctattcaccctccctctagtcgacatctcgatcctacagtagcgcggggtgaccaacgtgcaagtcacggctggcggtgtgaagaccggcacaacgtgtggaggcggctggcaacggcagtaggctatcgcggcgcgtggaggcgagcccaatttagaggcgtggtcgacgacaaagctcgtagtggcatagccggcggtagcgggaggccattgtggtgcgtagagctgttggcggcattgacgcggagtacagccggcggggggcgttgatgcagcagtgtgcacgtgccgacagaggttggcaggtggtagagctttggagctttggctgtcgatcggtagggggcggacaacgggtgtaaacctagcttgggattggtcgggccggcaacgacggccactttgggcgtcgctttccctcctgagagtgttgttgagtcgtcctcttcctctggtggggctgccgggtcaaaaccctgtcttggttctccctaagatcttggcggatggcggcggtgctcatcgtcgccgttctcactggagtcgtcatattggaagcccccttgccaaatcttctctcaagcagttggtgcaggctcattcatcctcttgcggcggcacacaagcttttgcaagttggccacatcggcgggccttagtaggggagtggttccatcttctctcttaccctctacccctcaatcccaaaatcgtggatagaattgagttggtggctggttattagggcttatgtttcggcggtcttggttgtagattccttgttagtctagtggcgaccgctcacacttaacggcggctgtgtgtagacgttgtcagtgcgtggtggtggtggtggaattgtttttcattcctggctattgtttttcaggtcaatagtcttgtattttttttaatgaatcattgcgttgtctggtgctgatcgtaaaaaaaaactgggctttatattatttatatattctaggaactaggcaactagctacggttcaaatgccaaggttaaaccgttgttgatgtgaaaaacacacactggcctggaagatctgcttaacttcagtgcaggtccaaaatcttgcttctaggttcgtgagcgtgctagttgatttgatcctggaatcaacaagaaagaaagacaagaaaaccatggttaaatccataaacgacagccgatcggctagttgccgatgacatatcatttatcttcgagccgatgtcatattggaatcaatcggcagttgtgaataaataagatagaactaaatctactcgataggctatagatattaacgacatataattgttccttcgatgtatatttaaactaagtgattgggatagatcgatcgccatgtcgagacagtataaatcacttaagtcgaagtatacattaaagtactgattatatagacgtttatagcatagtcgatcaaatagatctagcatgtatcggctaatactctgataccactctatattaagatattaaaacaagcagaatatatcaaacaagaagtctaacattccgtagatacacgatataatctaaattaataatgaaacatgaccctataggtcactccctaacagtaagaaccagccgataacaacttatatagcgcaactaataaagattacaacgtatatatgataacttgacggattacataaacaagattagagtgtcataaagttggaagcactaatcccgagaacgcaagccgccatgacaagtttacctctagttgaagatcgaatcgatgcagctcaacccaaaagcaagaactcgtcgaaatagaatgaaagtaaaaaaggtggcgatgcgccgagagtgtattgaactgttgttgtttcttacattgggttcgggccatatttatacccgagatacaaaatatctcctcgccggatacgactcttatccctaacaaactctaagataccataagtctttgcggcagacttttgcccaaacatatctctaaggaaataatacaaaatatcctaattaatatatacaattgcctttccgcgagctttatctctattgtggcaatccttgtgaagcacgttgatcgactctagaaacagccttgaagccattaccgtcagaatcggctgcaccacctctatcggctgtatcggctgtcttctgtccgatccatctcagccgatgcagactccagccgatgccttcacagccgatgcatactctgttcttcgaatccatctcttttctgaatccgcttcgtttccaatgtcgaacttggttcatattttaccaaatttggtcgtgaacacatgccccccaagtccgctatatttgtaatgttgcggatttgctcaatttccctttccgagctgaactagggtttctaaaaccgattccgttttggccgttaccgtgctccccttttaaatagtaaccaccgctcttctcgtttcacggcgtcacttccgtttaaaccgctcttagccaaaactttccccaatcctccgcctcgagctctccggcgacaccttcaagatttccggcaatccaagggcgaccctccgcgacaccaatcctctccgtcggcaatgttgaactccgccagtccaccgagcgcatcatccgccgaatatgttgaggtaagtgcccatcggctaaactcccttcttattgcgcaagattggttcttttcccgctcaatcctcgatttttcttcttctgtagcatctcactcaccaagttgcgatccctagcataactgatgagttccagtttttccttggcccaatcggcaatctagaccccacaaagtttatcaatggagaaaccaaccgaattccttttagatttgccaatccagatctaagctcctggaaaaataccttcaaatcttggccatcggctgaaaagagttggcctgcctggtataagaggatgtcggctagcaaatcaactcactgggaagaaatcggcatatcccaagccttggccttaactgtagcagacatggcgagagatgaatctatgatagcagctgctacttacttctggtccacggccatgaacaccttcctcttctcccaaggagcgatgaccccaactctcttagatgtcatcatgatcactgacctagatgtcacctcatcggctaacctgcctagcttggatacccaactcacccatgagttcaaaaccaggagcataggtggttggttaggctatgttgtgaagaacatgggaaccgggccaatttctccaagggaacatgcagcctttccttatgatgtggcttgaaaaattcctgttctgcggtccaagctgtggtcctactgcaaactggcaacgtgtagctgagaatttggtagaaaagaagcatttccctcttggaaagtatctgctaggctacctatatcaaactctcaatgctgcaataaacaagatagtctctggaaaatcaattggcacagggggtccatggtggttacttcaaatctggttgaacctgcacaccaggatggttgccgatcgaccagcgctagccgatgcaaattttccaaggtttgagccgatcatcagagatgatggagaaaggagtactacacgccgatgtatgtccttcgaagaagcagcatcggtcagtaccgcatccaagttatcggctgagctcttcaaagaatggttcaacaacttttatgatgggttcgtgttgacagaaaacacgaggcctgggagatctgcttaactccagtgcaggtccaaaactcgccttcggatgtatgagcgtgccagttgatttgatcttgtaatcaacaagaaataaagacaaaagaaccgtagttaaacctataaatgatagccgatcggccaggtgccgatgacatatcatttatctttgagccgatgtcatttgtgcatcgatcggcaatcgtgaataaataaggaagaaaaactaaatctactcgatcggctgtagatgttaacgatatatactccttataccgatatatacttaaatcaagtgattgggatatatcggtcgccatgccgagacagtataaatcacatagaccgaaatatatattaataataggactatataagtttacagcataaccgatcagatagatctagcatgtatcggctaatactccgatactactctatatcaggacattaaaacaggtatagaatatcaagcaaaagcctaacacattcaaatacaccaatatcttggcataaagggcatatttaacatatcagtgaagcaaatagagataattatagttaaatcagatacgaccggctgaaactccgatgctattctaatcggcaactaggtggcaggctagagatcaatattctaagcacgacttaataggtcaaactcaattgatgcagcattaagtatgaaaagaagaacaatatctagataatcaagccgctagaagattcatagaatggtagatatcttatataatctggatcaacgtaaagatctaacctaatcggctgtcttctgcacacagatgttggccgatggtgtattagataacaatattgctgaagattatataagatatatgataacttgatgaattatacaataagattagagtgtcatgaagatgtaagcactaatcctaagagcacgatccgtcataacgaattttacctgttgttgaagatcgaaaccgatgcagctcaacccgaaagtaagaattcgtcgaaataaaagcaaaaggtggcgatgcgcctgaattgtattgaatgtgtcttctttcttttacatagggctcggggtctatttatacccgagaaatacaagatatgtccatattggacacgactcttatctctaacaaactctaaaatatcacaagtctttgcggcagacttttgcctaaacatatctctaaggaagttacataaaatatcctaattaatagatacaattgccttctcaggactctatccatgcgtggcaatcatcttgaagcacatcaactcgaacccaatgttgcacacgggtcgtattgtcggaaccggctatatcagcttatctagttcaactcaatctcagccgatcctagctgtagccgatcaggactccagccgattcctgctctgttccaaaactcgatctccgcctccaactcttcgttgatcaaatcccctttcctgatacacatggtaccaaatttgattgttaacacatgccccccaagtccgggtattcgataatgttccggatttgccgcaagccgactccgagaaggtttcgcactttaccgttttccgaccgttacctccttgctttaaatattaaccatcacccccgaaaaaacttcacaccgtgacttccgttttcaccgctcaaacaaactcaatcccccttcttctccggcgatttccccgacgcaaaggcgactcccaggctattcccctctcgacgagatccccacccgcggccatgtcttcttccgccagcccatcgggtgcatcatcggccgaatacgctgatggtaagttctcatcggctaaatccccttccttagcagcagatcgatcttctcttatctcatatcgctttccttatttcggttgctttgaatttatagcatctttctcaccaagtcgcaattcccagtctgacgtatgaaaatcactactttctcggcccaatcggcaatcctgatcccaccgagtttattgttggtgaaaccaatagaatcccctttagattaaccaacccagatctaggtcactggaagaatactttcaagtcttggccatctctggaaaaagttccaccagaaaagagctggaccacatggttcaaacgtgtatcagccagcaagagggctcactgggatgaaattggaatcggccaagcacttgaccttactatagcaaactcagccaaagatgaacccctgatggcagccacttcttacttctggtcaaaactactaatgcctttctgttcaatcaagggccgatgactccaatcctcatagatatcagtatgatcacaggtttggatgtcacctcatcggccaaccctatgagtttgaacacaaagaaccaatatgacttcaaaaccaaaagcatacgaggttggtcaggctatgtagcagcatacatgggccatggttcggtcacccctcgagaacatgtggcttttctattaatgtggctagaaaaatttcttttctgtggatcaagttgcggccccacaaccaactggcaatttctggctgaagctttagaaacaaagagacaattccccttgggcaaaattctcctcggctatctataccagatgtggctaagatagtagtcggttcagtagttggagcaggtggaccctggtggctgctacaaacctggttaaacctgatagtcatgaaggttgtcaatcggccatccgtatcagaagctgagttcccaagactagagccgattgtaggggatgatgaagaagagcgtactcatcggagatgcacatcatacggcaaatacgcttctacaccaactgatgccggagcaaaactatcggctgaactgctcaaggactggttttgtagcttctatgaaggctttcaaaaagatgctagagtctggttcctttatgaagactctgcacaacttgaacacccagtggacttcaaattcgaagacatcaatcatgaagtataccaatcatccagggaaatcttctcggctgcaatcagcccatgcatccttcctgttggcattcatcaaggaagaaacatccaaacttcttatgaattctatcatccaatgagctcagctagacaactcggaatgggccaactcccgatcagcttattctttgctgacaagatccaatgccgaggagggattttgtcaaccctgatgatggatcggctgcttagccttcaaggaccccctctgggcagtattgacaacatagaactggcaacattcaggagcaaaagcttcgacaggtggtggggtgaatggaaactgcatttattccaccaaccagcttcaatgtacatgacagacctctttcccgatattgtccctcaagtaagtcttcaactttgctcaattttagttaaataactgtttggccaattgatcttaactaatcatccttttgatttgcaaacaacagaatcttcctctcctcatcgcagcaacagtggcaaagacatccaatatgccccaagtttaattcctaacggaggtgggctatctcctccagttatcggttatgatgcccccaagacctcagctcttcttcaagggcttaccagagaaccagctgatgccggtaagaaaagaaaaaccagatcatcggctgtagacatcttagccccggctccaaacaagaagatcaaaaagaaagctaaaccagctgatgacctgcctgccctagatccatccattgaacaagctctggatgaagaggaaatcggagaagatgttgatcaagccgtagccgaggtaagtgatattgaaagaacaccatcggcttcacctaagcaggcccctccaactccttctgctctggttcacttctcaagggtaagtgcctctctttaatccctttcgcgattattttatcttatggccgatcattcccaagtcttataattgtagaaaaagaagactgcggtgaagaagaaatcggccgcaacaacatctaaaccagctccaccagtaagatagttttaactttcattagttaatttttagccgattctattaaacactcgctttcttttcagccttcacctcctccttctccttctgctcaacaatcgtcaagtgaccagaccccttcagctgcaggaagtcatcatgttgaaaaagaagaacaaccagccgctcctgctatcccagtaagtttcttctaacaaacattcagattggctacaattatttaacctctaatcgtttctaaattgtcaccacaggtcctagccgatcttttctcttttgacatcaaagactatctcgacgaaggagaagaagatgtcacaagcaaagcattggctcctttatctgatgatgtcaggaaaactctaagaagtatcttggatcggctagaagcatcatcgctagatagcttggtagtcgactgtggtccaatcagggctcggctgcatgaaatccaagctttaatcccagatgaattagctgatgtccttactccagctgtttaccttgagcagcaccaatacaagctagagaaagccaaattaagactggccgaacggtgagaacgtaaggacattgaggccactatccaagccaaccgtcaacttgtgcatgaagaaaaatccaagctcgatcaattatctgaaagtccaatcaaatctaacattgatcggcttgaagctcgcaagattgatctcttagcacaacttgaagaatgcaatgctgagctggatatggaacgcaagaagctagtcgatctcccccagtccattgaagagcagaaagctaggctcaaatcggctattaagcatgttgctgaactgaccaagtccttaaaagttattcctggaaccgatgcgcaagatgctcaagccatagaggaagtagagcagattaggcagcaagctatatcggctatccagcaatacttatcgtagtaatcttactgtaataggacattaggtagcaagctatatcggctatccagcaatacttatcgcagtaatcttactataataggacttagagcttctgcaatcggcttaacattctgatacttcatcccttaacatccttctgtgccgattaatatgactgtgagatttgctcaaaaaaaaattttgcactatatttactgcattgtaacagatatatgcccccctagttttacaatgtcaacagcagtgataaaactataaaacaactaagggtgatataacaatatcggccattgtcaatcggcaaacctcagccgattacattataaaacaactaagggcgatataacaatatcggccattgtcaatcggcaaacctcaaccgattatagcataaaacaactaagggcgatataacaatatcggctattgtcaatcggcaaacctcagccgattatagtataaaacaactaagggcgatataacaatatcggccatcacaaggcgatgtacgcacatcggcgacattagtagccgatcacgagttgatccatacactcgggtaatatttcttcaagtatttaccattaagagctcggccataaacttcaccatcaagcccttgcaacatatatgctcccttagaaacaaccttatgaatctggaacggtccttcccaattcggcgaccacttgccgaatttattatcacgagtaccaatcggcaaaatcaacttccacacaagttctctttccgaaaaaaccttaggcacaactttattattataatgtcgagcaacacgttccttatccttagtaaccttcgcaagggctcgcaattgggactgaaccaaatcctccctctcatcggccataagattgtaatactcatcggctgtcaaatcattttgcaactccgttcgtcgagagccgattctaacttcccatggcaacacagcctcatgtccataaacaagtttgtaaggagtaacttggatgatccatgacaagccatcctataagaccacaatgcttcggccaatcgcgtatgccattgccgaggataatcggaaatcttccgcttgatcaacttaatcaaactcttattagacgcctcggcttgcccattagcttgtgcataataaggtgaagaattcaacaacttgatacccatgctatcagcaaactaaacaaactcatcggacacgaatactgaaccttgatccgtagtaatagtttgaggaaggccaaatcgatagattatatgttcttgcacaaactgaatagcatcccccgaatcaactttcttcaaaggaatcgcttctacccatttggtaaaataatcggtcgccaccgatataaatttatgtcctcgacttgatgatgggtttatcatgtcgatcatatcaattccccaacctctaaacggccatggtttaattataggattcatagccgacgccggtgctcgctgaattgctccaaacttctgacaatcttgacaacccttataatatcggaaacaatcctccaacatcgtcggccaaaagtatcctgcacgtcgaagcaaccacttcatcttgtgagccgattgatgagtaccacaaatcccctcatgaacttcaccaattgcaactttagcttgatcgtcgctcaagcacttaagtaataccccatcaatcgtccgataatagagctcatcacccagcaacgtatacttcaatgccttatatcgcaattttctggaagccgattgagatggattgctcaaatacagcacatcatacctccagtcatcggctgacattgccgcaatttcaaccttaacatctttgaccatcggcttatactccgacgccccttgagccaaatcattagcttcaagattttgttctcgagatacatacttcaaagtaaccagccgaaattctttcattaattccaggcacttctcattataaaccaccaatgtatcactcttgcattcatattcgcctgtcaattggctgattactaacaaagaatctcccatgatttcaatggtatcggcttcaacttctttgagtaattgcaaccccttaagcactgcctcatattcagcttgattattagtctcatatgatttaatagtataagcaaactcaaaacatgcccccctaggggaaattataactaagccgatgccacaaccatgagtgcataccgatccgtcaaagaataaagtccatggtactatctcaaccgagccgactgaatcatcacgatgttccacaataaaatcggctatagcttgtcccttaatcgcctttggtgattcataccgaagatcaaactcagacaaagaaaatatccactttccaattcgtccctttaatattggagccgacagcatatatctgactacatcggctttgcatataacagtgcactcattagataatagataatgcctcaacctcgtacacgaaaaataaaggcacaagcataacttttccataggggaatatcgagtctcagcatataagagccgtcgactaagataaaacacaactcactccttcccttccaattcttgaatcagaactgagctgattgacttctcaccagctgataaatacaacctaaatggtactcctttgtaacatcccggcctagggcttaataggattaatagaatactcatattaacaagttgcaacttcttttccggaagccaatctccagagaactccagggttaagcgtgcttggcctggagcaatttgggatgggtgaccgaccgggaaattcttcccgggtgcacacgagtgaggacaaagtgtgcacataagacatgtgttggtctgtgagggcagtctatgacctatgaaagctatcggatgtaagtgggcccggcctggggaaaggcggaacgttacatcctttctgtgggggaatcaaaacagttcagagaactgagatattccttgatattatccaaaactttttgttgctctgccccccaagtgaattgttgatcggctttcaaccgcaataagggtgtaaaaggttccaaccttccagaaaaattagagataaacctcctaacaaaatttatcttgccgatcatttcttgtagctcggttttattttccgggggcttaattttttggattgcattaacgctcctttgggttacctcaatccctctttcatgaacgagaaatcccaagaactggccagccgatacaccaaaagcacattttgtcggattcatcttcaagccatacttcctggttctctcaaaaacttttcttagatcagctatgtgatcatcaacttctttggatttaacaaccacatcgtcaatataaacttcaaccaacgagccgatcaaatcgtgatatatatagttcatggccctttgatatgttgccccagcactctttaagccaaaagtcatgacaacccactcaaataagccgattgcaccaggacatctaaaagccgtcttatgtatatcttcctcagccataaagatctgattataacctgcgttcccatccatgaaactcaaaatcttattccctgatgcagcatcgacaaggtgatcggctactggcattggatattcgtccttcggtgtcgctttattcaaatcttgaaaatcaatacataccctgaccttgccattctttttaataaccggaactatgctagaaacccactctgcgtatcggcaaggatgaataaaaccagcatcatacaatcgcttaatctcagccttaacaggttcgagcatatcggctttacatctcctcggaagttgctgatgtggtctaacccttggttttataggtagccgatgttcgacgatcgatcggctgagtccaggcatttcataatactcccaagcgaggcaatctctaaactcttttaggagctctatcagcttggctctaaactctaaagacaaatgtttactaatgaatgtcggtcttggccgatcacctggacctatatctatctcttccaaatcatcggccgacataaaaccttgaccttgcttgtcatcgagatcatctattgtatccttagcgtagacatctgaaccctccacaacgccctcaaagtaatagcttgggttctccatcttcgattggttgtatatcagaatcggacacttttagaaaatctccatcccagacttttccagataaacaatcaaggccatccatctcccaaagggctaaatcagcattggcaacattaactgacctgtcggctagcacaaccttatcttgtcaccttgccactgaatcaagcactgatgcatagttgaaggtatgcaacaattagcatgaatccaatctcttccaagcaacaaactgtatgaccccttaccatcgatgacaaaaaacgtggtaggaatagttttactgccgactgtcagctccacatttaaaacacctttggtctccgatggattaccaccaaaatctttgagcaccatatttgtcttgataagatcctcgacattcctacccaacttcctaaaccctacccaacttcctaaacgtagcataaggcatcaaattcaccgcagccccaccgtcgaccatcattttagacatcggcttcccattaacgtagccgtttacatacaatggtttaagatgccgattctccgttccctcgggcttctcgaataccgcctactctggtgataggactaacttggccgattcctcctctacttcatcaacatcggcctgattgattccgaattcggctggcagcgtaaagaccatgttgattggtgctgtaacaacactctttccttttgccaacctcttcgcctcatcggctgcagcatcatcggctgtaggagcttgattcttaacacgtcacacctgccttggtcttggtttcctcagccgatgattaatgtcctcttcagaattatgccatttacaatatctcctcttgcctaattctttagccgatggaatcatatggccggtaggaagttgaatctgcttttctcggagtagcaaatcgaacatcttatcggctttggtgatatcgaagtcatacttttcctcctttccaggactcttcaaccattgacacggtataacctttttgctcctcacccattccgctgcagctatctcagaatcatcgtcttcatcgtccgatccatacatatacgggcaaacgtgattaaccttcctggagcttctcctgacgtcagccgacctatgctcacgcaaggttaccttttgtatcagatgcgacaaactatcgaagtctttggacaagaatttctccctgatcggaggaatcataccctggaaagctagatcggctaactgggcatcggtcaaactcaagctaaagcacttgttcctcatctctctgaacctctggatatactcgtgtaggggttcatcatacctctgcttgatcgccgttaagtcagacaacttcatctcgtggaccccactgtagaaatagctatggaattgcttctctaaatcggcccaactattgaccgacccatatggcaaagatgaaaaccaagtaaaagctgacccggataaggataatcggaacatcctaactctcaaggcgtccacagccgatgcttcaccacactgagcaaggtatcggctgatgtgctcataattaagttgacacaccctcttgccctgagaacttggagaaatcagggattttaaaccgattaggaaggggaaccctttcaaaccacttgggataagactgccgatacaaactcccagtctcttttggtctaagcccaaattgctccctcattacatcagcaatgacatcagcccatggtcgttgctgagctgctccttgtggttgctgctgcatgggctcgaactgaccaaactgaggagtgaactgttgctgggccgatcccgctggttgatattgggcttgcggggatggaagctgacaatgatagctcaagtttccccctggtagttatgtagattcggctgaatgttgcgcaccaagtgctcaggaaccatctgaggtaccacggtgccatccggttgtgcatgatgaaccaaatgctctgggataacttgattcacaaactgctgcgcaggttgccccccatgtactgcaaatctagccgatgcattggccggccccaggcgctaaatcggctgaacgacctgcagtcgtaccggagtctgctggatcagctgaggtcgttgccttggcggtgtttgctggattggttggagatgctgctgcgttgatggtgcttgctgaactggctgcacgacctgttactggatcggctgtaccactggctgaattggtggtgtctgctgagctggctgcgcgacctgttattggatcggctgtacaaccggctaaattgatgacatctgttggatcggctgctgctgcactagatcaacaattggtggtggtggaaaaaacatagcagcaacctgatcttgagtcggctgattcgaggtttgtccagcaagctgtggatgttccctcattagcaatcgagggttgatcggctgagctgacgccgtggccgatgtagcaggtaagggcgttgatgctggcgctgttggttgagtcgtggatgcgacagatggagccgcctgcacaactggctgagcatcggtgatcaaagttcgataattcagaaaaacgccttcttgcaagtacaccgggcctgtagcctgatgctcagctatcgagccatcggctatcgttttcatcatgttcgacagtgtattgactaagacctcggattgattgatcaaagcatgatgcaccgcgtaatcaacccgatcttgaaagttgttgaaaaaatcttgtgctagctcaatattctgattaagatttcctccttgcggcccttgagcagaatcacctggagctccgtgcacttcttgagggttatcgccttgatttcctatagaaccaccgatagcacccttgttgctcggctgatcgagccatctggggcttgtttcacttctccatccttagaagaaccggttccagggctatcagcaaccagttttaacttgtacttctgaaccagcattcccttgcgggtttgcatgaacgagctcagatactgatcccgtgcttgctgcatcattgcttcaaactcctgcttctagtcaggcgtgaatttcttgggatcgatcggcaggacattgtcatcaatgatgtcagttaatcccggcttcggtaatttgcctttaactgagcctgggcttgatggtagtggtgcttgtttctcggccatgaggaagaactgacgcctgacttctaatcaggtcccaccgggcgtgccaaaagcgtgttgacagaaaacacgaggcctaggagatctgcttaactccagtgtaggtccaaaactcgccttcggatgtatgagcgtgccagttgatttgatcctgtaatcaacaagaaataaagacaaaagaaccgtagttaaacctataaatgatagccgatcggccaggtgccgatgacatatcatttatctttgagccgatgtcatttgtgcatcgatcggcaatcgtgaataaataaggaagaaaaactaaatctactcgatcggctgtagatgttaacgatatatactccttataccgatatatacttaaatcaagtgattgggatatatcggtcgccatgccgagacagtataaatcacttagaccgaaatatatattaataataggactatataagtttacaacataaccgatcagatagatctagcatgtatcggctaatactccgatactacgctatatcaggacattaaaacagatatagaatatcaagcaaaagcctaacacattcaaatacaccaatatcttggcataaagggcagtgaagcaaatagagataattatagttaaatcagatacgaccggctgaaactccgatgctattctaatcggcaactaggtggcaggctagagatcaatattctaagcacgacttaataggtcaaactcaattgatgcagcattaagtatgaaaagaagaacaatatctagacaatcaagacactagaagattcatagaatggtagatatcttatataatctggatcaacgtaaagatctaacctaatcggctgtcttctgcacacagatgttggccgatggtgtattagataacaatattgctgaagattatataagatatatgataacttgatgaattatacaataagattagagtgtcatgaagatgtaagcactaatcctaagagcacgatccgtcataacgaattttacctgttgttgaaaatcgaaaccgatgcagctcaacccgaaagtaagaattcgtcgaaataaaagcaaaaggtggcgatgcgcctgaattgtattgaatgtgtcttctttcttttacatagggctcggggtctatttatacccgagaaatacaagatatgtccatattggacacgactcttatctctaacaaactctaaaatatcacaagtctttgcggcagacttttgcctaaacatatctctaaggaagttacataaaatatcctaattaatagatacaattaccttctcaggactctatccatgcgtggcaatcatcttgaagcacatcaactcgaacccaatgttgcacacgggtcgtattgtcggaaccggctatatcagcttatctagttcaactcaatctcagccgatcctagccgtagccgatcaggactccagccgattcctgctctgttccaaaactcgatctccgcctccaactcttccttgattaaatcccctttcctgatacacatgctaccaaatttggttgttaacagttccccaagaacactagaatctggtttgcatatgaaggacatagcactttcgagcttcctggtgatttttggtttgacgagatcaattccaaaaaatatgacaaatccaaagaggtattctcaacagccatcaacccttgcatcatccctgtcggcatccaccaaggcaagaacatccagatgacctacgagttttgtcatccgacaagcgccacaaggcaatttggcatgggtcaactgccaattagcttattcttcaccgacaagatccaaaacagaggggaaattacatcactactcatgatggatcggctactgaaccttccaggacctcctttgggcagcatcaataatataaagctaaggatgttgagaagtgcaactttcgaccgatggtggatagagtggaaaaaacatttattcgatcaatcggcttccatgtatctgacagatctctttcctaaagttgttccccaggtaaacatcctctaatttgtcaattcggttaactgcaatctgatgtatcaatattaactttgtgtaaattctctcttttgcagacaacagatttttctcctctacatcacagtaatagtggtgtggaaatccaatatgctctagggcttctgcccaatggtggtggattatcccctcctgtcatcggctataatgcccccaagacctctacattgctgcacggcatgcctcgtgtgccgattgctcctattgctgggaagaagagatccaaatcggctactgccccatcggctgcaaagaagaaacccaagaagcagaaagctactacctatgacctgccagccatagaccaagatgtagcaaattttttggaagattaagcaatggcagaagatatagacgaagcggctgaacaccttagcggtacaagggaacaaactccaccagccgatccacctggtcctcaaagaacgccatcacctccagtacattccacttactagtcgagggtatgcatctctttttcacttgttgttcttatatttaaagctgatttctaaccttgtactttgcagaagaagaaagtagccaccaagaaaccacaaggggcagctccaccggttaacttccttaatcttgtcaactttctttttccagtttttaaccgatgctaacttgtacttatgtttttagccccctcgacccccaactcatgtttctgaatcaagtgaaaacactccatcggctgtaggaagtcatcatataggagaagaagaagaagaagttatagcaccagctccagccatccctgtaagcttctatcttcaccttttcaaatcatattggctatcatatgactctaattaacaatatatagccgtattcttttccagatcttagccgacatgttttcctttgacatccggcagttcatggatgaagaagaagagaccacaagcacagctttggcacctctagccgatgatgtaaaaacaatcttgctagatatttcaaatcggctagaaggttcgttggagactctggtaaccagctgtgggtctattagagatagactccatgaaatagatgacaaaatcccagatgagctagccgatgccattactccaacggcataccttgagcaacatcggcttaagcttgaaaaagctcagaagaggattgctgatcgacgcgaaagaagagaccttgaagcaaccatccaagctaacagagcttccatcaataaagaaaaggctaagctggatgaactggaggctggtccgagtgcaactcaagcaaacattgatcggctgaataatcagaagatacagctcctagccgaactagagcaatgcaatgcacaacttgctcttgaacaagcaaagcttgccgatttgccaaaagccattgaagatcaaaaatccaagttaaagacttctatcaaacacttgactgagctgaccaaatctctgaagccgatctctagcaccgatgcaactgatgcccaaataatagatgaaatagatcaaattaggcaaagggcgatatcggccatccaaagatatgtatctggatgagctaagtcgtataaattcaactataaacttgcaaacttttgggctgtaatgaattccaagttaaacttttgcctttaaatttcgcttttgaaatccaattccaagttaaacttttgcctttaaatttcgctattgaaatccatgtttttctatatctttgcccccctaattttgcaatgttgaagacattgataaaattataacttggactaagggcgatatgttaaataccggccatcatacatcggcaaaacataaccgattataataaaaaaacaactaagggcgatatgacttatatcggccatcatacatcggcagaacacaaccgattatgataagaaaaaatagctaatggcgatataacatatatcggccatctgaaggcgatgttaaccacatcagctttgcatgtatcggtaaacctcagccgatcatgaattaatccacacacttggatagtatttcttcaagtacttgccattaagcgctcatccataaacttcaccatcaagtccttgcaacatataagctcctttggatacaaccttatggatttgaaatggtccttcccaattcggtgaccatttgccgaattaactgtcacgtgttccaatcggcagaatcaatttccaaactaattctccttctgaaaaggatttattcaccacttttttgttataatgacgagcaactcgttccttatccatagtaacttttgaaagggctctcaatctagactgaactaggtcttctatttcatcagccatgagattataatattcatcggctgttatctcatcttgtaaacctatccttcttgagccgatcttaatctcccctggtaaaactgcctcatgtccataaacaagcttataaggaggaacttgaatcgatacatggcaagccatccgataagaccataatgcttcagctaatcttgtatgccattgccgaggataatcagaaatctttctcttcatgaatttgatcaaactcttattatatgcctcggcttgcccattagcttgtgcataatacggagaggaattcaacaacttgatacccatgctatcggcaatctgaacaagttcatcggacacaaagattgatccttgatctgttgttatggtctgagggataccaaatcggtagatgatatgttccttgacaaattgtatagcatcccccgaatcaaccttcttcaaaggaatagcttctacccacttaagaaaataatcggtcgcaaccaatataaatttatgccccttacttgaaggaggattaatttgaccaatcatatccataccccatcctctgaatggccacggcttgatgataggattcatagccgacgctggtactctttgaattgctctaaacttctgacaatcctgacataccatgtaatatcggaagtaatcctctaacattgttggccaaaaataccccgcacgccgaagcaaccacttcatcttatgagccgattgatgagtaccacatataccttcatgcacctctcccatcacgactttagcttgattggcactcaaacatttaagcaacacgccatcaaccgttcgataatatagctcatcatccaacaaggtttacttcaaaaccttataacgcaatttccgagaagccgattgcgatggattttgtaaatattgatacacatcatacctccaatcatcggctgctattgaggcgacttctacctcaatatctttcaccatcggcttatatccagatgccccccgagccaaatcattagcttcaacgttttgctcccgagacacatgctttaaagttaccagccgaaatccatccatcaattctcggcacttctcgttgtagaccatcaacacatcattcttgcattcatattctcctgccaattgactgatcaccaacaaggaatcacccatgatttcaacagcatcggcttcaacctccctgagcaattgcaaccccttaagaactacttcatactcagcctgattgttagttgcgtaaggtttaatagtataagcaaactcaaaacttgcccccaaggggaaattataaccaagccgataccacaaccatgagtgcacaccgatctgtcaaaaaaaaaagtccaaagcacaatgtcgaacgagccaattgtatcaccatgatgctccacaataaaatcggctatagcctgccctttcactgccttaggtgactcatactgaagataaaattctgtcaaggcatatatccacttttcgattctcccttttaaaaccggagccgatagcatatatttgatcacatcgactttgtataccacagtgcattcattggataacaaataatgcctcaactttgtgcaagagaaatataaacacaaacataacttctccactggagaataccttgtctctgcatccaagagcctgcgactcaaatagaaaataactctttccttgccttcgagttcttggatcaaaaccgagtcgattgacttctcaccagctgacaaatacaatttgaaaggcactcccttctatggaggaatcaacactggaggagaactaagatattctttaatattatctcaagccttttgttgctctaccccccaagtgaattcttgatcggctttcaaccttagcaaagatgtaaaaggttccaatctcccagataggttagaaataaaccttctaataaaatttaccttgccgatcaacttctgcaattgtttcttgtcttctggaggtagaatctttttgattgcattaacactcctttgagttacttcaatccccctctcatgaacaagaaagcccaaaaactgccaagccgatacaccgaaatcacacttcgtgggattcatcttcaagccatatttccttgtcctctcgaaaaccttcctcaaatcggctacgtggtcatctacctcttttgatttaacaaccacatcatcaatgtaaacttcaaccaacaagccgatcaagtcatggaatatgtaattcatggctctctgatatgtagccccggcgctctttaagccgaaagtcatcacaacccactcatacaagctaattgcaccaggacacctgaaagcagtgttatgaatgtcttcttctaccataaaaatttgattgtaacctacattgccatccataaaactgataatcttattccctgaagcagcatcaaccaactgatcggcaatcggcattgggtactcatccttaggggtagctttgttcaaatcctgaaaatcgatgcacaccctaagcttgccgttcttcttgatgactgggactatgttggaaatccactcagcatatcggcaaggtctaataaaaccagcatcatataagcgagtaacctcagccttgatagcatcatacatatcggctttacatctccttggaggttgctggtatggtttatatcctggtttgataggaagccgatgttcaacaatcgatcggctgagtcctgtcatctcgtaatattcctaagaaaagcaatatctatactctttcaaaagctctatcaacttggttctaaactctgccaataaattcttgctgataaatgttagccttggcctatctcctgggcctatgtcaatctcctccaaatcatcagccgacatgaaaccctgtcctaacttgtcatcgagatcatccaccgtgtccttggtgtagaaatttgaaccctccacgacgccctcaaaataataatttagagtctccatcttcaattggttgtatatcacaatcggatacttttagaaaatctccatcccaaacttttcgagtcccactgggcgcgccaaaagcgtgttgatgtgaaaaacacacactggcctggaagatctgcttaacttcagtgcaggtccaaaatcttgcttttaggttcgtaagcgtgccagttgatttgatcctgcaatcaacaagaaagaaagacaagaaaaccgtggttaaatccataaacgacagctgatcggctagttgccgatgatatatcatttatcttcgagccgatgtcatattggaattgatcggcagttgtgaaaaaaataaaatagaactaaatctactcgatcggctgtagatattaacgacatataatcgttccttcgatgtatatttaaactaagtgattgggatagatcggtcaccatgccgagacagtataaatcacttaagtcgaagtatacattaaagtactgattatatagacgtttatagcatagccgatcaaatagatctagcatgtatcggctaaaactccgataccactctacattaagatattaaaacaagcagaatatatcaaacaagaagtctaacattccttaatgcaataagatcttaacataaagggtggatctggcatatcaatcaagcatataaaatataaagttgctaaatcaggtaagatcggctgaaaccctgatgctatctccctcgatgatcataaaacaagccagatatcataattatagatattacttaatagatcgaactcaaccgatgcagcattaagcataaagacaaatataagatctaggcaagatgatgaaaacttctaagagatggtagatacatgatataatctaacttaataacgaaacataaccctatgatataatctaacttaataacgaaacataaccctatcggtcactccctaacagtaagaaccagccaataacaagttatatagcacaactaataaagattacaacatatatatgataactcgacggattacataaacaagattagagtgtcataaagatggaagcactaatcccgagaacacaagccgccatgacaagtttacctctagtttaagaccgaatcgatgcagctcaacccgaaagcaagaactcgtcgaaatagaacaaaagtaaaaagggtggcgatgcgccgagagtgtattgaactgttgttgttttttacattgggttcgggtcatatttatacatgagatacaaaatatgtccttaccaaacacgactcttatctctaacaaactctaagataccataagtctttgcggcagacttttgcctaaacatatctctaaggaaatcatacaaaatatcctaattaatagatacaattgcctttccgcgagctttatctctattgttgcaatccttgtgaagcacgttgatcgactctagaaacaaccttgaagccattaccgtcagaatcggctgcaccacctctatcggctgtataggctgtcttctgtccgatccatctcagccgatgcatactctgttcttcgaatctatctctttgccgaatccgcttcgattccaatgtcaaacatggttcatatcttaccaaatgtggtcgttaacaaccattaaagctacatcctccattttcagttttcaattcagcatgatatttttttatgttattttcaaaatatcaccatattaattagtattcattcccctaagtttgttttttatatgtgcataagtgtaaatggatattgatgcatgctttcacgcacacaaccctttagaaccaacatacaatattttgatttgttctatagtaagtagtggaggtggtacatgcatcgagtgtattataagagtaaatatagtatggaagagttacttgtcattggatattatttatttctcaacatgaaaaactcctactttggaaaaagttagtaaatgttcagaaaatggaggaatgaggggaagggaagggcacggtggaaaccctaccacagaaacatgaaaaaggacatcactataggtgtcaaaaatgcaaaaatcgacatcccgtctgagccacacgcctgtgaggcgtcatccggtagaaccggcactttttagagagatagatgctggtttttaataggaaccggtacctatgatttttagagagatagatgctggtttttaataggaaccggtacctatgactcctaccagataaaggtgttggtttctattaaaaaccgatacctttatgtcccatcaaagtagttgtcagttgggctaggataaaaatgacggtttttcaaaagaaccgacactttcaggtgaggagaggagccgaaccaaccggctcgatcccgtttctcgcagtcgccgttcttattgttttctccgcctcctcattctctatcttgccactctcattctctatcccggcctctctccaaaccaccacctcacctcctcttcctcctcctccccttgcctctccgctcctccccctcgccgccaccgtcaccaacacagccgccaccgcacttgtaggagcaacgtgtcatctccggcggcggcaacaggggcgctaattctatgccgggggtgacggcggctatggcgtggggcgagcgtggagcctgattgacgacaacctggacgttgacgggggcttgtcctcgcctgaaccgacgacggggacgcgtccatgctaggggcaacaacggtgtgggtgagcaacccctcctctctgccccttcccaccggcgcttggggcggccaaatccgatgcctcccaacccagctccacgccctcttcggcccaacgcgacgtgcgaagcaacttctccacgatgatgagtgcaggttactccacgacgtgcggatggacttcattttttttctgatttgtttatcttgtacttttacctttgatgcatgcaaataatttgtgtcatggattttgattggagtgatggaattcttcaattgagccaaaatttctttgatttgtgatgcagatggatgtgggatggatggatggtgatatgtagatgtgggataggagctgctcgatgcatcggctagattcgagccgatgcattaagcctgattttttttcatattcatgtagtccaccttaaaggtggtctgtgaggtaccagttaggaaatccggcaactaagaagtttctttagtagtgaaataagacgccatgctgtggagcaaccggaggaaggtgcttgatacgtggaaaaccttcccattgttaggtcgggacacacattgtcgaaggaagcaacgccgggttgccaccggctgccagcgcagaggagcctcggagtcggataccatggaagagtaaaggactttgtgtggcctttttttttcagaaaagccctctatttgactgtatatgattttagactctttatttaataggaaaaagttcaaatatagtttagatggatgaaaactttaaaaccgaacatccaacccgtgaattttacaataccatctatgttactctttaaggtggttttgcatatctggtatcttaaacaaacggctttaaataagtattatagtatatttacgtatcattaatcctaggttgtcaatttatatatatatatatatatatatatatatatatattgcaatgtcatactattgttacgctggtatttttcttgtgagtgagagtgaacaagggtaaaaagatatatttaagtgaaaatttttcatatttgtccaatgagtatgtgatgtgatcaaatcttaggcaacttatatgcaaagaaaataaaaactactttgtaaaaccaccttaagggctgtacgaatggtattgtaaggtttaaagggttgaatgtccagttttaaactttaaggtgatagatggacttttgatcaaattttaggggattatttgaactttttcctattaaataaagttcatgagttcgttagaaaaaagggtaccagtgcaagtagttcagaaagctagagaggcctctctgcgttcagaacaacattgacagtaaggcaaagtaagagcatgcatatgttgctgaatactgcaggcaactaagattaaaccaccatagtattggtaacttgaaatgaaatgaaaaggagcttcagtgttgctgtttgtcatacacaaaaggttaacggattaattctcttttttttaaacacggtacaaaacacagacactcacaatacgcgcacactcatccctataagcacacactcactatacctatatgagtatctccagaagactggacagcactactacacaaacaatttttttataaggccccatgatttttgtaaatggaccataactagtcgcgtctggaaaaatcgagaggcattttcccatacggctccttaagtggcccgcatggaaaaatcgattttttcatgcaggcctcttaagaagtccgctgcatgtggatcacttaagagcccgtatggaaaaattgattacgggccatttaaggagccgtatgggaaaataaaatttgaaaaaaaaaataaaactagtttatcacactcatataaattccaaattggatgattctttttcctaaatgtttctaaaatcatgctctatcatattattgtgttcttactgcatgcagttattttggctatttttttcttgtgacttcattttatcaactaaaaatttgaatttcaaaacttcaaataatattttgaagaagtaaatgatttcagctgaaaaagtcatcaacaataaaattgtataacttaccaagatttataacttctattttggtcatttcttcatccgacaaagtgatagtaatattttcacaaaatttacatatctctcttatatgttataaaactaaataagagatatgtacattttgtgaacaatgttacaaaccactttatcggatgaagaaacgaccaaaataaaagttatagatcctgatgagttataccactttgttgttgatgattttttcagttgaaatcatttagtatttgaaaatattgtttgaagttgtcataatttgaaatttaaattcaaactgttgaaacaaagtcatatagaaaaatgaccaaaacaaaagttgtagatcttgtttcgttttacaactttgttgttgataattttttttcatttgaaatcatttactaccaaaaaattatttgaatttcttatattttaaaattcaaattttatatagttcaatcaaactcggatggtgaaattaccaaaagaaaaatggtagatctcaacgggttctacaactttgtttttgacaactttttcacatgagttcatttagtatgataaagttcattgagaatggcgaagtcatcatagacacatctctgtcgacaaaaacgttacttaccgctgagagaataattagccgtaaatatgagtatccgtgttaaatataagacttgaactcgggtgtgttggtactaccataagtaaactaaccgactaagggcatgtttagatcccaccccaaaattttacgccctgtcacattgaacgtttgaacacatgcattaagtattaaatatagactaaaaaataaaaataactaattatacagattgcgactaatttgcgagacgaatcttttaagcctaattgctccatgattagacaatatggtgctacagtaaacatttgctaatgatggattaattaggcttaataaatcgtctcgcggtttactgacggattctataattagttttttatttagtgcccgatcaatccatgcgacaccctatataatatccgatgtgacacgccaaaactttacaccccaagaactaaacaccccttaagctatactcacttcgtgaattaattctgtctgtatgaaaatagagtaaagattcaacacttccagaaggaaatatcctattatctagggacttgaggagtggcagacatgatggatcaaaccgactaccccatagatgtctccattggtcactatcacaagcaacagtgactttaaatagccagctaaaacatctagcagttgatattttcaaacagctaatatcaggttaaaagagaattatgtgggacttaaaaattccactaaaaatcaagatttttatgtggtttcttcacaagaaagtaattctaacgaaaggtaacctggctaaaagaaaataggggggagacaaacattgttctttctgctatgcacaacaaacaatccaacatcttttctttgagtgtcatgtcgctcagtttgtttggagacgtgtgttttttgtttttaatatccccccggcccaccccataacgccaaaaacatttttggtaattggcttagagaggtatctaggtccattaagaagatgattctaatttgagctagcgctgtatgttggtcaatttggcgttgtcacaatgataaagtttttaatggtaaacaattatctaaccctatacaggttatcttcatatcttcctactggctccacttctggtctacaatgctaccacaggaggagcaggatactatgcgcaatggtgctatactcttggaatcggtagccaagggtctcttatttcactatgggtggcgtagttccataagaattgctagctaaaatattttatgtgatttaacgctagttaataataaatgggagttggggatttgtcccatcaccttatttctcattttgatttacttttatcttacctttttattactattaaacttatggttgtgtgtcttataacagaagccgaagatggaatctatttccattatctaaaaagtttaaatagggttacaacagctaaattatttataagagtaaataggtaggtcctcttcaacctagccctcttcgaagatagtggcagctatacagctgtagcaggggaaataaaaccttgacaaaactataggccggattgaccaatatgacgccggattggtgtcgccagtcgccaccgatatggacacagatcgacgtgtataactggtcaaatcaagcactaagtacgtcctaattaagtatcaacaaaagctgcattaatcggccacagacctctagaaacccctagcttcgtgcgacaaactgtcgactcgaaccaccttcagccgagaaattccataccttccaccgacttttttgtgtgtggctagaagatgatgctttccaataccgattccaataccaagtacttttcttcacaatatatgaagcccataaaaccgaaatcgatccaaacaagtaacggattgagcacactagcacaaaaacgttagctcgtgaaatcttaacctatatgctcaaaccctgagctcacacttttaatgtttcgaataaaaagtttctcgattttaatgggatttttcctttccgattaataataagtttgtcaattaaaacaaaaggtttaatctgtgtattcgtgcacgatgattcacatgttagaaatgaatgttttcttttagattttttttagcttttaggttaaattagaaagtgttggtagcatcagataagcaaatctacatggaacacgggatatacaactattgaagggacattaatttcgttcttgccattgcactatctttattttttttttcctttgcgatggacacggaaacaaaatgcaccgtttgtattgctcttgtagctgccatttgttaggtcattgaaattgactcggtgacataacaaattaaaatcgtgattttagcactactatgaatatgcatctctggcggccaaatcaaaatttctcttgccgttggctgctatgactgctagtctgctacttcctccgttttgaaatgtttgacaccgttgattttttagcacatgtttaaccatttgtcttatttaaaaatttttgtgaaatatgtaaaattatatgcctacataaaaatatatttaacaatgaatcaaatgatagaaaaagaattaataattacttaaattttttaaataagacgaacggtcaaacatgtgttaaaaaatcaacggcgtcaaacatttcgaaacggatggagtactaattaatggccaaagagaatacagtatttttcattggcggtagtcaactacacatgtgggatagaattttcacaatcaggcgactattgccagcagcttgtgaaaatgatcttcgcagccggacagtgacgaaaagaggccacgcgatttgacctgtgatattttcacatgaggctaatatatattacatcaatgtacgtccgtttgtgatgatttcacgttaaatttgatttaaatttgttgacaattttaattattttcttggttcacgtactatgaattttgaatatatagaaatataccatcaatcttcaccggcatacttaataccactgaaagatatatattagagcggtataaaacaaaagagagcaatccggtatataactattcatttgatcataccagagaatatacaggagttatttttcatgaacaacacataaaaaaatcatgtctgatggccattccatattaattgtcctgtactctacaagatatttatcccgttagttgctgccactagcaaactctcgtcctatatgctgcaactttccttagttcttgatcagaattccaagaatctcttatcttatcgtatatacctacataattatgtaattgggaaaaaaacccgtaccatattggaaaataaccagtggttcacttctagctaggcttaatcacaaccatcaaggtatatcgtgtgtgctagccattttgtatcaattatacctttaattttcattcatcattccattatctcacctttaacacaataatgcttttttttgaagtgctattacgtggtatcaaagtagtatttctatataattagaaaataaaaacttaatatgcattgggcaaagaagaccagttggatcacgtccgtgtgtttattatttacaaccatcagtatgttctgggctaaccattatgtattaattatatagcttaacatgctttgattatttaatcacctcacctttgatttaatgctgcttgaatcaagtgttattggaatgatttataaaatctcactagcaacgtgaattctatagttacaacctaacatgtataaacaggatatatccctatccactagcaattattataacttaaaacttgttgtgtcatctataatttgttaactttttagctcaacgtggaagcaaattgaatcatcatttctatatcattatcataatatttcaatatatattgattgatcatttctataatatttatcacatatttatctatgtatttcacagcaaagagtagaatataatctactatacttgtataatttcccccaatagaaacccaatttaaaacatattatactgacttgattattataagataaattaaatatttttaagaaataaacgtaataaatggttgtgttcttttccatgagttcccaactcatctctttcgtttttcgcgtgcacgttttttaaactattaaacggtgcgtgttttgcaaaaagtttatataggaaagttgctttaaaaatcatattaatatattttttaagttttttatagctaatacttaattaatgatcacgtgttaatctattgctccgtttttgtgcgaaggggaggggttccaacccctccaaaagaacacaccagtgttctaaagaataaagaatacagtgaaagatttttctttttacaaaacatattttgagcttggagccacggactgaaaagaacttctagtcctagcactcccattaattgtgaaggataaaggccctgtttagtttccacacaaaagttttacaccctatcacatcgaacgtttgaacacatgcatgaagtattaaatataggctaaaaataactaattgcacagattgtaactaatttgcgagatgaatttctaaggctaattgctccatgatttgacaatgtggtgctacagtaaacagttgctaatgatgaattaattaggcttaataaacttgtcacggtttactgacggattctataattagtttttttttattagtatcggaatatcccatgcaacaccctatataatatttgatgtgacacgtcaaaacttcttaatgtaaacacccccaaagttatgagttctctgaaacaaatcaagttacctacgcttccacggaaacacacaaacatgtgagggcacaccgtgtactgtactcggtgttacaaggatttataagggtatgtatggtgcattcgtgctgctgaacaaaaacccatccaacgcgaactaacgcgtgcacgattaatcctagaaaaaagggaaaaataagcattaattccactatctcctacttaaaattttgttttattttacaatttagatcaaattttctgttatgccataatttgctatgatatattttttctcgtcgtgatacaagttttttttccacatagcatagactcggatgaaactagagctaccccgatcaaacggtagatggccactaggttttttatgtgttttatttatggatgagtgagagattgaatgacactgaatgaatattattgtcgaatgattggatctagctaaaccggttgagctacatgttgtattccagatcgccagacacgcatgcaattagaattaaaaaaactaattaaagatggatgaatgtgtcctgtacacggtgttataaggatttaattataagggtcaggcgtgcacatgcagcacccggtatcgtcctgttgaaccggaaactcatccaccgtggactgacgtgtgcacgattaatcccaaaagaaagggcaaaataatcattaattgcactatcttctacttaaaattatttttttatttctataatttatatcaaattttttgttatgctataattatatgttatgatatatttttctcgttgtgatacaagcttattttccctaagcatagactcagatgaagttagagctatggaagattgccgctggggtttttatttgttttattcgtggatgagtgagagattgaataaccactaaatgaatattctcgaatgagtggatctagctaaacccagttgagctgcaccagagcgccagaaagcaagacacgcatgcatgtaattagaattaaagaaaactaattaaagatggatggaccgaagtagatgaagttgggcaggagggcaatatcgatctctctcatcaatagtcccttataaaattagcatgcagctcgctataaaagggatggccaaacccaaatactgagcatccttgaagccagccagctcgctcgctctagactctacctttttcgctttttgctagagatctagccactttctttgatcgacatatatatccatcgagataaaaggagatagtgacaagtaattaacttagttttttccaataacgaaataaaatagtttctacgtcttttccacctctgccagcagaggcgcagccaagtaacttttaattatagttataaattaatacacagagaatgggtagccaagaatacattaagcagggcgggcagcagctggtggcggcgatcctgggcatcggcacggctgttccaccctacgttctgccccaatcctccttccccgactactactttgacatttccaactccaatcacctccttgacctcaaggccaagtttgcagatatctgtaagcgtacttgtttgtcgttaaatactactactgctacttaatttctcgttttaaatatatattacattattgacatgttgttatatcaccatttattttatttaaagatttaaaatcattctaaagctggttatactccgtaacaccagctaaataatgcttacacttttattcaagtaagataaacagttcactgatcatgcctagtgcctcaattatcatttttagcatgtgttagggacgcgcacgtatgtgtgtacgtgtattgtggtatgagtgtggtgtgtgtatgtgtgttaccctcttaagataaagtaaaatattatgtcaaaagttaagggcatcatatatttaaaaatagagatagtactgcttagttattacatatttactatcctctccgttctactgtatgatgtgttgaattttttcataatgtttaaccattcatcttagtaaaagaatatgaatatcatttgttgtaacttgttttatcattaaaaactataatcttaacttatgcttttatagagaaagtgtattcatccatcgaggggatatcccctagtttcatgcatgtcgtttaaatagttataaaaaattaaaataaattgacaaaatagattaatatgaaatatatcactccacaagcatacaagttaaaattcaacttatataaattatatcagaaataataaatatttttagtttaattttttttcgttgcatcttggaaaagtcaaatttagccttgcatgttcgtggagtgatatttttcatattaatttatgttgttaagtttacatatatatatatatatatatatatatatatatatatatatatatatatataactatttagatgatatgtaagcaattaggggatattctcttgagggatgaaaatccaaatccgcttttatatatatgtttgtaccaggggcgaagccaggattggggattaggggggagtggggtgaagataaaccatgagaccgaataactaatattaatagcaaaggaggtcaaatagtcaccgtcaataacaatcaatgcgtaaagtagtcctttaaaaaaacatgaattttagctctttaatgatatcattgaaagtttgaaactagtctttattgctaaattcttttaatgtaaactattgaataatctcacaaataagtaccatctattttactttgaaaaagatgagaattcacaaactaattttgtagatcatgtttcttgctaatatttttagacttgctaactaactaaactgataatactttcaagctatacaaaaacaaactagataaatatacttatcttagctaaccttaatataaagtaaaaatatgaggggtgtagtggtggtggtatttggatagggcctttggcaacccccttaattagctgcgctacttgtttgtactaaacttttaataaagtaaatgatcaaatattatgtgaaaaataaactgccatatagtttaagacaaggataatacgaggaactcttgcgccatacatacatacatacatacatacacacatacatacatacatatatatatatatatatatatacatacatatatatatatatatatatatgtatatatattttccaataaatgatgagctacaaaaggattcgttttttttcgtgtcacagctgattactcctttttttccattttaaagagtggcattcgatgtccaatatctcgatcgaagtatggaggtcagaataaatagaataatgatatctttcttcggagcagtttcttttcccgtcctcctcaaaaaagggcgtggaaacagatagaaactcttgaatggaaattgaaaagaaatgtagccccagttccttcggaaatggtaagatctttggtgttgatttggcattattcaacaagaaaaaaatcttatatatatatatgacactatataggacactcatatggggcaccatggtattaaatgcacaaaatcactcaaatttttcaaaattttcaaattgtgagtatatacctagttataataattcgattcatacctatacctatcaacaaaacaactcaaatttaactttatttcacaatccatgattacatacctaactaattatatgtatggatgctatatacctagaatcaaaatctaacaaaaacaagttcaaattcagttcaaacttgctttgaactagttagtaaagtggttaatgttaatacctaagtaattgaaaaagattcatactcatttaaattgggtatatactcaatttcaaaaatggtgcccgggcaccatggagcaccaaacaaatttactatatatatgtatatatatatgtatatatatgtatatatatatatgtatatatatgtatatatatatatatgtatatatatgtatatgtatgtatacgtatatgtatatacatacgtatatgtatatatacgtatatgtatatatatacatatacatgtatatatatacgtatatgtatgtatatatatacatatacgtatatatatacatatacatatatatacgtatatatatacgtatacatatatacgtatacgtatatatatatacgtatacgtatatatatatatatatatatatatatatatatatatatacacacacgcacacataatagaaggattttgcaggtgagaagacaatgatcgacaagcgtcacgtgcacatgtcggacgagttcctgaggagcaacccttccgtggcggcgtacaactccccctctatcaacgtccgccagaatctcaccgatgtcactgtgccccagctgggcgctgccgccgcccggctcgccatcgccgactggggccggccggcgtgcgagatcacccacctggtgatgtgcaccaccgtcagcggatgcatgcccggcgccgacttcgaggtggtgaagctgctcggtctcccgctcaccaccaagcgctgcatgatgtaccacatcggctgccatggcggcggcaccgcgctgcgcctcgccaaggacctcgccgagaacaatccaggcggccgtgtgctggtggtctgctccgaggtcgtctccatggtgttccgcgggccttgtgaatcgcacatgggcaacctggtagggcaggcgctgttcggggatgccgccggtgcggtggtggtcggcgcggatccggtggaggctaacagtgagcgcacgctgttcgagatggtgtcggcgtggcaggacatcatcccggagacggaggagatggtggtggcgaagctgcgggaggaggggctggtgtacaacctgcaccgcgacgtggcggcgcgcgtggcggccagcatggagtcgctggtgaagaaggcgatggtggagaaggactggaacgaggaggtgttctggctggtgcatcccggcgggagggacatcctggaccgggtggttctcacgctcggcctccgcgacgacaaggtggccgtgtgccgcgaggtgatgaggcagcacggcaacacgctgagctcctgcgtcatcatggccatggaggagatgcggcggaggtcggcggagcgggggctgagcacggccggcgagggcctcgagtgggggctgctcttcggcttcgggccaggcctcaccgtggagaccatcctcctacgcgcgccaccatgcaaccaagcccaagccgtctgatgtgattctctcatccatccatcctccttccgttcgtccgtccctccaatatttggaaaatatatttttctcctaaactatttatccgatcacaccgttatattcgttataattaaacttttacaacaaaatatcatatgattatattccaataaaataaaaatatttgtttcaaaccattaaaacacaatgtttcatgtttcatatgtaatagttatatctttcaatgtgtatcatcattgtgttcctcaaaattcacagaactacatgccactactctctcctctctcttcactctaatcttcaaaatgatttttctcttaaaaaacttattcaatctataatctgatcacaccgttatattcgatgattaaatcttacaataattaagatatcgcatgactatatttgatgaaagaatagcaaatgtttcaatccgctaacacttgtgtttcatacgtgatcaatgtgtatcttcaccgtgtttcataaaaaaatttaaatgtttcagttttttttaccgtatataacttaatgtttcatttgttggtcaactgcaacatttgacattccaatttattttagagggattgggcgatcgatacgtagcttcctccaagtatttgctccaatatgtgtataactcacagcacatgcctacgtgtgtacaatacatgccaaaagtatatatatatatatatatatatatatatatacactagcaaaaatgcccatgcgttgcaacgggtaaaaaaattctaataataatatacgtttttcacgcataatcatgtcaatgacaatatttctattttaatgagcggcttgttttttataaacagtgttttttttcgcgatttctcaaaccatttttcagaaatggcgcatttctttctaacagtttttactaccatgtttttttatgctttttttacttacgaagaaaaccatatttttctccctttttttgctttccttttctcgtgtgtttttttcttgttttctcacatgtttttttgcttgttttttttcgaaggttattttttgcttttttctaatacatgagaatatatgacgaaataaagccatgtagtagatggcaaaaaatcgatggatcctatccgactcaagcgtccatcaatttagcttttttctgacagttttttcagagcgattttttttaacagacggtgtttttttcttgcatggttttttaaaaccatttttttagaaatggcgtgttttttcgacagttttttccacgcatgttttttaaaaatattttaccgacaatggaaataatttttctcgcgcgtctttttatttttttattgacgatggaaaacctttttagcgtgttttttgagttttttttctaacttttgcctcacacgttattttaaccgtttttattttctcatgcattttctcttttttgaaatagttagattagagatagagaagagatatatactggttagaaatcagattttgtttcgccctttccattttttttctctcttgcaacttttattttatacgaaccagctttttattttttacgaaccattttttcgccattttcttagggaatcgaacgaacttttttagataggaatcagacttttttttccgtttttaaaagattcggatctagcgttttttttgtcaccactttttttttgccttttatatgaatcagattttttttccgtcggatctacagtttgtttttttgccactcaggggaaaaaacttttgttgttgttgtttttctttattttgttttttgtgcagcttttatttttatttttatgcacctttctgcctttgttctctttctctttttttattttttttaacaaaaactacctcaagtcctcgagtagcttgttgcaagattatagggactcaaatgtaaatataaaaattacggggactcaaatataaaagtaaaaatccaaaaataaaaatcatattaaaatggaatgctctcgacatgtagattccgtttttgcaaacagatcttcaatctggcacatcaatttttttcaccaatctgagtaagactttctttttggcttttctttttctttttatgcatctttctgcctttattctctttctcttttattattttttttaacaaaaacgacctcaaattgcttgttgcaagattatagggactcaaatgtaaatataaaaattacaaggactcaaatataaaagtacaaatccaaaaattaaaattatataaaaatagaatgctctcgacatgtcgattctgttttttcaaacagatttttaattcgacacatcaatttttttcatcaatctgagtcagacttttttttttttgtaacagcgaatctgataaaggagtcggactttttttttcactattacggatataggagtcggactttttaattttttttgttattttttttacggacgaaggaatcatcttttaagtagtacataatttttggttttttttgccccttttttttggatcggacttctttttttcgtccggtttttttatcggacaaacctggtttttttttcatccggttcaaacctggttttttttccatccggttcttttggtttttcacccctttttttttctggatcggacttctttttttcgtccggtttttttatggataactttggtttttttttcgcccctttttttctggatcggacttcttttttttgcactttttttcgcccggttttttatctgacaaacctggtttttttccgtccggttttttttcccaccccttttttggatcggacttcttttttcgtccggttttttctgcccggttttttttcacccggtttttttacagacgatggaagcacttcttatttattgtttatttattttttaagtagtagagatgtatactaatattgaacgtacatgcacgcatataataagagcatctcataaaaaacaaaatgcataagactacggaggaggggatcgagtatctgtcatgtgatgtgattgaaactatgtattttctttcagaatataaaaagctttagagtttgacacgattttaagaaaatagataaaattaaatagggagaggtcatgattggttgagaaggggaagtaggtgaaaaatatgaatggtggagaattaggattggttggggagggaatgttggtggataagttgttatatttggggataaatcttaaatattaaaagttgttatattttggggtggagggagtatttggttgaaacctatataagcaggatcgatcgatctctgcaaaatttgatataggaaaaaattaaacaaacccacttcatccagccaaaccctcttgccttgcattggaagctttttccttttttttaatctaaaccacttatgcgcaatactgttcaatttctagggtacattatattttgtattatagaagaaaaaggccattaatttcaagccgtttggatagcattggacgtgttggtcatacatgcatgtcaaacacatagaagagcccaaacagagagagagaggggggtggtttgatcgaatcatttactttatttctttctgccatttaatctttctaatttttttatttttaggagtattttatagacatacgtgatatatatatcaatgtatagttagtgtacttgcttcaatgtacatgatattaggcgtggagaaaaaaaatccgaagaccgagaaccgaaccgaagaggcggtttgtccggtcatcggttgattgttattttcctgtagttcggtgtttggctttttcttcagtgaaccgacgagaccgaagaatccgatgagtgttcagccaatccaaaatgctcgaggcccactaacaaacgtgcgcatcaagcccaacttttactgtggcccaaaaaatacatgacagctaacagatccaacaaattctattccctctctccaaatcaagcacaggccctcgggcagagctgggtaggccgtgtgtacttgcgggaagtcgaccgcagtgtacggcataggttttctcggtaaaaactgaacaccgaaaaaaaccaaaccgatattttttggtttattttgctcggttgatattttttctagaacttcctttggtttgcattttacaaaaactgaatgccgacacaaacaaaaattgactgagctttctgcacgccggactgggacatattatttggatctgcttacatggctgctttatcctcatcaagtttggatcatgctcctcttttcttggtgggctgtgaacagagggaactaaatacctcttttcgttttgaagcttactggcttaaattccctgagtttttggaagtagcctctgaatcttggaatagaccaattagaggatcaaatccctttgcaaagctcaacttgaaactaaaaagactagcaagagatctgaagagatggagcaaatctcggattggacatcagattgcagtatgcaatcgcaaatgaggttattttccaacttgacgtggcccaagaagagagagctcttacagacgaagagcttctgctgaaatctactctaaaatctagagttttaggccttgcaacactagtgaagataagaataagacaaagagccagactaacttggttaaaatgtggtgatgttaattcaaaattcttccatttgaaagcaaactcaagaaaaaggaaaaacttcattccagctctaaacactccctcgggtatagctgtaaccacagaacaaaaggaggctgaacttgagagatatttctcccagagattagggcagtatgtcccatgctccttaactcttaattggtcagaattaagtctcccttcccttgatctgtcggaactggaggaagatttcacagaagaagaattaaaagaagcaatatcaaaccttcccccaaaaaaacacctggccctgatggctatatagggcttttttcaagaaagcttgggtggtgattaaatcagatttgctacaggccattaaccatttcagctctctgaactcagatagattggaagacctaaatttagcaaacatttgtctaattccgaaaaagggtgaagcaacaagggtggaggacttcagactcataagcttaatgcacagcttcgccaagatattagcaaaaatgttggccaatagattggcgcctaagcttcatgaactcgtctcaccaaaccaaagcgcgttcattcggaaaagagcaatacatgacaacttcttgtatgtgcagaacatgatcaaaaacttcaacagaaagaaaaaaccgatgctttttataaaggttgatatttccaaagcctttgacatcgtaaactggccgtatttgctggaggttctgcaaaattttgggtttggacagagatggagaaattggatttcaaatattttaggaaattcaagctcgagaattatcctcaatggaatccctggtaaagcaatttggcacatgcgaggtctaagacaaggggatccactctcaccgatgcttttcatactcgcaatggaaccgctacatcagattttcaaagcagctgaagaagcttctcccttggcaaagatagacccaaagcgtagtagattccgatgttctctctacgcggatgatgtggctttattcatcactccatctgagaacgatctgatagcggttaaacgcattcttgagacttttgcacagatcagtgggctacatacaaacccgggcaaaactgagatttaccctattgcttgcaacaacttagacctcgacaatctcctttcctctttcatgggaaacctgaagactgtcccttgcaactatcttggccttcctctgcatacaaagaaactgagaaaaattgatttgcaacctctcttagacaaggttggagcaaggataccaggatggaagggacgctttttcacgtcagcagggagagaggtcttagtaaaatcaactctttcagcaacaccaatttatcattttactgtgctgccacagatgaaatgggtgtttaaaagaattgatcgttacaggagagcttttctttggaaaggtgacgacccggagaaggttagtgcaggcagcagccttgtcaactagcaacaagtttgcaaacctaaagacttgggcggtcttggcattctaaatttggaaaagtttgctagggccctgaggttacgttggctctagttcaattggaaggaggaccaaaagccatgggcaaatatggatcttccatgcgatgagatggataggtgccttttcaaagctggaacgaagataactgttggaaatggaatcaaaacatctttctggaatgataactggatggatggacaatcgccaaaggatatagcaccagcaatctatcgattagcaaaaagaaagtcaaacagtttaaagaaggaattagaggataatcactggcttgaaatgctccacccgatcacttctttagtggaaattgaagaattaatccaactaggaggtttgttacaacacattaatctagttgctggacaaactgatgacatttcctggagatggacagcgaatggacaatattcagcaaaaagtgcataccttgcacagttccaaggatccaatgctttaactgaatttacacctttgtggagcgcgtttgcggaaccaaaacatcgtttctttggatggcttatccttcatcaacgaactcttactgctgaaaatttgcttcgacgtcactggccatgtgattggatacgtagtttgtgcaatagtgcctttgaagatgcagcccaccttgcaaaagaatgccctttcacagtgaccgtgtggacgcagatttgtatttggatgaattttcagctgcctcaacatcatttgcaaggaaatctatcggactggtggagcagtttctgcactatttcgccaagacaaaacaggaacaaggttctgagagctctcatcacaacatggtggaacgtttggctagagcgaaacagaagaatttttcaacagatttcaaagaatgaactccaagtcgcctttctggtgaaggaaaatatcgacctaattgagcaatctaggatctgaccccgtcatgatcccctttttcaagatgtttctcaatacttcatgttgtagctgatgctccttccctccccacccctgtgttcacaggattcttgtttgtactttaactaaatttttattccttctaatatatccggcaaatctccagccatcttaagtttcaaaaaaagaatgccaggcaacccaaaaaaccgatccgattaaaccaagcaaacccacccctacgtgatactatcatatacccctgataatttcacaaaactatttgtgcagttgtgctccttagcgtgggagatgctgtgattagcggtagcggccggcaaggcccaaacaacattgtctcccttgagtagcctggcagcaatcgaatatagtataagtatatgctctctccgtttcacaatgtaaatcattctaacattttccacatttatattgatgttaatgaatttagacatatgaatgtgggaaatactagaataacttatattgtgagacagagaaagtagtatacatgaacccactacagaatcatgaacattaaatccaattgcgatcaacatcttgacaaattgttcaccacacaaaagtaaatcaacacaatgatttcacacagtaatagacccgatatatggagaaaagtacctaactttgttttcctgtcatcagatggaatggatcactactagaaaaaaagatttttccaggcggcccaaaaccattttcacaggaggggaagaggatcgccgctaccatctcgactgtgaaattaaaccattttcgcaagcgcgcccgtggcccgccagcgaaaatcatcccaggaaaataaaaaaaaccacggggcaccgccggccagggctcccctccacccgtcgtcgtcggcgccgtcgtcgtcgtcatcgtcaccgtcatcgtcgttgtcggcgcggcggcggagggggcgaggagatgaagcggctggtagaggcggcgaggagggaagccggcggcgcacggatctggagccgtcgtcgtcgctcgtcgtggccggcagcggagggatgcggcggcgcgcggacgttgtcgtgaagggagccagtggcgcggacgtgggagaggagggagccggcaacgcgcggatctggagccgtcgtcgtcgctcgtcatggccagcgacggagggatgcggcggcgcacggacgtcgtcgtggagggagccggctgcctggacgtgggagaggagggagccggcggcgcgcggatctggagtggagggagcagtcggcggcgtcacggtcgtcgtcgttgtcgaggagggaggccgccggtggcgaggagggaggcggcggcgcgcggacgtgggagaggagggagccgggcgatttttctaagtgtgggggagagagagagagagaggagggggagggaaatgagtggtggggaggagaggataaggatgagatgactagtttttttttggtaggtactatttttgcaggcggaccacataaggcgtcgcttaagtggtctgattttcgcaggcgccgcttaacagtgaatttcatgccggtttatatttttttaggctgtcatttggctccaagagtcatgtccgactgtaaaaaataagacccccacatcgggggaaaatgccttttctagtagtggatattaggaccaccaattgacttgcttgctgttatgagccatttcttttagtagtctctattgacaatactctactactattattatcaccaatagaagttatcttaattgttgatttatgagttctaattaatatcagtagaataaatgattctattactgtacttgtgaggtgacagtataaattgatatgatctattggattagaaaaaatgaacgacctagattgattctactacgagcacagaccagtataaagaaaacttttaattatgtgctattgcttcttgtaatgttggggaaaaagaccagctgggcttgatagtgatagttactcctaatttatcagcttctccaacttgctgtaatttgtaagcatgcatgcatcgacaatgatgaaatttggaaatatgataatactaatataatatgaattgccttcttgttttggacatgtgcttggttggtgactagggtaattggcttgaacgtaaagaccagactgaaaacttttgaaaagagttgaatttggttcaacctgccgattatatattctggaatttacatcctgattattgatacaattaggcagcagcacatggacatgatatatatacacatctactacttagaagaagcaggcaaaaacacaagatcggtggaggaactatgattgaaatattgaattaaccaaagtaaacgcaatagaagcttcattattgatggtccaggagagatgctctttccagtggccaagggggtaccttacttagctagatgtgttaaatcagcaaccaaacttgacttgcagcgtctttgccgtgtcttccccgtaagtgtcgtgcatatgccatcggcgttttcattgatagatacagctctgcatctactctcaacctcaatctttggacactgctgtatattacatggggtatatatatatcctctctgccttccttctcccagttgcagaccaaaggagccagagcagcacaaatattgagaaaataaggagaccggccactgaagagcatgccttctctctacatattccttgggcttcttctcttctccctgcaggctcctccatgtcctgctgcaactgatactctgaaggcaggacaagtgctctctgccggtgacaagctcgtctcgaggaatggcaagttcgcgctcggcttcttcaacccaagcgcaaacatcagtaagtcatctgacaacatctcctccagttggtacattggcatatggttcaacaagatcccagtttttactgtcgtgtgggtcgctaatagggagaggtcaatcgctgagcccgacttcaagctaacacagctcaaaatatcacaagatggcaatcttgccatcgtaaaccatgccaatgaatccataatatggtccactcgtattgtcaataggacagaggccagcatgaacacaagtgttcttctccacgacagtggaaatcttgtcatacaaagcacatctaatgcagtgctgtggcaaagctttgactacccaacagatgttgctcttcctaatgccaagattggctggaacaaggtaaccggtctgaaccgtgttggtgtttcgaagaagagcctcattgatatgggcactggctcttatagtgtacaactatacaccaatggcaccagaagggtgaccctcgagcaccgaaacccttcaatagagtactggtattggtcgccagatgaatcgggaatgaagataccagcactcaagcaactactgtacatgaatccacagaccagaggtttagtcaccccggcatatgttaacagcagtgaagaggagtactacagctacaattcatcagatgaatcatcttccacattcctcttgctagacattaatggccagatcaaattcaatgtttggtctcaagacaagcactcatggcaaagcctatatacccaacccgttgatccgtgcaggtcatatgatacttgtggaccattcaccatctgcaacggcaattcacaaccattttgtgactgtatggagaatttcactcgaaagtcacctcgggattgggaccttggtgatcgaacaggagggtgttctaggaatagtccattagattgcaccagaaacacaagttcaacagacatcttccacccattaattcatgttacattgccccgtaacccccaaaccatacaagaagctaccactcagagcgaatgtgcacaagcttgcctcagctcctgctcctgcactgcttattcctaccaaaatactagcacttgctctatctggcatgacgaattgtttagtgtaaaccaagatgatggcattgaaattcattctcaagatgttctttacctccgccttgccgccaaagatttgcagagtttgagaaacaacaaaaggaaaccaaatgttgcagttgttattgctgcaagcgtaattggttttgtgttattaatggtcgggatgtttttactgatttggaggaacagattcgagtggtgtggtgcgccattacatgacggtgaagacagcagtggaataaaggcatttagatacaatgatctagttcatgccactaaaaatttctcagaaaagcttggagcaggtggttttggctctgtgttcaagggaatgttaattgatctaactaccatagctgtgaaaagacttgatggtgatcgtcagggagagaaacaattccgtgctgaggtgagctcaattggattgatccaacatatcaacctagtgaaattgattggtttttgctgtgaaggccgtaagaggctacttgtgtacgaacacatgttaaatggttctctggatgcccatttgtttcagagcaatgctggtacactaaactggagcattaggtatcatatagccctaggagttgctcgaggattgggatacttgcatcagagttgccacgcatgcatcatacactgtgatattaagccacaaaatatacttcttgatgcatcatttactcctaaaattgctgactttgggatggcagcatttgtagggagagattttagcagaattctgacaacattcagaggaactgtagggtatcttgccccagagtggattagcggagttgctgttacaccaaaagttgatgtttatagctttggtatggtactactggaaattatatctggacgaaggaattcacctaatgaatacactagtgataattaccatgtttcgtatttccctgtgcaagccatcaacaagctacacgagggagatgtgcggaatttggtggatccacaattatgtgatgattttagtttggaagaggctgaaagggtttgcaaggttgcatgttggtgcatccaagatgatgagcatgatcgaccgacaatgagtgaagtggttcgggtccttgagggtatgcaagagcttgaaatgcccccaatgccaagattacttgcagctttaacaaaatgctctgatgtgggttcaatataatagttcataaatacttgtatttcactatatttcggaataatttatgatgctaacgtgtggcaggagaaattaatagaggaagtcaaacctgcaaatattgttgaattttatggtatggtgtatgttttccccccgttctgtttgtaatgattacctattatattctgatgagcagatacttttggaaaatatgccagtactagaaacatgtgtatattctccaccgtactggagaaaaagaaatatgtctatgtttatttgatggaagcactgaaatgtatcctcaaattgaaggaagttcatgtatgatatatgccattacttagtgcttgaattagagatatagcatttgtaaattgcctattgaaatatgccaccacgtagttatccaataaagtgccagactaatgtagtactacaatatttccgaacttcccttaggatgatgccatgtactattaacattttgtatgcacagtgtaattccgttcgcatcctgggtgatctcgatgcccagatatatatagtaagataagaggccaacaaggtcactcatgaggaatacctgcttcatttgagccttgaacatgtcgattttttttttttttgctgctgcagccggtgctgatgagattgtcaacgtacacgccgacgatcaaccgcgaagctcggcacacgtgtagatgctgtgttctgagtcgctcctcctgaaaccaagtgacaccatcgaggagtctaacttagcttggtataaaaggtccttactattttttttaagtaaattgcactagcggtccttagacttgtaagcaaattttatctagatccatgaacttgcaaagtgtgtatcgaagaccctaaacttggtttattgtatcatcccaatgaaagtctcatttgaccgtggtcttacttacgtggcatgacatgtagatgacggcatggcacatcatcatcatcacatgtagatgacggcatggcatcatcattattattattattattattattattattattattattattattattattattatttctttgtttctctcttcttcctctttcatttctctcttcttcgacctctttgacgcgggggagctcgaggtggctctagtggaggaagaagataaaagaataggaggaaaaagaaaaggggaaatgaaaaaaaacgccatgtcatcgtccatgtggcgtgccacgtagacaagaccacggtcaaacaatgctttggacggggttgatatattaaaccaagtttagagacctcgatgtacgctttacaagttcgtggatctaagtgaaaccttatgacaagtttaagggccactagtgcattttattctttttttccatgttgggctcaaattcacacactactacgaaactcctgataagaaacgccctaaacttggcacatagtatgagactttttcggtcctcccgacccttcaatgggtctaaaagtaaaaaaatgacacctataatattatataggtgccggtttattaaaaaaccaacactaataatataaatgacggttttcctaataaaccgacacttaggctgtgtttgaggaggagatagagaagattggaaagatacgcaaaacaaggtgaggtattagcgcatgattaattgagtattaactattttaaatttaaaaatagattaatattattttttaagcaacttttctagaaatttttttcaaaaaacgcaccgtttagtagtttggtaagcgtaggcgtggaagacaaaacaaacaatctcacaatcacccagggccgaacgcagccttatatgtgagatataagtgcgggtttttaaatcaaccggcatggacgcgagcgagcagagccaataggacgcaagcactctagaaaaatctacacgagactagtcttctctccgccctctctcttgtgcgcgcttttctctgctttcttcgcccctctcacattcttcgcctccctctccggctccagcacatggctgcttctctgtgtcgtcttcctctagcacggtggccttcggattcagtcgagaggatagcggaacaagcgggaggagtctccgtcgaggccaccgaatttaccccatgccacctcctccaacacaccggagaggagagggaggaggcggcgcaagccaaccgccaccatcacgagctcaggttgctgtagccagccatcacgcgcactgttgccttatgtgcaccgttgaggagaagggtaggtacacgtcatgcaggggacttctacaccaccactgcccattcactagatctggtgctcaacattttttttctgatatgtttggttttttcttgttcatgttgttctttcccttttgacgcatgcaaatgatctgtgtaattgattttaattggaggaatgatggaatttgttcgtttgtgtcaaaatttgtgatttggtttatatgatttgtgctattgaagaacaatttgggattcatgaagaataatttaggattattttgtcattttctttactgcaagcataggctcaagacgagctgactttttttttggaatcgtgcaactaatcggtaccggttctcaattcggcaccgatgagccttctgatcagtgccgcctctgtgatgccggttggaaaatacagcatatatgtaggtttccatgcggcacccattagattttgtgtagtagtgacatttgaatgggctttatcgccctaaattgatgccctttttgacccaatttggttggaaaatagtgtggccttggaaggtcacaattatgtcgttgcattaagcactgacgctcttgtcccggttatgatttgcacctttttctttttaataaaaaggattaaaatccgatctttacatccaacctgatgtagacagccaacgcaccatctttcttatgctggccatgatctatgttgctgtttttgcattgtcattcgtttgctcttatcccttggctgtcccatcgtccatttcaagttctgcatatgatctctccatatatatacatacagctgagctgatgatggttatcgttctgaacttctgatgttgctgttcaaatttcttgtatatcttctaaggcatgtacgcgatgggctgctagcctacatcctttgaaacgacaatacatatatgaagaaaaccgtatagtctctccaatcaaatttatttgatgttgaaaaggtactagtttactacctccccaagtgtatggtagtatgctgtttcagtttggcatctcagtgtttttttatatacgtatatcgcaaactccaccaaccatgcaaattcctcatggttgacttgagccagccaaacacatgttgtacttgtttaagcaacaggagataatggccaataaaagtggccacccccacccagtgctgtcttaatctgaatttgaccagcatgcatgctcagcgtcgttgccgtgtagatattccccatcagatcactcgctctcctcttattccttgtcccaactccaactgcagaggaagctaccagcaattctcgtctccatgcgtccccagagctatgcatttcttggccttgttcttctcctcttctccctgcttcctcttgctccatgctctgctgcaaatctaaataatgatactctcctggctggccaagcgctcgccgtcggtgacaagctcatctcgaacaacggcaagttcaccctcggcttcttccagccagacgcaggcaccagtaagtcatctgatactagcaccaattcccctggctggtaccttggcatatggttcaataagatcccagtttttactactgtatgggttgccaacagggagaggccaatcactatccctgagctcaatctaacacagctcaaattctcatcagatggcaatcttgtcatctttaaccatgccactgaatccataatctggtccactcgcgttattatcgatagtcataggacacaagaaaccagcagcacgaacacgagtgtcgttctattgaacaccggaaaccttgtgatagaaagcacaacaaatgtagtgttgtgggaaagctttgactccccaacagatgttgtgctccctggtgccaagtttggttggaacaagatcactggcctgaaccgtcaatgcatctcaaagaagagcttgatagatccaggtcttggctcatacagtgttgaactagacactaatggtaccaagggggtgatcctcatgctccgcaaccctcctaaagtgtattggtatggtctaacatcaccaactcttataccagagctcagatccctgctagcaatggatccacggacgagaggtttgatcatccctacatatgttgataacagccaagaggagtactacatgtacactttatccaacgaatcgccttcttcgttcctctcactggacatgtctggtcagatcatgctcaatgtatggtcagaagctaaccagtcttggcaaatcatatatgcccagcctgctgatccctgcaacccatttgctacatgtggaccttttaccatctgcaacggcaattcaaatccagtatgtgaatgtatggagagttttactcgaaagtcgtctcaggattgggaccttggtgatcggacaggaggatgctccagaaatactccattagattgcactattagcggtaacaggacaagttcagcagacatgttccaccctatagctcatgttaaattgccctatgactctgaaagcatacaagatgccaccactcagagcaaatgtgcacaagcctgtctcagttcctgctcatgcactgcttactcctatcagaacaacatatgctctgtctggcatggggatttgtttagtgtaaatcagaatgatggcattgaaaatcatttcgatgatgttctttacctccgccttgcagccaaagatttgcaaagtttgagcaaaaacaaaagaaaaccaattgttggagttgttacaaccataagcattattattcttgtgttactaataatgctcatggtgttggtaatggtttggaggaatagattcaagtggtgtggtgtgccattacacagaagccaaggtggtagtggaattatagccttcagatatagtgatttagaccatgctactaaaaatttctcagagaagttgggagaaggaggtttcggctccgtgtttaagggagtgttgagggacttgactgttgtagcagtgaaaaggcttgatggtgcccgtcaaggcgagaagcagttcagggctgaggtgagctcaatcggattgatccaacatatcaacctagtcaagttgattggtttctgctgccaaggtgacaagaggctacttgtttatgaacacatgttaaacggttctcttgatacccatctgtttcagagcaatgctactatactgacgtggagcacgaggtatcaaatagccataggagttgctagaggactttcctacttgcatcagagttgccacgaatgcatcatacactgtgatattaagccacaaaacatacttctcgacgaatcatttactcctaaaattgcagattttgggatggcagtatttgtaggaagggattttagcagagttctgactacatttagaggaacagttggatatcttgccccggagtggattagtggtgtcgcaattacaccaaaagttgatgtttacagctatggtatggtgttgctagagatcatatcaggaatgagaagtttacctaatgtacacagtagcaacagtcatcatgctgcttacttccctgtgcaagccatcagcaagcttcatgagggagatgtgcagagtttggtggatccacgtttgagtggcgacttcaatttagaagaggctgaaagggtttgcaaagttgcttgttggtgcattcaagataatgagttcgatcggccgacaatgggtgaagtggtcctggttcttgaaggtctacaggagtttgatatgccccctatgccaagactacttgcagctataacgagatcttctaatgtagctgagatgtaaaaacaattcaaaatcctctaattgctaaaatgtactgtataatgctactcttgtatttacatttttttttctttaatgacagacttttgtaagcaacggttgtcgatgcacagtgagaaatgtgttttttgttgacggtatagttgacataatgcttaaattgaaataggaagttggtatattggactgcttactgcttgctttagagataggtccttgctttctctgctagaaatgaacctccatgatagattaaaaaaaatagacacataaatgggatgaacaaagaaagctcaaaacaaagccactttcagcttattaactcttctcaataaaaaggtttcatcctatcggcccatttaggccttgtttgcctataggggaaattttccttaggttgatccacccaagagggcagattgggttgatcccctcctaccatccaacccccctccaattcccctcccctgagtattggtgttttgtctgttggttcatgagtacacaatacaacaagcaaaggaacccattgacactgtacaaactgcacatccaaaagaatggcactaagaagagccattttggatgttaatacatcacagcagtaagcataaaaacattaaaaaaaagcatataagatttgggggctaaaatgtgcacaagaaagctgaaatatggtaacaggaaaattactaatagtgaatggtaagaccatgactatttgttatatacttgtactgtttggtagtaggctagcagctcgaaacagtgtatatttacttcagttcatgccctatgataatatatgttacaagcagggagatatattatttgctgatcttttaagtccatgtggtggaatggcaatgaattgcaagttgcaaagcgctacagtatactctttattatcaaaacctattaacagaatgatatattcattattaatgaattcattcaagatattcatatagatatacaaaaaaaaatagtcgtctctctgtgtgtgaagcacaccatagaagtagatgagcaatctgatagagttagcatcatgcgtccttagactttatgaaagatagtgttttgccagaaggtgttgtaggttataacacattggaaaataaatggaattgaagaaaatattgatgttggtacttggtagtatgatccaaatgaaacagtgataacaaagaaaatattgcataggatttcatcgttaacacttttaatggtcttttcttaaggtgattaactttgcacaaaagtgtgttggagaaagaacagaacaagcagtggcattgctcagataaaaaaaatttcaggaaaccaattgatggtctagttgaactgtaaagtagagcttgtcataataattatcccatggatcaccattctaccaacattgataagatggagcttaacaagagaaatccaggactgaagatacaaaatgaacgatttactcaagtgcatttcgttattaggtggagtatatacttaactcactgcggtgatttcagtgaatttagtgcatgcgatccggatctcccgcagctcgcgtgtatacatacagatccagatcctgcactaccgcaccacacaacacaacccccaagcaatataatcaccataataacactgaagaatctaggggggggggggaaagaaagtaaggggcaaatgagagaggagtgaatgatgaatgcggcggaaaagcagaactcacggggacgggataggagattcgcatccggggaggaaaaattggaagaggaggcaggcagacgcaggcatggtttactgcggtactggctctacaggaagagaggcggcgacgatggcggagggaggaaggtggacgcgtggtgttgccactgctacgactaaaaaacaacaaggcaagtcaatcttgatcttagagcatcacaacaatatccttaaatgaaacccaattttaaaattaaaatttattttataaaagaattgctccaacagttccatagagatgtatccaaaaattagaatctcattctcctccttactcgctctccacaagtcaggagacactctcactttcaatttccttcgctctctacaagtcggtcaggagacactctcacttccaatttccttatagcaaaaggagatggcgacaagtggagagatcgcgcgcgtgggaggggatggacaaagcgattttctttattatatgttggtagttcagtgtgggttcactttttattattggaagttaatttaagatatttgttagaaataaaaatctatttacaccttaaaatcaaattaggaatttcaaaaacagaattttaaagataaaagatttttgggtatcgtgctctttacccccatcaacttttacaatcgatctatctttaatcctatcttactataaagttatcctccactaactccttaagcttaacatgcaaagatgccacatcatcatccattaacaagatgccacatcatcatccactaacaatcatcacatttaaacatcatgcaaacatgctatatctttatagttttttatagtttttataatttaagagcttttcaaatacaaacatattaaattaaattatcatccagtataattcacataatgtttcaatgtaaatccttattatgtttatgatatcctatatacttatatagttcatcttcacttagtgcttaaatgattaatctatggtctaaattatctttctcctttttttcccttaattaagtcatatcacatcaattgtttttagcctttagattattaatctacggtccaaactatctccctacttttcttcttccataaagtcataccaccttactttttatttttgaatcaccattctacattttatttaaatttaaattatcataaaccgcattaatttacttaatctgatgttatctagctatcttacatgttatttttttattgttatcatactaaattcccgcagcaatgcgcggggtttcacctagtatatatatatgcctctcaacaacttagagcatcaccaacaaactaggtaaattccatccccaaaaatttaaatttgagaatcataaacggattttgatatgtgaaaaagtgatccttccaagggattgagtaggacttattaaaaccaaaacgtaggcccatactatacactactaacggaaatcactttatattcctcctcccgcatgatcacaataacaaaaattaagttggagaattttttttccttacgtgagatagctatgggactctatctttacttaaagctttaaatccaccagcttataaatcatataaaccaaaaaactaacttaataaccaaaaaacaataaaactaaactaatagaagacttttgttatcaaacaaggccatagtccatgaaactattgatgctaacattacgttgttgcgaatggtacgagggttcagataaaacgctaccactggatagcatattgcaacagtgatatccatagatatcatgttatagaacgagtaaatgcatatagtagtatttctcatttttaaatttgaaaatatatgttaggtagaccttttgacatatgttgttagcagtcgtgaaaaaagagctagctgggtgaccaaaggcgatgaagagacatgtaaaattaatcgtgaaaccaaattcctcaatttttggccaaagattgttttatcgtatagtacaaacactattggagaagtgatctttacccaaatggcaaaaatcacattagtcccggttcaaataaaccaaaagaatatgtttagtccaggttcaaaagccagacgaatctttttttatctttaatcccgttaccaaccaggactaaagatcatttttaatccagcttcaaacagttatcaggctgtgtctggccccaactatccttagtcctgattgataacactaaccagtactaaaatcaacactttaatccttgttgttcataccaaccgggactaaacaataaaaaaaacggaagaaccgagccgcacgggggagagagctgcgtccttatcttctctttctctccctcgcgcgtccttatattcttctctttcttcttctcctcctccccctccccttgtcctcccctcatcctcttctcctcgtcccgtcgggagcaggagcagcatgcctggcccggttcttggcagtgggtgtggctcgagaggtcgtcggcttcggcgcggcagctagggcgcggcggcgggtcgcggaggcgcaagagcgggagggcgatcgcctccgtcggtagcggcggcggtggtggtgggctagacgatgctggcgtcatcgtctcgccaggtggagctcggcatcggcttttgccttggcgtggcagctggggcgcggaggcgcaagagcgggagggcgcttttttccgccgccggtggtggcggtggtggtgggctggacagcgctggcatcgagctgcattcgatctatgaatgaataatggatgattttgttgtgatgccgttgcatgtagacctgtggtttgtagactttttttagatgttttttgaatttgtagatgatttcgttgttgagtatgttcattcgattttgtggatgattttgttgttgagtatgtttttgtgaatttgtggatgtcaatttgatgtggggatttagggatgttgggagcaactggcatggctcaaaatcaatacacaagtagtaaaaaataatgaaaataaaaagaaaaaacatttgccacatggcgctacaatctttagtctcgattggtgttaaaggggttgtaaatcgggactaataacgatggattccctagtagtggaagcatgagatgcaaaaggatcacgcttgtgaagctagcaattctcataaaattctagtcaaatttcctataattttcctcgttacgacaacaaaaatgatgatggagaagctgttttgcaggccagcaaccggttgatgccccatcattttcctctcccttttgtttctttcaacatatacatattgctgccttcttattttcttccattttcttatttagtatactcagtatatattagctttactagcctgattagactaagacatactaccttcgtccaaaatatcaaattttaattatatatctgagcatgtgctaaaaaaagtatattatgggacaaaaaaaatagtttttgccccaaaaaatgcccctttttaacaggtctttgctttttatcaggtcttactagataatttattaattaatatattcagtcaagaccacgtcaatataacgatggtatatcagatagggaaaaggggagaaattctagtccatttgcgactagtagcatatcgctagctacggcacctgcatggttcgttttcagtgaaacaaccaaagtgttattgttaaaaaaaaagtgttgaagtggaaaaaaagagcgagatatcgatgcatgtcatgtgtgtgctgtagctaagtaggagtcgtggctacacaaattaagtagtacgtcacaggaaaaagatcattttttttccggtgggctgcatgcttcagaaaaccacaatcgatcagaggaaaaattaggtgtgtccaactgtccaaaataagttaaggaccgtgaaagcaacaccctgcccaactctcttcctgctttatatgatctttttcttccatttcctctctatgcataacttcattatatattgacaacattttagttcgttttacgcaacgttcttttcctattgatttttatcctcatttctggccatacatacaggatacaggttagtacttagacatcacggtctttttaaatgtatggttggtcgcttctaatattttgttgtgatattattagaaacaccgataacactgaaatattaggaattgccaatgcgatatactgataaaatactcctatcttctattaatatattagtcaaaaaactaatcaacatcattaatataataactgaagaagggagtcacgttttttattaggtaatagtttgtttttaccccggaactggatgagaatccattttccttagtaaaaacagtctatttttcagcatgaatatttcttttcgttgtagacaccgccctatttaattagagctaattaacacaatcgatatttccaccaactttgattgacaatgttcttgaaaatgtcatgttgaaagtgcttttgttaaaccatcattgtagttccctgtccttgtctccatctttctttttaaaaaaatatcttacataagagaaaacatatatgcgagcgaacaaatcatgtgttccagctgaacgactttgctatatattacgtatgtttttttcatttgacattggttagtttaaaagaggatggaggtcgtattacacaacatatttttaacaggcgcagtgctccgacaacggggaagtgcagaccctcttttgaagatttgattagaggcaggttgtgactgagagtgatcggtgctaagaagtgtgaaaaaaaatatacaaagaacgaaacacagggagtatacaggtttaggccacccggaggtgtaacaccctactcttataattttttttctactatcaacaccgaatgatacaacacgaacaacaacagtagggtgttacaaccccgattggcctagacgtgtatactccatgtgttttgttatttgtatatgat

SEQ ID NO: 26361 - DNA, 18874 bp, Oryza sativa
cgaatcttcaaggaagaagggatctacgcttccctgttgtcggagtaccgcgtccctgacagcttagagcttgccctatgattcatggcctggtttcatctcaagtgatctcccgaatggatagggttgcagggttaaggttaggggagaataaggtcaggatgagaaagtgagatgtgtttgtcggcttagagggatagctaggacgatggttgtgtcgcctcagcagtgggagatgatgaggatggtgggcatgtgttgaagctagagcaacacgagatggtggaggccaacggtgtgggagcattggagccgagtacaaaggaggagaattgtggaaatgaggttgcgaggagaagagagccatgttgccaggtgaaacttgccaaagatggaagagggcgacgatgtgggtgtatcagagcttaaaagattgaggatggtgatgcggaggttgcaagaaggagaagatgtcgaaaaggggagcaacgtggtttggtggggcatgcgagcaaggcaactgttggtatttcttaacgacattactagaaatacaattcccagcaatggcgcagaaatactcctggtatattatggttacagagttcatccgcaagcgcacggatataccattgtagcatttcacccgagagtattccaatggtatcgtatttatttaatctcgtggaaagattatagtagagagaacctgactaataatttatatgttacttgtaataatcatattctaagcaggggttaagataaatcaagggtagagtgacacacaagcaggaagcatactcattctcatattgaaatatctaagctaagtggaaagaaaagagaaagagaatatattcctatacttctagtatacatagtatacatatacatcctagttatctgacatactagccaataccctctatccaatgccctcctggtacttcgagaagccacccctaactgccgagttccttacgacagccagtcatgaccatacaaccgggactaaatacgtaggaataccctccctaggaaattaacttaggactatatacatgcgcggaggaatacccatattaatctatcaccatcagcggcccacctctcatccgcagcatataacccaaaataatgatattccgtaatctagacaccacacctaaactaccagatactactctaatatcatcgtcatgacatagagtatttgcataagcaaacattatacccgtaccaaagcatctcccaaataagctagcagtataatcagtataacatgaacataatgtaaagttggcattcatatactcggaaagtatttcaataccataaatgacatttataaagaagagtattctaataaaagtacaaagcttacaaaagagaagagaagagctactagagctatacccaaactcttccgaaggcttccggactccgatttctactctattcctattcaactagcttaagaacaccaaactaattaaacttgagagaatatgaaagaactttgcttgaggtgtgtgagtgaagtgagaagaggagctccttttatatgcaggtaatgacggttgtgatggttggaatggtcggtaataccctccaaccgtcattagggatcaatcccagccgtccatcaaaaccctgcatccatcggtgccacgggaggttcggccgaaccatgggctaggcccacctggtccaaactcggcaggtggcctcctctgttgctcctttatacagacttgtgaattttggtctaattcatcgtgtcaattctgagttcttggcccattcatgcataagtctgattctcgacatcgtccgattgatttatcgtctgatttgatgtcgattctcctccacttaatgatcattctctgcaaaagtttagtgaaccaaaaactagtggaatattattattctaacatggatatgcattgcaagcatagctagttcttctctattttggtaatattgacggtcgaaactaatcgctaacgaccatcaacagcaaggtagaaaacgtgggaagaatcgtgtgattggggaggagtgtaaacccaacttttggatcttagctttaacagagccaggttcaccagccaaagatggcgatgctggtggtttctcgtacatgaggaaaaattgttgtgattctgacttctaatcgatcccactgggcgtgccaaaagcgtgttgatgtgaaaacacgaggcctgggagatctgcttaactccagtgcaggtccaaaactcgcctcgggtatgctagcgtgccagttgatttgatcctgcaatcaacaagaaacaaagacaaagaaaccgtggttaaatccataaacgatagccgatcggctaggtgccgatgacgtatcatttgtctttgagccgatgtcatatatgcatcaatcgacagtcataaatagataagaaagaactaaatctactcgatcggctatagatattaacgatatataatctttatgtcgatatatacttaagtcaagtgattgggatagatcggtcgccatgccgagacaatataaatcacttagatcgaagtatatactaagaataaaattatatatattcatagcatagccgatcagatagatctagcatgtatcggctaatattccgataccactctatattaagatatcaaagcaaataggatataccaaacaaagagcctaatatacttagatacggcaagatcttaacataaaggacggatttaacatgtcaataaagcatataaaacaaatatagttaaatcaagtaagatcggctgaaatcccgatactaccctaatcggcaaccaagaagcaggctagagattgagattctaatcatgactcataagatcaaactcaagtgatgcagctataagtatgaaaagaaggacaatatctagacaatcaagccattggaagtctcatagagtggtggatatcatatataatctaagccaacgtcgatatttaacctaatcggctgccctctattgatagatgttagccgattgtaagttagatagcgatattgccagagattatataagatatatgataactcgatgaattacatagacaagattagagtatcataaagatggaagcactaatcccgagaacgcaagctgtcataacaagttttacctattgttgaatatcgaaaccgatgcagctcaacccgaaagtaagaactcgtcgaaataaaacgaaagcaaaaagggtggcgatgcgccgaaattgtattgaacgtgtgttaattcgattacatagggctcggggtctatttatacccaagaattacacaacatgtccatatcggacacgactcttatctctaacaaactctaagataccataagtctttgcggaaaacttttgctcaaacatatctctacaaaaactacataaaatatcataattaatagatacaattgctttctcaggactctattcatgcatagcaatcatcttgaagcatatcaactcaacgcgatgacgtacaccaagtcatattgtcggaatcggctgtatcgtctaacccagtctgactcagacttagccgatcccgatcgtagccgatttagactctagccgattcttactatgtttccgcaactatcttcgtcttggattccgcttcgatctaatcttcgtctccgatactgatattaccaaatttggtcgttaacaaaagtctattaaagaggaggaaatattaatttttgttaaggaggtaatattggcattggagtattgatctagtctagtctaggttacaaggacaaataagaaaatgtaagcaagattaataataaattaattaagagaagaaattagaatagtagagaggatacaggaagagagggaagagtgggtgattggtggagggaaggagacgggcggacgaacggagaccttatgctcgatctctgcctgcttctcccttctcgcgctctctctgcagcttgccgagagagagagagagagagagagagagagagaggtttgacccccaacaaccctcctcctccatatcatctcccgtcccgtcccgttggttgctactactacttactcacttcctcctccttctagtaaagggaggagcaggtacacgggggttgagatctgaggagggaggagaggaggttcgtgatgatggagagccaggcgctgcaggaccccgtcgccgagccccatggagctgagcctgccgccgccggagctcctcccgccgtggtcagcctcagccttgttgcttcaccgtttccatttcacctacctccacctgccttatctggatcttatcttgctcaaacttgctcctatacttacatagtagtagatccagatctcatctcatgcctcaattcaattctttgtttctgggatctcatctcaatgcttgcttgctgcgttgaccatcagatctcaatgtcatcttgctgctgcaggttcccggcaaggagttcacccgcacctgcaagggcctcgtcgtcgtcctcgtcggcggatatgtgctgctccagctcctcccctcctccctcgactacctcgccatcatccccgccaagtatctttctttctttctttctttctttctcctttcgcatgcatatgcaccacacccaccacatccatgctgcacgtgctcccttcccttctctctcgatgcatatcacaccgacacacctattctaccaactacgcgattgcaattacaagcaacactgacatcaatttttaatgatacatactgcactttcaacaaccacgcaacattgctgctgctcccaactcccaagcaccattttttattcactctgttatgctcgatttaattctctagttaaatgccccctttgctttcaccttgcaggactattccatttgtatggactgtcttcacagctggctacatcgaacaagttcttccaggggtcagctcattttctcctcactcacattctttttttttatatagtggatttcaattacacaccataccggctcagaggttacaaatactttctgaggtctcaatttgttatcctagttacaagctgaggttgaatctttcaaagtatttaaactgatgcaatgctttgtaaacaaatactttgatgaaaagtatttcacagagacatactttcaaaacaatgaaaagcgatgcaatgccataaattttgtacctttttgctgtttagtgtttactcttgattattattatttttccttaggctatcggcagttcccttggtcttctcttctgtgggaaggatatcgaaccagtgtggggccgcaaagaattcttgaagtttatcatcttggtcaactccatctgcggtgtccttgcattctgctttgctgttgcactctactatgtcactggaaaggagagcttcctgtaagtttctaaccatcaatcaattaacttttacatagctattatactactacagattatatttctactatgtcattgaaataatattcattcttgcttcctgcgtattaccttttcatatgaatattcagttagtttcttcaaaagcaatgaatatttagttcatgcaaacttctacacattagctcgctggataacaatatcataccattacttctatacgtgataataaatatttttatttcggcatattgtggttactgttggttatgtttgcataatgtaattcatgtcaacaccttacataatgctttcttggttagtaacattactgactgaaaattgtgcattgtactcactagctgatcttgattgttgtgcagtgttacaccactttctggtttccatggtgcccttgctggctttcttgttggcctgaaacaacttttaccaaaccttgagctccccatgtgctttttctggaaaataaaggctaaggtatgctgatgaactactataaaatacaatttctgagcatgtagtgtgctaataaatacttcttccacaacaagttacatagcttctctcctttttcccttgctattgcagtggatgccattcttcgtgctatgcttctcaactatcatggccttcattgtacctgattccattaacttccttccaactctgctatcggggatgtatgtcagctggatttacctgagatacttccagaggaacccactgacagggcttaagggtgattcaagtgatgacttctccttccccagcttgttcccggatgccatgcggtaatttttttaatcgcgatactgcattagtgcattggcaaagatcgtcacaattaatcccacatctgatatgccattcttgtgatccttgcaggccagtcacagaccctgttgctaacctctttgatcggatgctgtgtgcaaggtctagaccttctgaactggccctcccagtctcagatcctgcaaaggcatcgagaagaaggtaactctgtcgtgtcttggcatgcctgtaggcgtacctatcaactagtacactggtagttctgattagaatgtggcacataagtatgaaattaattgtttgaaaatctgcaaaccttggcttttgataaatcttttatcaatttaattagagctcagcgaatctatttttattgttccagggagcgtggcgaaagggttcttgaggaaaggttggctgcagaccatgcagcagacacggaagccccagctctgggccattccacagcagaagattaatatagctcgtccactgtcaacacaccatactgcgataggagccacggccacctgcctatgtgctttgtaacaccgaaaatttgtgttctggagaatgcaattcagtttacaatggaccaatgatatgatattttactctcttttcttattatttattggttaaattctgttgtagttgattacagtgaaaaaagaaagaaaaggatgacatccccatccagatgtaatgtagaaagaattgagactttgtgaggattgctgttgagaatattttccaagtgaactgtgactttgagtcaataatagggttcatatcagcaagggacgcccatatcggctatcaatttgtttgtagaagcagaattattgggttttgaactattggtgctaactaaaggatagatgcttgtactgcaggtgtcatctatgctccttcaaaagacttggcactgcaaatgggcaaaggtgtcatctatgctccttcaaaagacttggtagcggtgagaagtatatccataaaaccataggttagaaagcattcacgaatgtcaaacatagagataggagttccaagtatttcaacatatcagtgctctcttcgttctaaaataaactaacttctatatatgaatttgaacataaaatttctatctatgaatttgaacataggctctattcagattcatgtataaaagtttgattttttttaaacggaaggtgtacatgactaatgctctattatcaagaaaaatgtgggttaaaataggaagaaaccaaaatcttatccgtatcctatgcaacatacaatttgtgtgtatatgcttctctggtattcaaatagcttccagaaagacatgcgagtgagttggtttgtactcctttttttaacttatgtaatattatcacagagcatcaggtaaaattgtgtcatagcatgtaatcaagggtttgtgccaataagacttagggctcatttcgaacgcatgaatgcaaaaccacatgaataagaaaaacataagaaactaattaataggtaatgtaagtgtaaaataaaggatcgaaaaattgagaaaaaaaatgagatgtagtgcttggaacatgtgatagagtaaaacacatgatttttgctaactatgcataacgtatattttcttgttcgtaaatttgtgtttaaactatgtttatttggaggtgtatacattgatttgtgttggatatctcaaaagaaaaaaaaacaagtcctagtgaatgtcaaaattcctatggatttccaatgaaatcaatggtataggaagatttcctctaatatcatattcccgttccttcattacaagtgaggacttcaaatcctctaattttccctagaaccgttcaattcaaaggagtccttgaagatgcaaaatatgtcgatgtgcaaaataaaacttcgtagatgaaatctctgacaaaaggtaggtgctattgcctataggtaggggtgaaaacagtatggaaactttccggattccggacctattttcgaaaatgaaatttgtcggtcggaattttttggaaacgaaaatgaatttggaaatattttctcagaaacggaatcaaaaatgatatagtcagtttccgtcggaactcggaatcggtcggaaactttccgaaaaatttctcggaatttccggaaattttgtaactaaaataccctggattttttaagcactgaatagtgaataccatggtgtttagctgttattttttaaaaatatttgttatgcaaatctgaagttacataagaatatttgtttcctgcattgggatttatcaacaacattactctcttaaatatagataatttattccatagattgtgttttgtgatgtaccgttgagacttaacaattggacttatatatgttttatgatgaattgttgaccattgagaattgagaattggatttatccgtttgaggggtttttatattccaataaattttcgttaccgtattcgcgccggttcatcttcgctccgtttgcggtttcgataatattcgattctgtttttgtatgtggggtttccgatttcgaaaataatatgaaaacggaaatgataaagatgctttccgtaccagtttcaccctacctatgggtcaagtaacagagccataatataggtataataagcccgagccagcaggctataggttattccacgctagcaaaattctatgtgaataagggagaagagaagaaaaagaagaaagtgggtgctagatgtgtcgtgggatgatagtaaagaaacaaggttctatcgctcacttgcagctgttaggagtgatacataatgtatttggtaggcttctaacatttctccacggacaagtgtgcatatatgtttgtttttttcctatctaacacgctaaagcatcggcaacacaaatagctacggttagtttagatcatggtaatttggttattcatgcatgaattgagtgattgattatctccaactagtaatcgtgcacgtgcaatgcacgtttcccacaatatatacataagtgtactcaaagtttaatgcattgattttccaatgatatgtatatcacacagcgcatacaaagtacgaaaagcataaaaaattgtctcaaaatagtactctagtaaataacatttacatgttcaacagtaagtgtatatcttctatcgtgtgaccagtagaagtttatatgatatgcaaaccatagaggtttatatctcagttactttcaagacattaattgtctcgtaatagtactctagtaaattgttatcggaacagtactcggcgtagttgccttaagtgaaaagaaggagatgtcgagtgtgaacatgttggaaacaccttaaaaattgaaacgacaactatgtatttgtggtatggacttacagggtatcccgtgaacatgtccaaattatattagttgagcactggaagggatttcacactgcacatgtccatcatcctagcagttgcagcccctccaaacgaaagaaaataattcaataaggaaaataagaacttgatgtctcatggagctacagccatttatctcaccaataaagttcagatccatttttttcttaaaaatctttttacagaacaattaagctaatgaagcaacgaattcatggtttgaaactgatatagctgagtgcatacaacttacgactcacaacattaatgcatcaagaaaatagtcagtagggcgcacgtgaaatccatgtagccaataaaatgagtaaaaaagaaaatagtcaaatctcatgcactgtttcacatttgttttcagatttattattacttattcagaagggtttatacaaagcaaaattatgttgggcacaattcttttgcatccttagtctgcaaaaataatgaagaatctgagctcctcttattatcaattggtgtatctgagctcctcttatcatcaattggtgtgcccaatattttggaagccaatttgatgaactgaatagaagcttcttaaacatgcccccacacacttatcttgtcgatagaacagaagaccaaatttctggagcatcctaatcactaaagagaattttggatggtcaaaaactgataatgcatcatctatctcgatcaaaccgagtcaacatatgactaattacttgaagaagctcaatcaagcaagtaaactaaataatgaatcaagaaacattggaaaaacatatatatacaaatgtaccatgttattatcactggtcatccactcattgaacgtgagaaactaagttgcatgggaccggcggcgctggtctagcggtgcaagggcagccccgggtagggctccggcggaagggggaaccaccacggcgtctgtaggggcacgatgcggtggcgtgcggcgtggagtcgcgaggaggcacggcagcgagtgaggtggtccgacgatggatgcatgaccagggtttgatctatcggaaagagaaaaaatttcgggggtcagcggatttttttcggaaatttcgtacgaaattttcaagcaaaattggggaaaattgacctacacctcaatggaacacagggcttggactgccgttgtcgtcgatgcaatgcgccggcgagtgcatccgccgctgttcaagccaacgggcggtagagccgctgctgtctttgtgagaggaagagcgaggaggcgacggggattggtgtggcgttgtcatcgcgcgctcgggggcggattcatctctctctcttgatggctggatctgacacggacatatattaaacttgttgttgttgatgggacgagcaaggcccacataagggttaattgggccgaagaaaggcgtcgggtgttaagggcagccgagctgattcgtatcgggttttagggttttcttcctcttctcttgcatcctcccatctcctctccggcggcggcggcgtcttgtgcgcgtgagaaagagaggagaagaagatggcgacgatcgtgaacacgacggaggaggagccgatgctggccgtggtgcgcttcaccgccgagctggcctgggcggacgccggcgccgacgtcgccgagccggaggtcacccgtctctgcgtcgaggcgcagcagcacatcctcgccgcccgctggctcgacatggcctccctcatgctcgcctccgccgacctcctcctccaatccacgcgcctccccgacaaggacaaaggttcttcccttccctctctctctcccctattgaatttgagaggctcatgttgctgctgctcatcctttccaattctagatctcgagtgcatcctcgctatcatctgcaacctcgtcaccaaggcccgatcccaagacgaggccctgcagatcgccgaactcatctgcgccaagctcacccaccagccccaagacaaaccggccctgcgcctcaaagtgtaagcctcacactctctctttttttttaaaaaaataaataaataatatatatatacattattttctagtattggatttgtcacaatgctttgcttccattgtatgcgccccacacaaggcagtctcttcagcttgtacaatctgctcgggagcccctatgccaaggccttcgtctacaagaaggcactcgacctcgccgccgctgggaaggctgccgactgcattatccctacttttaagaacatcgacagcttcatcagcgattggggcattggcaaggtggagcagagggacctgttcctcgctgccgctaggatcctcaaggaccagaaagggtgcgccttgcattgctttcttccattactttcctgacattgcagcattttgtattgaggtgatctcatgccctttcttgattgacaacagcatgaacaaggagtacttcaactttctgaataagtaccttgccaccttcgatggatcggccgatgacgctgatgcaatcggtgatgcaaaggaagaagctgttgcagcaatcattgagtttgtcaagtcatctgatctctatcaggtaattctttacttgagagttcacatctctgttgccaagtctaggatttgtttaggcgtaacgacacaatttgctccctgttggatggacattattaaaatgaacaaaggattaagatgagccccactgtgtccatatcagaacttcaatgtattatggcgattctcacatcagatcaacagatgtcgaattgggtcatatagtgttgaattcggctgttaaactgccaatacgacttttttcattttgtgaacaaggacaagttattcgctaacatttgaaacctagtatgtacttgtgctctcatctcttagtatgtctactaccctgaaactgatttaggaagttatcatatattcatgtttataaacttgttctttacttgccattttaccaactattgccagtaatccagttgcaaccaacaatgggttattgggtatggacatgtctcttgtatgttacagtccctggtctttatcaatttcaatcttgacaagctatatgtatagtttaagggcacacttcaatgcagtggatcatgcaattatgtgtcattgcagtgtgatctactcaatatgccagcagttgcacagctggaaaaagacgaaaagtatcagctggtttatgagctcttgaagatattccttactcagaggcttgattcctatttagagtttcagtcagctaattctgccttgctgaaaggttatggtatgtacaactgctgaattgaaaacattaaatgtctttacttggagcaaatatggaaaatgtgatgcttcgtttacaggatttctaatgataaacaattggcaggactggttcatgaggattgcataacaaaaatgagactgatgtccctgcttgacctcagcagccgttgtgctggggagatcccttaccatgcaatcatagatgcacttaaggtgaattagctgttcaatcctgccattgtgttactgttcacctgtcgaagaatttatattgaccatgtaaaacatttattagatcaatgatgatgaagtggagtattggattgtgaaagctatttcatgcaagatattggattgcaaagttgaccagcttaaccaggttatcattgtcaggtattcgcatctgtaggaccttttgacttacctttattttggttttgctttaacatttgtggtccatattaaggtgctatatatgtatatattctttggttaatgagtgatctggtatgtaattttcagtcggcatactgagaggatatttgggatgccacagtggcagagtttacgttcaaagcttggagtttggagggtaagccacttgacgatatctcacctttaatttgtcattttgattagctcaactgcatagtttagttaaaaaaaatctcttcttttttggttctgtatgttggttgcatatcactgggctgaagtctttaagcatttagcatggatttgattcagttgtctatgaaaattctgctgcagggaaacattgctagtgctattaacacaatacaagcaaacaaggtgactgatgatggatcacaggggatccaaggcttgatgatccgttgatggagaggggttcctgaattgaaattatagtttcaactttgagtagatgagcaatccttttgtatgagattacttgtaatgtgaattactttgatcccatgaccttgtggctggatctggattgctatggcatgctaagcaatctcattgtttttgtagtcatagcggtgcttaaaagtcggttgttacacaagtaccaatcagtcgattactaaagagttccaacagaatggcagatctattgtggcaattttccttcataacggattgatgagttaatgtattattgtttagaacatctggtgcgatttttcataacaattatgacagtcatagaacgtcttgttcaagaatactgaatcaagttatcataaatgaaagcctgtcaacaatatatagaccttagagtagatatctaactgtttagaatgttggaatttccattttctttgatatcttttgcttatttgtacgctgtgatggttattttggtagccttcagatctcagtgccctctgttctgtatatcacgtagtataggaacccattttgtttgtatcatcctatctgaagaaaatctcagcccatgaagatgaaaggtgcatccatattgatgttatttttttaattataccattatttagtaaaattaacaaatacatgatggcatttactttgttatcagatattgatcatgtgtaaaaaatttggcaacatcacatttagtctaccgggcctcatcttttcacttatgcttatcagtcaaaatttaaattttcaacctgacttattccacgaataaacgagacaatgctgtcagcttgccaaaattttggtaatgccaaattttggaaaggtccatttaggcagtaatctgcacaggccagaagaaagaatgctattaaattaaatatcctgaaacatgtattgccgtttggcttttgaacccaaaaaaatgaatacaaattgctacaacatgaacatatacacggcaaagagaaggtttttggattggatttggatagaggccgtccaagcaattatgaatcctacaaaattatgaagcaacagctgaagaagtcttccctttccgagagatgctctccaaagtataaatgtctctgcacacttgccaaggcctaatttctacagtatatgcctgaaacaatataagtaacatatattattagccttcaaattggcagggcagacgtcgtaagttcattgctattgttatatgatgcaaacttgcaataggcagtagtgatgaatataaaacaaattcaccaatttatagaaatcagctgctcttcatttacaatcattcagcaagaattaaattcacaaccatgtttctaactattcaacatagaaaagccaacacaaattgtagaaaggttccaaaatggtagtaactcattcctgaattcctttacccttttccccaaaagaaaagaaaactgagtcaaatacacaaatgaaaagcatgtgcggtataaaaataaaggctcctgactatgaaaagaaaaggtatagcaaccgaacgctaactataccaaccatactccaatccaatcaaccaaggagtcactaaggatggatcaaaattcaaaacgagtcacaatcagaagcgcaatgattaatatggtgagccctatgatagcacaattaatctgatattttagcataaatgccacgggaacacaacagataagacagagggaaccaaataatggggcttttaaaaaaaaaaagggaaccaaataaccgttttgatgtatagcacttgcgtcaatttgaagaattcataaatgagaaaaaaaaactagaatagacaagatgtagagagcaaaatcagagtccacaaagaactcaaaaaaattaatagaagaacaaacctgtcaaaggagttagcactttggtgaacatagctggtgatactattttagagggataattacatccagatctgtagcaacccgccatcctttaggatagacaacactttcagatccgaatggcacatgccagttcattatttgagagcagtcagcaggtatgccttccatctggctttcatcctccactagctgctctacaaacgcgcttccctgcaaagtaacaaccatctcatctcagctgttacactacatgcagaaaggcatcgcaaacaaaatccaagaaggggggggggggggtacaagaaaaggtcacagtattgcatttggtgataaccatgtgtttgaaagctacagagaagtatttttcagcattattcgtacacttcttttgcccttctctgaatatctgtggttcgtgtagtagttggcaagagacaacatgatgatcaattaactagtaattagcatgttgatagcatcagcagcttcttcatcagataaacttggctctacacagcaatgagaacctgcaggcacctacctacctatcttggtggactgaaaaaaatggagaaacaacttacttggagactttctttcaccatttctggatgcctgatcgaattccatgccaaatgggacctgagcttgggatcccagagcatggtgctgttgaatgcgaaaccggacatggcaagatgaaatctgcgcagcttgttcccgtcgtgggttgtgtgccatcccacaacctggccctgtttacatacagggccttggagaaccacctcgtttgtgtgttgagagatttctggaacaggccatgtggcaaacctcctgatgatggtacacagaagcacaaattaagctagtagttagtactactaacttgattataattcggtatcgaattttgagcagtaacacatatttgaatgcatcccgacactagtaagtactagtccacacaggtggtgtccttgggggaaagagccttcttcagtcatactatgtactagtagcaatagataaaagtatggatgttgaacccgattcatggcgctgtgtagtgtatatgagcaaaacttgcaaattattaatacgaatgggcatgaaaatagaaattgggtatgaaatcagggacaatataagattgcagggggtacctgatttggcggaggtggtggaagaggtggagggagtagacgccctcctcgtcggcgaagtagaggacgccgtcgaggcggtggttgtcgacgatgtcgagggcggcgttgatctggtgggggcggaagtcaggggcggaggcattgatgttgtggcagcatccgacatagcggtgcaagacagcggtgcggcggagggcggcggcggcttccggggtggggttgccggcctggacgacgatccagaggaggggtgagtcgtggaggaggcggagggtgtgggccatcctggtgaggtagtaggcctgggaggggcgggcgcgcgtgggggtgacgacgatgagcagcttgtggttgctgtggggggtggatggcgggtgcgggtgttggaggatggggaatggatcgcggtggcggtggtgggaattaggattggggatggggcccaggggtcgggggagatgggagaggaagtggaggaggccgaggaaggagccgaggaggaagaaggcggcgaagcgagggagcgggcggcggaaggaggtgtgcccagcagcagcaagcagatggtggtggtgatgagccgctgatctgggagaagacgaagacgaggagtggcggagcggcgaggatggcggggaggaagaggcgaaggggccgaggtgtccgtggcggagaaggtgctgctgctttgccggtgagtgcggccgccggatcgacgccattagccttccttggcttattatatacgagtagtagtagtatgttgatcggagctccagtccagtccagatctatatatcctcgctcgatctccactccagtagaatcgatcgatgcgcgcgggcggtggcagcctcaatctcaatctctctcaagggaggggatggaagaaaaaaaaaaggaggatgagtttggctgtgtgtctgtgctgggaaattgccgaattggaatgagatcgaatacaagaggatcggaagaatccaatcacggcgcgaatggcggggagatgatgctgttgaagttagccagcccaggcccagctgatggatggatgaagcgaagaacagcgcaaggaaaggaaggctacctgcccctcctcgtgcctgctgtggacacccaaaataattaacgttaactactcctgctcctgctgccgttagtttaaaactcacttttaacgacgcttctcttcgactacgacgcgtactagacttgtactcctctcctactcctaattgggtcaaacgctgacccacggttttgggtgggtcaagcctttcagacccaattcagtactggagtagtactgtacgccaaaaccaacaactctgcttccctccctccctcctctaggggggatttataattatgacactgcaaatattaatctttactataatgatattgaacccacattttatagacacggatgggcccatttgtcatccacacggagtgtcaaaacagcgaagccaccatgtttgcagtcctaatattgcaattttctcctcctctcttccaccgccatcaccacgcggcggaacccaacccaacgcattattattattcccttcccatcccccacccacacacactaggggcccctttgaatcaaaggatttatgtagtattttcataggattcaaatcctataggaaattttcctatttgtccatttgattcaaaggattgaagctttccaaattccatgaaattcctatggaatagcacattgtatgtggattttggaggaaatatagcaagagctccaacctcttgaaaaatttcctttgagtctatctctctcatccgattcctgtgtttttcctgcgttccaatcaaacgaccattcctgtggtttttctgtgttttgcaatcctctgtattaaacttcaattcctatcaaaatcgtatgtttttgctattcctccatttttttaattccgtgatttaaaggggccctaatttcctcctgaatcaatgcttctaacatactcccct

SEQ ID NO: 26362 - DNA, 10863 bp, Oryza sativa
actattaagaattaatgtgtcgcacaagtcctcaatagctcctcctatccctaataatcctctctccccttcctaaaaaaatccctaatagtctctcctccctacaaatatttttttgcttccatccaaacagctcctcaggatctcactctcggcccgagctccatctgaaggacggcaacccaagctctactcctatgaacttgggcactgtaagatggtcgctagccgctcctcaagggggtcgagcaccacaaaacgctaccacatctcattatcgagctctaccccaaggtcctccaccaccacctctccttgttgagctcgccagtgtgagtaagccgagggcgtgggaagaaagggagggatgaagtacgttgaatccaccttttatcagggaattgcaaacaactccaataatactaaaagtggtattgggtagctccaaaccactttggtggtgggatattgggggactatatattggagatgctcggaaaatattattcattctcgtattttctatacttgttactttaccctaaaataaattttaatcagttgcattgaaattacattatcttttccataaatgcgttaccaaatagagaatgtgttttaatcgatctagaaatttgcaagttcaaatataactgtgaattcatgttaactaattttagtttaattttttattatacaatttgtaccagttgaatttaatcttgcatgtttgtgaagtgatatgtcttacattaatctatcttgttattttttttaatatttttataactatttaggtgacatataggaaacgagggaatgtctcctcaaggacgaaaatccatctcctaccaaattagctgggatccctagctagggatgaaaatggagcagatagtatccgtccacttcgaaaaaaaaacggatacgaataccgttcagagcgaacaattctcggatagtccggataaagatacaaatatggatatttgatgaaaggtactattaggatatccgctgaagccatgacacgtacctcatttctatataactctagatcttcaagctaactctttaaatattaatagtagcccatctcacaacaccagtctatactagtaatattatttaaacatttaattttttaattatattatattttgtattataatattagttagacgtgtatttatatgaacactcttgtacatgttaaacttgattagaagcttatgaccaaatttattatataaaaagggctaattatatacctccaccattttctaatatatgataccacgtcttattcaaaaaaaattatacaaatataaaaaaattaaatcattcttgaaaaacatttgacgataaatcaagtcacaataaaataaaaataattacatattttttaataagataaatggttaaactaacatatcttaaaaggtaacggcgtcatcctatcttactataaagttatccactaacttcagaagctcaacatgcaagtgtgccatatcgtcacccactagcaattattatctagagtattttaaatatcatacaaacataacatatcatttgtaattttattgtatttgtagaactcaatatgcaagcaaagttaaatcattattttcatattatttaaacatatacatctgccatttctataatatataacatgtattcatccacatatatatcctacaataaagtgggaggtatcaactaatatattaaaaaaatgatggagtgtgttggtatttgtttatattaaaagttggggtggttttcgtgttccagaaaatatttatgtccgtatttgtgtccagtataattcgtatttgttttcatatccaaatcattcgtatatgttttcatacccaaagaaaaagagaatgtgggacgaccattatccgtatgtatccattccattttcatccctatcttttgcagtttctagatttactgcaactttggtaacagtcactaaagtgaccgttggacaaaaaaggaagacgtagatcctccaaacttactgttcatcagatgctgtagcggtcctagaactggacagagccgctgtagtctctaccgttgattcattgaattgatcctgtggtgacttgcagtctatacagtgatcgcacgcaattctttggttagtccgagtatgcgtcgtggacaggacaattctttggttctcccagcctggccatgccatgacatcacggcaactcgccatggcataattaaacagcacggcaactcgccaagcaaccaaattacagtatagttgcatcccggccgcgtacgtgtatacctttcctctcccctgcccctgctgcttgctgcactctagtactcttagtactaaactaatttcattttccaaatttagaaaaatatataggagactgacgaaaagagaaaataaatggtcttcggattataagtaggcctcgttttcaattcttaatttcttgtcgagttttttttctaaaaaaaatagtaacatagaagaacgatcagtacacaattacacatgcatatagtacaaagttacaagtagtaattgagattttcaatacaggaggcgatgcaagttgcaactccactctctgttgtgtttgaattgactactggtagtggtactcttatacggaagcaaaacctgaaccgaactgcagtggcatcgcatcgcgcaacgcacagcacagcacagcacatgaataaagattaccagtgatgttctccagtactcgatccgttctataaaagattacaagtgatgtgacacatcctagtgttataaatttgaacggatataaatttgttgtactaaaatatgtcacatacagttttagattttttttcagagagaatacacaatatattattcagtactactagtactacctccttgcaaacttgttggttagttcaatattgagctaaccaatattgagttaacaaatgtcaaaaaaaatataaagggagtatatgcctagctagctagtagcagtataagttactcccctcatttctataaggcataactattttttttcatgttacataatataaggcatgcatgcatgcatataattaattagaacctcttctctattaaattattacttttttaaatcctcaactctcaagatctctaattctattggatacatgcattatatttattagggtgattcaaactagaagatgataataattatttcttggtatttaggttaagggtggttgtgtattatattttggaacgaagggagtactatcctcccaagccattaattgttagaggtccttaatttggaacaaagggttataaaagaattcaatcctataagaatttttcatatggtccgttggagcttggatcaaattaaggaatagctatagaaaaatcatacgaaattcctttggattggtccaaagggattttagagtaattttaacgtaaggtcaaaccaattgggaaatatcctttatatcttccttttgtattcatatatttttcttgcgctcgatttgaatagtcatttttacgttttttatgtgtgctttaaatccataggatttgagataagtggacacttaagatctacatatttcatgattccgaattataaaaatcctacgttccaaatgagcctttatatttcttttgcaaggataatccaattgatatacaataatccagctgaaatgcgtcacttgtgcaagaacaggatgaatgagaaagaaaacattgatgtataaaacatataagcacattgaaaattaaagttgcgcgtagtatagtacgtaaatttaaaatcggttgtggctcataataatatagcccgtcaaacaagcaggtcggccctttggaatttcgtacttcatgcgtttggccgtgttcggttgttttggcgaaaaaaaaatgacacatacggagacacatttaaatattaaacgtagactaataacaaaacaaattacagatttcacctgtaaactgcgagacaaatctattaagcctaattaatccgccgttaacaaatgtttactgtagtaccacattgtcaaatcataacgtaattaggctcaaaagattcgtctcgcaatttacatgcaaactgtgcaattggttttttcggttcatatttagtgcttcatatatgtgtccaaatatttaatgtgataaaaaaagtcagaagtttgaaacatttaatgtgataaaaaaagtcagaagtttgaagaaaaataaaggcaaccaaattgtccttaattaatgcaaggatgatcaacgacgacgttacgtcgtagcttttcatgaatttgtttgcttggactgcaaacgaaaaaatgttcaacactttttcggtttgagttgacagcagttgacaaggatgtataatttggtgcatagcttcctggtcctattacaaccgaattttgccaactttttcatcatctctttttttctttcacattaattcatacaaaaagtcagtgaaaatttggtaccacatgtataatgcttattatattatatgcggcgctgtcacacaacgtacaacgtacgcagacaggctacgacgggtactacgtaaaaaagacaagaacacgcgatcgatgacacacactggttcctgcatactatgcacacagtacagtatggtggaaggctatgagcccacttgctaattggctgaatagaatggcttaccaaagcccaacccggcccacacgttccaactagtcggattgctacttttttggactttttgagcttttcttttttcctttttttttgtttgggcaaagcttcaatggacgccatgaaagctcgagactcaagggatgtaacgcaggggcgcagatctgtactccctccgttcaaaaaaaatcctaatacaaaatgtgatttaaaatgtgttatatcttgtactaggttatatttttatgaaatggacaaagtgaatccattgtaattgcatcaaaagtactgcaaacagttcccactggtagtgtagagaggtactgaattcattcttatatcgataattgatgataaaagagtattataacttaggtgtaaccattctcacctttcgtactagccttaactcccaagaactacacaggtcagggtgttaatataatcctaagatataaacaaaatatataatttttctgatagggggccactagtactttttatcttgggcttcttctggaaatctctgctaatattactactcaaggctcaaagttgagtagagcggtgggaccaacgatctgttcaagggcaacatcataatgctaattgcggaaaattacagatctagattacagcccagcccagtcgcatgcaaccaagaggtggcgaagcctgaaaacactagtgatgccacgttactcaaagctacaggaatgaagcaacgtgttgcatacgggctagtagatccataactttgccaccaaatgagaacgacggtggctctaacgtgatatggcttgggccacctggttcaagatcgagcatgtggcgagaaaagcaaagacccagctatcccgagcccctttgaccagggtgcttggggcatagtgtcagggttatggataccacatacctaatagtagttgactaaatctcggcagggctcaccacgtaccatgtcctatacggaaacaatctgcggatataggaggagtaccggataaggaaagacagccagagttctacatagaaacgataaggactactcggattgtatccatataggtttccctagttctacttggacaagaggacacttataggtataaatacaagaccccctagaagaagaggggacacgaccacctcaatcaacacctaacacaatcgacatagaagccacaacacagaagcctacatacgccaagacacgccgccggatatcgacttcagggataagcacggctagtaccctacggtgtctccggattctgtcaggagagacgaaagcgctatctctgatctcgccgagcagggattcgaggaggaaggctatcctgttgtcgactacgagtcagatcgtcagaccgccatgtcgacaatagttagataggctaccccaaatattgtactggtgtgattatcatgaataagagcaataccggcttcggccaacaggatgtagggttattacctgacaattcaggggcccgaacctgtataaaaatccctgtctccatctcttttacctcagtctcgcgtatatcctaataccaacgatccccataccatgcaaataccagaattgcgacatcaaacgtcgacagtggcgcgccaggtagggggattttggtgcttcaggatttagacgagatgggtttaagagatggattctccaacaacaagctactcgacgacttcggctgtggggagatccaacaggctgtggggagatccaacatgtccaagtacatctttcgactagatcggaaccatcatcgtcatcgacaacttggtctatcgagatcaaccaagcctcaagcctcgtggcgtaccaaaagatgttagaccgtatgatgttgaacaagtacgcaacaaggtaattagtagattggttttttaaattgatctactaatttcgtagatacatccgacatgtatctaccaaggtacgcaatattttatctgcaatttatcgtacctatttagatcatacagcattgtcagatccatgatttattatgtttacctagagcatgttctttatacaatatttattgcgcgagtgtccccgatgttaaatcgactacggtctaacgctgggggctcgctctattttcttctgtataaatcatgcttgtttacggtttacataatgcctgatatttacatctgctcgttatatcctgataatgctagaagatccatgcagttttttaagtacatactcgatattatctgctatatgtcttgccttctagaaactatttttcaggaacaattgagcactcgagtaggttgtggtcaagtacaccgcattgtcgagaacgatctcgacaaatgcagagtcgtcgcgcccaacctaccaacgaagaccgatgacctatctcatagccccggccatggctggactactcaagaaaaggttgttaacggataattcctcgcgaacatcatcggcttgatcacccgacatgattgcgaacggacatccggatatgctacaagttgggtgtgtgagtcatgctggccacatgagacgcacatgtaataaaccaactctagcacctctattggtgtttgagagataattctacacgttcactggttctcgaaccagtgcgtagcaatctcttgcaccgccaccaccattggtgtccgagagataattctacacgttcgctggtcctggaaccagtatgtagtaatctctcgcaccgcaacctccattggtgtttgagagataattctactcgttcgctagtcctcgaaccagtatgtactaatctcccgcaccgccacctccattggtgtttgagagataattctacacgttcattggttctcgaaccagtacgtagcaatctctcgcaccgcagcttccattggtgttcgagagatgattctactcgctcgctggtcctcgaaccagtacgtagcaatctcttgcaccgcagcctctattggtgttcgagagatgattctactcgttcgctggtcctcgaaccagtacgtagtaatctctcgcaccgcaacctctattggtattcgagagataattctactcgttcgctggttctcgaaccagtatgtagcaatctctcacaccgcaacttccattggtattcgaagagataattctactcgctcgctggttcttgaaccagtacgtagcaatctctcacaccaacaaacctccattggtgtttgactactacctggtcctcgaccagaggtgtagcgattctcccattacctctacttcaacaaagttgatatcaggtgcacaataatgccaagtgttttacccagagatcccttacccagatgacacatagcgttgaaacctatcctaatgttcctttacgctgtcttgacaaggcctccgaggaacctaagggaacttcggctggggacgcccagagccgataaggccttgtcggatccttcagagacgaaagaccatgtaagatctggtcgtgtaagagttcttgccgtgcgtattaaccaagccatgtaatcggaaatggattttccaacttcacggctgggggctaggatcagtgcttgttcaaccgaggcaggtcaaaggtccaagagccttatcttccgaaaacgattctctgatgacaaggctgggggctagggagagtgtataactcaacaaactgactgatcgaagtcggtaaaagagtagatgctcatatacaaaacattggtctgcaagtttaattcatttttggttttccatacatattataacatgttaccctttgagcgttcgctcgggggctatttctatctaatattcttttctgagtattgatttcaggaaaattctattcgacattatcgaacactccatgtctctatggttctacaccaagatcgactaaggcgagtacgacaaatattgacaaggctccttcgcagactctacgcctactcgattactcgagaacggttggtggatctcgacaaggaatacggaatgaagagatggtgtacccaccgagataaaatttcttgacttcaatctaaattctcgattacagcaagacgggagacttagtcgtatgctctgttctttcttggttgacatcggagatcagacaaaccctataggtgcccgcacgaggctgataagggaagtctaaacgttatctctgaactcaccgagaacggtcacatgagctcgataatagttactccaaggtctgcgcgtggttgagaatatgaattcgttcatttgcattgaagtcgggggctactgtcagggttatggataccacatacctaatagtagttgactactctcacactctctaatgtttgtgttcatccatttagtgtgattgagggttgattagctaggagtcacgtgcattgcttcattgtagagctagtgtggcacttgatcatctccgagccaggtcatcacttgttactcttggaggttgctgtctcctagacaatttgtggaggtgttgccggtgacctctccaaggagattatggagaaggcccggcgccggttgtgagtggtttagagttcaccacctttggagtgaaggaagaactacccctagtgatcaaggcttgggtagtccacttcgtggccggctcccacctttcccaccccttgatgaagggggcttgcggtggcttcgtggttttgagagttgaactagggcttgccttaacggggattaggaaaccggcgagtttccgaacctcgggtgaaaaattccttgtcttgtctcatttacttattgcattttcatttgtgcaatttactttcatatagacatatttgagcccatatcaccttaggattgcaaaacatcacttagttgcaatttactttcatagagacatatttgagtccatagcaccctaggattgcaaaacataacttattagttgcttaattaagtttatccctcaccaagcctagcaacttaggtaagttttgattaggtgtgttttaattttaatcgcctattcagcccccccccccaagtcgacttctcgatcttacataatgctagcacacaggagtagggtattatgcttccgagcggcctgaacctgtatatttgcttgttttctttgtttgagtgctcacacaatctgaaattgatccctactcacccctggccgaatctcgaaagggggtcttctcttccctgttgtaggagtaccgatctccgacagtgttaactcaaagaaaaaaaaaccatttacgcccttgctcatttgatcatacttctcaatggtttttgtttcaatataatcaatatcgacaagtgtttgatagtgataatctcataactattacatgagtaaaaagttctaattccaacaaaaattttcaccttcatcactcgtcgcacgcacgcctgctggtggatcccgctaccttcaaccgttctgccgcccgtcgcccgtagttctctcgtttggatcgaagaagagaagcaccagccgtcctcctcgttcggagcgagaaggagcggcatcatcgccaatcgtcctccttgttcaaattgaggagaagcaatgtcattgccatcgtcgtctccttgcccttactgtatgccggataatgccgtcgctgccgatgcatatagcttgtggatgggaggttgtgccgctgcagccaacatcctcgccgacccgccgctactagttccagagcttgcacgcctcgactctatcgaatccaccgcccgggcctcctcatcaccggatccgccctgccactcctccttctcatcgcctgcgcaacaagcctccatttgatccacctcaccactgctgctccttgtcactgagccaccaccattgctccttctccttgtcgcacgcaccaagccttcatctgatctgcctcgctgctgctccttctttcctcgagccgccgccacctcttctcttagtcgttgagccgtcaccagatccactgtcacgcccagaaattcacgaaccagaatttctaaactgaatgtgcattaaatccctatccaggaccagccagggtacacaaacgacaattgttgacatacagatccacgtcttacaaaaatagaaaagattacaaatgcagcggaaaaagataaaacgagctaaacttgg

SEQ ID NO: 26363 - DNA, 745 bp, Oryza sativa
cagtagttcatcacatgtatcggctaatactccgatactacgctatatcaggacattaaaacagatatagaatatgaagcaaaagcctaacacattcaaatacaccaatatcttggcataaagggcagtgaagcaaatagagataattatagttaaatcagatacgaccggctgaaactccgatgctattctaatcggcgtatatatatatatatatatatatatatatatatatatatacacacacgcacacataatagaaggattttgcaggtgagaagacaatgatcgacaagcgtcacgtgcacatgtcggacgagttcctgaggagcaacccttccgtggcggcgtacaactccccctctatcaacgtccgccagaatctcaccgatgtcactgtgccccagctgggcgctgccgccgcccggctcgccatcgccgactggggccggccggcgtgcgagatcacccacctggtgatgtgcaccaccgtcagcggatgcatgcccggcgccgacttcgaggtggtgaagctgctcggtctcccgctcaccaccaagcgctgcatgatgtaccacatcggctgccatggcggcggcaccgcgctgcgcctcgccaaggacctcgccgagaacaatccaggcggccgtgtgctggtggtctgctccgagggcgtctccatggtgttccgcgggccttgtgaatcgcacatgggcaacctggtagggcaggcgctgttcgggga

SEQ ID NO: 26364 - DNA, 886 bp, Oryza sativa
cgtctccttcctcccgcccggtttctctctctcccgtgcgaaccctagctcgctccctcctccaaatccgcttgattcaattggccaattccaaaattgattagggggttttaatccccattgattcctcttcaattccccccaatttcccccttgaatggcgcccccaattgtcaggaacggccgcgcttttcccggccaccaaccatggccgccggccgtgcttctcgtcgccgttccgccctctcccatgcccggctccctcccccatcctataaaatagaaccccctctttgcgttctaccgttttagtctcctcccgagctctcccgtggtccctagccacctccccgccgtcgtcccctctctcccgtgccgccggccgtcttcagccgcccctgccgccgcgttagcacgccggccggccgtgccgtcgcctcctccagcatcgcagccgcctcctcttcgccggcttgccctccgtttcccgcggagacccccggagctacgttcccgccgtcgcccttctctttccttcgcgccggctgcctccagccgcttctccctcctcgccggagcgtcatccggtcgcgccgtcgccgccagcagcgtcgcagctgcttcccctccaccggcgtcgcctccgtttcacgcggagaccaccggagacgcgtccccgccggcaaccagtggcattggtgccactgtactccctccagccggctgctgtccctcgtcggagcgtcggccgacgtcgccgtctccttcgtcgacgccgtggcatcgtctccttccccggccacaactcggtttcgccggaacaccgccgtgtcgccaccaacccctcgatccgcctcaccggagttgttcggccgcccgtccctcc

SEQ ID NO: 26365 - DNA, 8527 bp, Oryza sativa
cacaactctcggagtgaagagtacttagtgacaaaggtcaaaagatgactgataggtgatatcgaaaaagatgtttattaccaggcaaagaagtaggtcgaaaggtgattgataagagaaatctaaaaagaatacgtcagggctgaatgtgtaaaggaatactttgaatgctaaatgatgacaaacatggtatcctagtaatgacaagctagtgttgacgcatgacatgaagtggtaacttgtatgaggttgactccaaagatacgagttataagaagttctggaactgaagccccatcttccaatgccgcatcccagtcgaagtcagctagaggtacaaccagggaaaagtcaggtgaagagaagattccatctgcaacaggagatcgagccaagcagtccagagtggagaagttttgttaggcaagtttgttatagaagacggagcggaagaagttagacaagaagagaagaccgcccaacctatcttcttgctagcctcctcgaatctcggggacgagattcttgtaaggggggtggatttgtcacgtcctgataaattcatcccgaaattaaaaatcattctttaaaaggaataatagaattaattaaaattcgaaaagaaattggcaaacactaaaatacgtgcaagaaaaattcaaatgtggcccggagaatttttgttaaattctccttggtctaaaaggagccctcaaattttacttgaattttcagagcaccggaaatatttataaaacaacaacaacatttatcaaagttcaataaaaagaaaacctaaaaatccctcctcttcctcctttgggccaagcccagtccgaagtcctcctctcctccctcttttctctccctcctcctcttgggcccccttcccctcgggccacctccctcttccctctccctcccgggctgcctctctcttcccctcccctcccggcctgcccggcccaggccgcctctcactcctctcttcctgggccggccgccggcccaagccgccccagcccccgagccgctcccctcccgcacgtgccgcgcgcgtgcgcgcgctgacgccgccggccgaccgcgtggggcccccgcgccaggcgcgtcttcttcctcccgcccggctcctctcactcccgtggaaccctagctcgtttcctcctccaaatccgccccgaatccaaccgttccttccaaattaattagggggaattaatcccctttccctcctctctctttcccccttaatttcccctttgatggtgcccccaatcgccgggaacggccgcgccattcccggccgccttccattgccgccggccggcttttccgccgccgttccgacctcccccgtggccggctccctcttctctcatataaaatgggatccccgcactccgttctaccgtttaaccccatcccgagcctccccgtggtctctagccccatccccggccgcgccctccctctcccacgccgccggcgacctccagccgcctgtgccgcctcgcccgtgcgccggccggccgcgccgtcgccttctctagcatcgcagccgcctcctcttcgccggcctaccctccgtttcgcgcggtgaccgccggaggcgcactcccgccgtcggccttctcattcctccttgccggccacctccagccgcctctccctcctcaccggagcatcgtccggccgtgccgtcgcctccctcggctctgcaacaccgtccccttcaccggcctcaccgtctcctcgccggaaactcgccggaacggtgcccccgccggcaaccagtgacattggtgccactgtactccctccagccggctgctgttcatcgccggtgcgccgatcgacgccgccatctcctccttcgacaccgcggcatcgccttcttccccggcatcacctcctcctcgcccgaatttcaccggaacgccgtcgtctccgcgccggcctctccttcctcctcgtcggctcgtcaccccgctgcaccaccaccttcaccaacatcgcagcggcgtgttccacgcgtcccctcctccgctcagccgctgctgcctgccatcatcatttcatcgtcgtctccattcatcctcgccgatcgacgtcccatcggttgcccggctcgtcgtctcgcggcgccgcctccgtcatcgtcatcgtagcggcgtgttccacgtcgtcctcgtccccgtgcagctgctgctggctgcccctcgtcgccccctcgccggtcccggtcgtcgtcgtcgtcgtcgtcctctcgtcgttcccggtcgtcgtggcgttcgtccctccgtcgagccgttctcgtccgtcgtccgcgttcgtcaagcgagccgctgcagccccgtcctcgtctccgtcctcggccccgcgtcgtcaagcctcgtgccggccgcgtctcgcctttgtccaaggatcgccgccgaagtcgttccctcgccgttcgcctccgtcgtccccgagctgtcctcgccggtcccgttcgtcgttgtcgttcccacgcctcgtcgcgtggtggtaaggatccgtcctctcgcttccccgccctcgtccttccggtgtcgccccgtacccgttgtgcggtcgtcgaccccggtacccgtgtaccggtgtcggtagtcgttcacgtgtgcgggtggtgaccgggtagtgtccgtgttagtgtgcccgctcggtagccgcgtggtttccacgggtgcaggccgtgtggtgtctagtggagtccgtttgtcggccactcgcctcggttgacacacgggttccgcttccgtcgacccgtggaccgtctctgtgtactcggtctaccgtggtcctttaggttgacatgtggggtccgcatgtcaacggcgcagccctcctgtcttttccaggctagcgcttacacctgttttatagttgcaaagcttaattataataattcgcaaatctccatataacagcattaaacttcggatgatcatatcctggtcatacgagctccgaatcgacccgttcaagtctcttaatgtttgttataacctaaagaaccctgtgctttgtttttatgtattgttattgcttctttataggcttgtagctttgcttgtgtgcttcgcgtagcttctgtcgttccggaggttcccgaagcgtggttcgcggtcgtcgccgaaggatcggaagtccgttctctctgagcaaggcaagtcacatcatccttgaacatattgaatcccagtttgtaaaattatgttgatttaaattattgcattatcgctttatttaaattcccgcgttatcactgttttatttagccatgcctatttacctttgttatgaccatattattattgttattgttattattattaccttgttcaccctagattaaacaaaacctcaactagtggacactctactcgtggtatccctagtttaaatttaggtagatgcttcgctgattaattaggcaacattaggtggttttataactttagactttggggattctcatatcatttggacactatggaattgttggtttatggtggaattggacatacacctctcttcctctttcaaaacccctaaaacctgttttcggtggggtttgggtgcatgccagttatgggaagtagcaccccggccactataaggattaagctcgggcctctgttgcaaagcactaccgtacttccacatgtctaatgggtaaggcttagtttgtggctcagtctagtcataaacaaaagtacacggattggagatggatgaagtcgggcgtcgatggacattctccagggcaaatgaaggctacacgagctgcggcccggtagtcgagatgtcatacggcagagggttggtgccctgctgctaggggctcagttctgcctgcctgtcccgggtatcccggccgtaggtgggattgggttggtactcttgtctaaggctaggatgggttggaaactatgtcacgtcttccgtccgtataccgtggtggtatgtggcgcgtggttacacgtgaggaagatgtgtcttgtgggtaaagatgtacacctctgatcagagtaaatctattcgaatagccgagccctcggatatgggcaagccgagcaatgtacccaagtcagtgttctaattcttaaaatttgctcaaacaactaaaatgtggaatggttggcctgggttggcttgggacgagctggaacccaggtcgggttgccagttcggtctgaatcatcgtaggccttgggttaaggcaggttcgtgtgggttcacggccttgattaataatactgtgtagctctaggatcgtctttataaaatggctttgggcaactaagtgacttttaaatgctgtttactgcaaaactgaacccctatattattatccccttgtacccccttgcattaattatgcatctccggtgtgacttgctgagtactgtggttgtactcattcttgctcaatcttttcccccttcagtaagagaagctttggagaagaagtcttaggtggagtcctggcttataccccagttgagcgcctgtgaagatggagccgtaggcccgctagtccgctgctgtttatttttattgtcaggcctgaagcgcctttgtaataatgtaaatattatcgatgtaataaagatgtgtcttttatatcatgtttgtatggtgtaccccggcttttcctgggacggggattaatacactagcgttcgggaaaaggcaattttcccggtcgcgacagtccaggtgatcgacgacggccgacatttattagtaagaatttatctccagagtttagaaccatgttgatagagctattcaaagaattcagagattgcttcacttgggagtattatgagatgcctggactcagccgattgattgttgaatatcggctacttatcaaaccaggggttagaccacatcaacaacctccgagaagatgcaaagctgatatgcttgatcccgtaaaggctgaaatttaacgattatatgatgcttgttttattcgtccttgccgatatgctgagtgggtttctagtatagttcatgttatcaagaaaaacggcaagatcagggtatgtattgatttccgaaacctgaataaggctaccccgacagacgaatatccaatgccagtagcctatgagctagttgatgctgcctcgggacacaaaattttgagttttatggatggtaatgcgggatacaatcagacctttatggctgaagaagatatccataagacaacttttaggcgtcctggtgcaatcggctcgtttgagtgggttgtgatgactttcggcttgaagagtgcttgggctacatatcaaagagccatgaattatatatatcacgatctgatcggctggttagttcaggtctacattgatgatgtggttgtaaagtctaaagaggtagaagaccacatagccgatttaaggaaggtttttgagagaaccaggaaatatggcctaaagatgaacccgacaaagtgtgctttcggcatatcggctggccagtttttgggatttcttgttcacgataggggaatcgaggtaactcaaaggagtgttaatgcaatcaagaagattcagcctccgaagaacaagatagaactacaggagatgatcggcaagataaattttgttagaaggtttatttctaatttgtctggaagattagagccttttacaccattgttgagattgaatgccgatcaacagtttacttggggggtagagcaacaaaaagcgttggacgatattaaggaatatcttagctctcctccagttttgattcctccccagaagggggtaccttttcggttatatctgtcggccggtgagaagtcaatcggctcggtttgattcaggagcttgaagggaaagagagagttgtgttttatctaagtcgtcggctcttggatgcagaaactaggtattcccctgtggagaagttatgcttgtgcttatatttttcatgtacaaggttaaggcattatctatagtctaatgaatgcactgtcatatgcaaggccgatgttgtcaaatacatgctatcggccccgattttgaaaagaagggttggaaagtggatattttctttaactgagtttgatcttcggtatgagtcgggcgataaaggacaagctatagccgattttattgtagagcatcgtgatgattcaatcggctcggttgagatcgtaccgtggactttattctttgatgggtaagtgtgcactcatggttgtggcatcggcttggttattatttcccctgcgaattttgagtttgcttatactatcaaaccgtatgcaaccaataatcaagctgagtatgaagcagtgctcaaagggttacagttactcaaggaggttgaagccgatgctattgaaatcatgggggattctttgctagcaataagtcaattggcaggagaatatgagtgcaagaatgatacattaatggtttataatgagaagtgccaagaattgatgaaggaatttcggttggttatctttgaagcatgtatctcgagaacaaaatattgaagctaatgatttggcctagggggcatcggggtataagccgatgatcaaagatgttaaggtcgaggtcgcagcaataacagccgataattggaggtctgatgtgcatcaatatttacagaatccatctcaatcggcttctcggaaattaagatataaggcgttgaagtatactttattggatgatgagctctattatcggacgattgatggggtgttgcttaagtgtttgagtgccgatcaggctaaggttgcaatcggcgaagttcatgaagggatttatggtactcatcaatcgcctcataagatgaagtggttactttggcgttcagggtatttttggccgacaatgctggaagattatttcagatattacaaagggtgtcaagactgctagaaatttggagcaattcagcaagcaccggcgtcggctatgaatcctatcattaaaccatggggtattgatatgatcggaatgattaatcctccatcgagtaaaggagataagtttatattggtggcgaccgattatttcaccaaatgggtagaggcgattcccttgaagaaggttgattctggggatgcgatacattttattcaagaacatataatctatcgatttggtatccctcaaaccattacaaccgatcagggttcaatttttgtatccgatgagtttgttcagtttgccgacagcatgggtgtcaaattgttgaattcttcgccatattatgcacaagctaatgggcaagctgaggcatctaacaagagtttgaacaaactgattaaaagaaagatttctgattatcctcggcaacggcatactcggttggctgaagcgttgtggtcttatcggatggcttgtcatggatcgatccaagtccctccttataagcttgtttatggacatgaagctgttttgccatgcgaggttagaatcggctcaagcagaactgagctgcaagataatttaacagctgatgagtattgtaaccttatggccgatgaaagggaggacttggtttagtctagattaagagccctcgcaaaggttaccaaggataaagaacgggttgctcggcattacaacaagaaggtagtacctaaagatttttccgaaggtgaacttgtatggaagttgattttgccgattgggactcgggatagcaaattcggcatgtggtcgccgaattgggaaggaccattccaaattcataaagtggtgtctaaaggagcttacatgttgcaaggactcgatggagaggtttatggacgagcgctaaatggcaagtatttgaagaaatattacccaagtgtttgggttaatgcatgatcggctgatgttgttgatatatgatagccgatgtgtttacatcgccttgagatggctgatatggttatattgcccttagctgtttttcgtattgtaatcggctgtggtttgccgatgtacaatggccgatatggttatatcgcccttagatgtttttcatattgtaatcggttgtggtttgccgatgaataatggccgatgtgtttacatcgcccttagttgtttttgtaattttctcaatgcttttgacattataaaatcagggggcacatatatacaaaacaaatgaaaatttttgagcaaatttagaagttatattaattggcacagatgattgtcaagacagtaaagtactggagtatcttagccaattacaaaaatttctaagacctattatacaaagagtcactgagacaaatagtgctggatagccgatattgccctttgcctaatctgttctacttcttcaatggcttgggcgtcttgagcatcggttccagggatgattttcaaagacttggtcagctcagcaacattcttgatagccgattttaatcgtgacttctgttcttcaacggattttgggagatcggccagctttttatgttctatatccagctcggcattgcgttcttcaagct

SEQ ID NO: 26366 - DNA, 12263 bp, Oryza sativa
atttgagggaggtaaggagctagggttcacgggagagagaggaagtaggccgggcgggaggaggatgatgacccggcgcatgggacccacgcagggagtgcggtcagcgcgcgtgcggcgcgcgtgaggggtgtgcggctcgggagtctggggcggcttgggccggtaggcggcccaggcgggaggggaggaaaagggagtgggccgggaggggaaggggaggcccaagagaaggagggagagaaagagagggaggaagagaggacttgggccgcgggccgagggagagagaaagggaggactttgggccagacttggcccaaaggtggaagcaggattatttttaggttttctttttattgaactttgataaatgttgttgttgctttataaatattttcggtgctctgaaaattcaagtaaaatttgagggctccttttagaccaaggagaatttaacaaaaattctccgggccacatttgaatttttcttgcacgtattttagtgtttgccaatttcttttcgaattttaattaattctattattccttttagcgaatgatttttaatttcgggatgaatttatcaggacgtgacaacctatgtcaatttcttccaaatcatcagccgacacaaaaccctgtccttgcttgtcatcgagatcatctaatgtgtccttagtgtagacattcgaaccctccacgacgccctcaaaataatagcttgggttctccatcttcaattggctgtatctcagaatcggacacttttagaaaatctccatcccaaacttttccagataaacaatctagaccatccatctcccaaagagctaaatcggcactggcaacattgactgacctgtcggctggcacaatttcaatcttgtcgtcttgccactgaatcaagcattgatgcatagttgaaggaatacaataattggcatgaatccaatcccttccgagcaacaagctgtaagaacccttcccatcgatgacaaagaacgttgtagggatggttttgttgctgactgtcagctccacattcaaaacccctttggtttctgatggattgccgccaaagtccatgagcaccatgtttgtcttgatgagatctttggcatttctgcccagtttcctgaacgtggtgtaaggcatcaagtttactgcagccccaccatcgaccatcatcttggacatcggcttcccattaacgtaaccatctatatacaatggcttaagatgccgatgctctgtaccctctggcttctcgaaaactgcctgctccggtgataaaatcaacttagccgattcgtcttcaattttatcgacatcggcttgtttgatcccaatttcaacaggcaatgtgaaaaccatgttaaccgaagcagttacaacactttttcacttagccaaccttcttgcttcatcatccgtggcttcatcagctacaggaacttgattcttaacacgccactcctgcctcggctttgttttctttagccgatgattgatttcctgctgacttcctgaaagcgctccctgttcctcaatatttgaacccttctcttctgattctttgtaaagataccagaaggacaccattgagttttcctgttttcattgtcctcctggccacgaccttggtttactggacccaatctttgatgaacaggaaccattgtctgccttagccgattgcccctgctatacaatcggcttgagctctccgcaatatcactgcacccaggacagtcctcaatagatggcagccttataccttcattccaataaaatctaaagaactcgcaaccccaatgaggatcaaagccatcaccaccttcctcataatgcttctcctgctgtttgtcatacttcctctgatatttgttgataatcttagccgaatttacctgaaaccctcttgcacgacctccatcggctgtccagccagctgtatgtaccatattgacaggaaaaggattgccatcaaccttcatcggcctcttagaatcatcaaacttgattttgcctccttcaatagccgcttggactgctgcctgaagaccttgcaatcattagtagtatgagacccagaattatgccacttgcaataccttttcttgcccaattctttagccgatggaattgtgtgaccagcgggaagttgaatctgcttttctcggagtagcaagtcaaaaatcttgtcagccttggtgatatcaaagtcatacctctcctcttttctagaattcttcacccattggtatggtataacctttttgctccttacccattcgagtgcagctatcttagaatcatcatccccatcatccgatccatatatatatacatatatatatataaggacaaacatgattaacctttctagaattcttcctagcctctgcaaacctctgttcatgcaaggttaccttctgtgtaagatgtgacaagctttcgaagtcttcagatgagaatttctccctgattggagcaatcataccctgaaaagccaaatcgactaactgggcatcagtcaaacttaagctgtagcacttattcctcatttctctgaacctctgaatatactcatgcacaggctcatcatgtctctgcttgattgctgtcaaatcagacagtttcatctcatgtaccccactgtagaaatagctgtgaaaatgcttctccaaatcggcccaactgttaatcgacccatatggcaaagaagaaaaccaagtgaaagccgatccagacaaagacaaccagaacaacataaccctcaaggcatccatagccgatgcttcaccacactgagataaaaatcggctaacatgttcataagttgatgtgctatcttgccctgagaattttgaaaaatctggaactttgaaccgattaggtagaggaactctctcaaaccattcagggtaaggttgtcagtacaaatttctagcaactttcggcctaagcccaaactgctccttcatgacatccgcaattgtcacgtcccaaaacgaccctaaaatatatcctttaaattatgcccagaataaataaaatccttgtgaaagcctccaaaaattaaaatatgcaaagttaaaagtcaaataaggcttggagaatttttgtatatttcctaaaagcctaaaatgtgtaaataaattttagtggaattttcagagcacaaataataattattaagaaataaacaaagttaaaaaggttttataaaaagaaaaaccctaaaaacccctctcccctctaatgggccggctgagcccatctccctcccctctctctcctctcccccgcggctcattcggcctctccccgcgcgcgcaccgctgacgggcgggcccgcccgccaccctcgctgacgggtggggcccacccgtcatccccgacctcccgccgctcccgccgccccgcccgtgccaagcgccaccgccgccgccgaatctgccgcatcccgccgtccccgcgcgcaattaagtggggggaattattccccgtgatcccctccctctttcctccctatttttccctctctctctctcgcattcaaatggccggatttgctcccgcaaatctcgccggcgccattgatggcggccgcacctcccacgccggtttccttccccgccggccgccctctctcccttccaaccctatttaaaccctccccgcaactctctcgcccgtttccgccacttgccgcaccttctccccgccggaaacgagctcgcgccgtcgccctctctctcctccgtcgccgacgacctccggccggccctctccgctcaccgggaccatctcccgcctcggcatcgccttctccggcttcgccgcaccgccgccgaccccgtccaccacctcgccgagctcgccgaccgccggaacgccgtcgtccccatccacccgagccgcgccgccgccttcctccgctccggccgcctcctttgtcatcgccgtcgacccggggtgagccgtggaccaccgcctcttttcccccttcccttcccctctctcggccgccgctctgccgtgcctatggccgccgccggcgaccataggggcgcgggcgccgcctccgggcgcgccgtgtggccgccgagtggggcccgaccgtcagccgcccgcgccctcgggtgcggctgacgcgcggggcccacggcgccggccggtgtgagcccgggtacgcccggtccaccgtggaccgtgatgctgccgcgtgggccccactcccgtggacccggtccgcgcgccctcacacctcggctgacgcaataaaccctttttaaattaaaatttaaatgcagaaattcgtaaatattcatttaagagcagataaacttcaattggccataacttggccatttgaactcggaattggaccgttcaagtctctaatttttccttaagaagtcaagaacctatttgtgtgctttgttcttgcttgttatatggagtttattagagtaaaagccttttttcctttccgttggtcgtgtagacgctgcagcttcagaagatccgctccacgtggaggttgaagccgatgtttgggaaagcgagcaaggcaagtcacatcatctttgaacatattggatcccagtttgtgaaattattttgatttaaattaatgcattaccgctttatttaaattcccgcgttatcactattttatttagccatgcctatttgcctttgttatgaccttattattattgttattgtgattattaccttgttcaccctagaataaacaaaaccccaactagtgggtactctattcatggtaccactagtatgaatttaggtagatgcttcgctgtttaattaggcaacattaggtggttttataactctagactttgggaatattcatatcacttggacattatggaatggttggattattgtggaattggatgcacaccttcccctctattcaaaaccctcaaaatggttttaggctgggctcggggtgcatggttttgatagtagcacctcggccatataaggaccggtcttcgggcctctgttgcaaagcactaccgtacttccacatgtctagtgggtaaggcttagtttgtggctcagtctagttataaacaaaagtacacggatggagatggacgaagtcgggggtcgatggacatctctaggacaaatgaaggctacacgggctgcggcccggtagtcgagatgtcatggcacagggatggtgtcctgctgctaggggctcagtcctgcctacctgtcctagaggtttcggccgtaggtggggttgggtcggtactcttgtctatggctaggatgggttggaaactatgtcacgtcttccgtccatatgccgtggtggtatgtggcacgtggttgcacgtgaggaagacgtgtcttgtgggtaaagatgtacacctctgatcagagtacaatcaattcgaatagccgagccctcggttatgggcaaggctagcaatttacccaagttagtgttttaaattcttaaaaacctgcttaataactaaaatgtggaacggttggcctgggttggcttgggacgagctgggacccagggtcgggttgcaagttcggtctgaatcatcgtaggccttgggttaaggcaggttcgtgtgggttcacggccttgtttaataatattgaattgttctaggatcgtgttttaaaagtagctttaagcaactaagtgtcttttaaatgctgtttagtgcaaaccctaaccccctatattataactcctttgtactcctttgcatttattctgcacttgtgggtgtgtcttgttgagtatggtggttgtacttagtcttgctcaatttttcccaaactcagatgaggagctcctagatgatgaaggctttggtgtctagctcgtgcctgctgtcaagcgcctgtggtcgtcgccctagtcatccgttgtttttcgttgtcttcttgtgtgctggtccttcgttgcccatgtaataattaactatttacgcttccgcttgttaaactctaaattgtatcaacttttggtgttccttgcctcctgggacaaggaataatacacgcacgcaaggaacgcctgttgggttatttccagtcgtgacagcaatcaactcggcccatggttgttgctaaggtgctccttgaggttgctgtggcatgggctcaaattgattgtattgaggaacaaactggggttgagccgatcctgcctgctggtattgaacttgcggtgatggcggctgttactgataattcaaattgcccccctggtaattttgaagatcctgctgaatattgcgcaccaaatgcttgggaataacttgaggtatcaccgtgccatctagttgtacatgatgaaccaaatgctccgggacaacttgatttgcagcatgctgcacaggctgaccaccaggtgtcgcaaacctagccgatgcattcattaagccttgttgctggatccgctggacaacctgctgccttagtggcgtctattgaattggctgcaaaacctgccgtctgtgtggcatatgctgagctggttgcacaacctgttggattgggggtgtttgttgaatcggttgcacaacctgctgccttggcgttgtttgctgaatcggctgctgctgggttggatcaacggtatgttgaggaggtaagaacatagatgcaacctagtcttgtgttagccgattcacgttctgtccgctgtgttgtggttattctctcaccagcaaacggggattaaccaattggcctggtgccgacggagctgcaggaggtgcgggagccgatactggtgccgtcagctgagccgatggtgcattgtgagggattgactggacaactggttgattatcggtgattaatggccgataattcgggaaccctcctcctggtagataaaccggtcctgtagcttgatgctcagccattgaaccatcaaccattgattttaccatgcttgccaaagtattggttaatatgccagattgattgatcaaagcatggtgtacaacatagtcaacctgatcttagaagttgttgaactacaactgtgctgtattgctatcttgattaacacctccaccttgaactccctgagcaccatcaccttgaactccctgtactccttgagagttgtcaccttgatttccttgagaaccatatgtagcacctttatcactcggttgagccgagccatctggagcttgtttcacctctccatccttagaagaaccagtcctaggaacatcagcaactacctttaccttatacttctgcaccaccgttctcttgcgcgtttgcataaatgaacttaagaactggttacgtgcttactgcatcattgcttcaaatccttcttttgatcaggtgtcagcttgtctggagtgatggtcacgatgttgctctcattaacctcggacaggcctaactgctggatcttctctttaacagaaccggggctagccgaggacggtgatgctggtggcttctcctccatggagaaaaactgttgtcgcggttctgacttcttatcaggtccaactaggcgtgccaaaagcgtgttgatgaaaaacacgaggcttgggagatccgctttgttccagtgcaggtccaaaactcgcctccgggtatgctaacgtgccagttgatttgatcctgcaattaacaagaaataaagacaaagaaaccgcggttaaacttataaacgatagacgatcggcaaaaggccgatgatatatcatttatctttgagccgatgtcatatatgtatcgatcggcagtcatgaataaataagaaagaactaaaactactcgatcggctgcagatattaacgatatatactccttatatcgatatatacttaaatcaagtgattgggatagatcggtcgccatgccgagacagtataaatcacttagatcgaaatatatattaataatgggactatatatgttcatagcatagccgatcagatagatctagcatgtatcggctagtactccgatacgactctatactaagatattaaagcaagtagaatataccaaacaaaagcctaatatacttaaatgcaacaagatctcaacataaagggcagatttaacatgttaataaagcacataaaacaaatatagttaaatcaggtaagatcagctgaaactccgatactaccccaatcggcaaccaagaagtaggctagagattgagattctaatcacgactcataagatcaaacaactgatgcagctataagtatgaagggaagaacaatatctagacaatcaagccgctggaagtttcatagagtggtggatatcttatataatctgaatcaacatcgatatttaacctaatcggctgccctctatcgacagatgttagccgattgtaagttaaatagagatattgctagagattatgtaagatatatgataactcgacgaattatataaacaagattagagtatcattgagatggaagcactaatcccgagaacgcaagttgtcataacaagttttacctcttgttgaagatcgaaaccgatgcagctcaaaccaaaagtaagaactcgtcgaaataaaactaaagcaaaaagggtggcgatgcgctgagattgtattgaacgtgtatgttcaatgattacatggggttcagggtctatttatacccgagaatcacaaactatgtccataccggacacgactcttatctctaacatactctaagataccataagtctttgcggcagacttttgcccaaacatatctctaaggaaattacataaaatatcctaattaatagatacaattgccttctcaggactctatccatgcatggcaatcgtcttgaagcatatcaactcaacccgatgtcgcacaccaaatcgtatcgtcggaatcggctgtatcggcttacccagtctgatcggactcagccgattctgatcgtaaccgatttggactccaaccgattcttactgtgtttccgcaatgatcttcactttcgattccgcttcgattcaatcttcttctccgatactaatattaccaaactttaaaaagtagggtcaaattggtagctagatttaaagcggggtcaaataagcaattgccccaaaaataaaaaatgggtgcacccctataagatttaaaatcggcaccaatgggtttctctgcagtagtgagtataaactatgtttagtaatttatatcttaacgatccatcttatcaatttagtatttcatatttttttaagtacaagtttaacgtacacacaacacaatcgtgcaatcgctcacatatctaccaggactcgttttgtgaagattttaaaaaaaatttatagctatttagattgcatgtatgcaattagggccatgtttagatttcaacttttttcaacaaatttctaacttttccgtcacatcgaatttttctacacacaaacttccaactttttcgtcacatcatttcaatttctttaaaattttaattttgacgtggaaatcacaacctaggtgtgtatatgtactttggtgaaatactttctgcaagcacgaaatcctatagacacagctagcatacgaatcataagattgaacagagctgatcgacaaaagaaataaagaacggggaactacgttctgccgcaaaggatgccgtggcagcatcagctttcaacggcaagtttttcccatcccgcggcagacagtcaaaacaacggcgggtcgacaagtcaatgtttttgacacgacgaacaccataaaactttaaaacgtgtttgagagttgacgaaagaaaaaaaaaacatacccagaaaataacacaactattagctatgattaattaaatattacaacaattcttttaaatttaaaatttaaaaatacaactttttaaaatttcttttgtaaaagaaaatatcgtttagtattttggtaagcgtgaggttgaaaaaagtaatttttttctctgtgttgttgctgaacgcaacctaagatagcattaaagaagtactcatgggacaaaactttaacgaagtaaaactgaataaaaggatgcaaagtgcaaaaactaaaaagagtatcagtgactaggatctaatttttcaagctgttttcttgaatttagatatatatataaaaaataacttatctttaattaagaactcaccaggccatgtactagttggttgtcctcatgcttaattaatttggttaatctcatctttaatttggccaaaaacttgcttgctactccatatcgttatcaaccataacgaatgagattaagcaaagcacgagggtcgttgttgaagctgagtacatatttgaccaaattttttaatgtttagtggcacgtacatatatacctacagatacatctctttggcatgcgcacagtgttgtttatagagagagagatgcgttctagcgggatcagcgtaattgttgtcgttcgccacctggcgtggctggtgctaattttgtgctcatggccgcgggttgcagctgctcaggctcaacaagcaccaaaaactgatccagtcgaaggtttgtattgagttgttttgtttttccccatataaatcgcaggagtatagtacacttcggttgatatatggtgtcctctcttgccgcattgacacgagaagagttggaggaaatttgattcattaatcgcctagttttttcatctacatgattagtacttcatgacgagttaaccacacagcggccgccctgaacacgatcctagggagatggggcaagaaggcatcgtgggagtggaacattagcggcgagctctgcagcggtttcgcctctactgaaatcgactgggattactaccccaccatcaacccgttcatcaaatgcgattgcagtttcagcaacaacaccctctgccatattaccaaactgtacgtttgttttcatcagttgtgcaacatgtatctcgatgcggtgcctgaaaaatataagcaaaggaacatgtcagattatcgatacgtctgttttcaccagttgtgcaacatgtatctcgatgcatgcagtgcctgaaaatataagcaaaggaacatgtcagattattgattactagtatttccaattcatagagccatcacatcggtttatcctaaattgggtcctccggctccagtgacctttctttaatttgcatcttatttaggcaaaaccaaatatatcccaattagcacaattctcatatataggtattgcatgtctattatgcaggagggtatataaattgggagtagttggtcaaatacctgcagagctacagaatctcacccacctagagtatttgtatggtatctaagtcttttctccttaatcttgataactaattgttacactacagattaaggttttgccgtaaatataaattatattccatgttctttttgtgaaaacagacagcttatgctttttttctgctaattgacctagtgtttctttatgttgtcttcaggaactttaattataattacttgactggtgccattccatcattcattggaaaattcagttcaatgaaatatttgtaggagttacacatcacattctagatttatgtactatatccctttcatattataagtcgttttcagttttccaaatcaaatttctttagctttaatcaagtttgtaaaaaaatgtagcaatatttttctacataaaacaaagaaactattaaaatgttttcaatgttagatttaataaaactaatttggtgctagaaatattgctatattgttttataaacttgatcaaactttaaagaaatttgattttaaaaaagtcaaaacgacttttaatacgaaatggagagagtaccattcaatggttaatgttttttcttaattctgtttcatcatttgaagggcattagcttcaaattcactgtccggacaacttccaaaggaacttgggaacctcaccaatcttctctcgttgtaagataatctttcccatggcaaataaatcatcaactatttacttggactgcctcacccaatataatacaacaaatattaatcgcataacttctcaacaataataaattaagtaataaaaaaccataattgcaaaaatatcataaactactaaacaacatgtaacagacaagtcagtgcaattccttttccatgtgttgcatcgtttgatcaggaaaacacgatgccccctttcttctattatatagttgaactaaaaaaa

SEQ ID NO: 26367 - DNA, 4048 bp, Oryza sativa
gtagttttgtgaagttactcaaaaaaaacccataaagggtacccagctatttaaaagataggagggtgactagagagtctctagggttgtgctccaccaagttgggaagctaaccacttgggcctctcagatgaatttacatgccaatgggctcattacaggtggcgtatcatcttgtttctgtaattcccactgactcatttggaatttcgaggtaaggccgcaaataatgtaaaagaggactccaagagctttctagtatgtaatatatatatatatatatatatatatatatatatatccgacccaaaacaaagctcgtatggacatttggcattcgtttgaattcaacactattgcaggtagcccaattggattacataacttgggcggcttgatctcaaggtttaggatcaaagacataatagagggggtgaataggattcctaagaaacatggtgtaattagaagttaaacttgctaaacaaagactagcctatgtgcctaggtttatcgcaagtgcaggcatgttttgtaccctagttgaagtcctaacaattttacagcaaactaagtattgaaaggaaatacaaactaaagagaggaaagtgataggaaattaaaacacacggcacgatgagttcttcccgaggtagtggggataggaaattcaaacacaagatacaagagtatagctccctcccatagtcatgaagtctatatgcgctatcatcatggtgattcttttttgctccagaaggtgaacccaaaaccttcacaaccacataaggtttcccacaaccttcttgagagatcaccggattgcctctgagactgactaggcatgccggaaagccaagagtagtaggaaaaaaccttcactagaagcccttagaaacaagactcttggatggtgcacagtaagctactctcaactcaaactagcactaaactactgaagaaaattataacaactagctcaatggtgttcttggacacgcccttcaattattgagctaaatagggtttccagaaacattagggagtcctagaaaagtgataaatatagccccaaccgagctcacttatagccattcgtagccattggagatcaagcagccagccctcctggtgaatctacacttcaatttgatgaaagtagaattggagatatctctcaagtatctcaattagagaatgaagctttaactcaacatttcactgagaatgagattaaagagcctgtattcaaaatggaacatacaaaagcacggggccctgatggttttcctcctgagttttaccaagttttttagaatgttgttaaaaatgatttgttcgctctttttaatgatttccataatggtactcttccgttattttcgcttaactttggtacaattatcttgttacccaagtgtgatgaggccatgaaaattcaatagtataggcccatatgcttacttaatgttagtttcaagatttttaccaaagtccggaatatttggtaatgtttcggatttgccatatccgttcctccaagaatatcgctcattgcctttttccgaccgttaccgcaccgctttaaatactaaccgtcgtccccgagaaatttcacaccgttagctccgttttcaccacttaagccaacctcgtcttctctctctccggcgatcccctcgacgcaccagacgatcccaaggcgatttcctctccgaccaaacttccgcctgcgatgatgtcaacttccgccatcccgtctgccgcgccatcgaccgaatacgcagaggtaagtacccatcggctagattctctcctttatgcagtagattggttcttctttgtcttatcttgttttcttcttctcttttcttgtttgcatctgtagcacttgtccaacctggtcgcaattcccagtttgtcacatgaacatcactactttctcggtccaatcggcaatcccgatcccactaagtttattattgctggaaccaataggatcccttttagattggccaacccaatcctaagtcactggaagaataccttcaagtcttggccttctcttgagaaaacttcccctgagaaaagctggtctgtgtggtataagcgtgtattagccagcaagcaagttcattgggacgaactaggaatcggccatgcccttgctcttacattagcaaattcggctaaggacaaacccttgatggcctctccagcctattgttggtccaacgcccttaatgctttcttgtttaatcaagggccgatgactcccactctgcttgacatcaccatgattactggtctagatgtgaccttatcggctaaccccatgagtttgaataccaagaatcaatttgattttaggaccaacagcataggtggttggtctggctatgtagccgcatatatgggcaaaggatctgccaccccccgagagcacactgcctttctcttcatgtggcttgaaaagtttctgttctgtggatcaagctgcggtcctaccaccaactggcagttcttagccgaagcccttgaaagcaagagacaattccctctaggcaaaatccttctcggctatctgtaccaaatgttgagtaatgcatcggctaagatagccacaggctcagtagtgggtgcgggtggaccatggtgattgctacaaacatggcttaatcttgtcgttatgaaggttgtgaatcggccgcctctgatagatgctgaattcccaaggctggagcccaccaccaatgatgacagggaagaagttacccatcgccgatgcctgtcgtatggtgaagctacatcaacaccagccgattctggagcaaagctatcggctcaactgctcaaggactggttctgcagtttctatgaaggcttccaaagagatgctcgagtctggtttccatatgaggactcagtaaactttgatctcccatcggacttcagatttgaagacatcaactctgaaaattccaaaaatccagagaagtcttctcggctgccattagtccatgcatccttcctgttggcattcaccaagggagaaacatacaagtatcttaggagttataccatccaatgagctcggccagacaattggaatgggatagttgccgatcggcttgttctttgccgataagatccagtgcagaggagaaatctgatcaacattgatgatggatcggctgctcaatatcctaggaccccctttgggtagtattgataacatagagctggcaaggttcaggagcaggaactttgaaagatggtggggtgaatggaagcaacatatattccatcagctagcctctatgtatatgacagatctattcccagatattgttcctcaggtatatcgttactctgtcaattctgttgtaataaaagttagccgatttgtacctttaactaatctcttcgtttattttgcagacaatagaatcttctcctcctcgcaaaagcaacagtggcagagatatagaatatgtcctaggccttctaccaaatggaggtggactagctcctcctgtcattggctatcatgcccccaggaccacaagtctgcttcaagagcaaatgagagaaccacccgatattcgtaagaagagaaaaaccaaggcatcggctattgatccatcggctctggctcccaagaagaagaccaagaagaataaacccaagccagccgatgacctgcctactttagatccatctattgagcaagcctgggatgaagaagagatcgaagaagatgtttgtcacaccctgaagttctcctcccaagccaaaaatttaatttataaatgaccctaagaaaatgccggcgcaaatcaagagaaaaccctaagaaagtaatacaaataataatcgaatctgacatgtggaatttttcttgagttctacatgtcgaaattcactaacaggatttttagtggaattttcagagccctagaaataattttgaccaattaaaattgagcataagcaatatttaaatccctggaaattcctttcttcctttttctttttccttttccct

SEQ ID NO: 26368 - DNA, 3743 bp, Oryza sativa
cgtcgccggtggacgtgcgcgtgccgtcacccttgccatggccggccgccggctttgtgccgagccgagccgagccaggccgtcgccgcaccgtccaatcgcccccgggccgatccgggccgtcgatcccgtggaccggtgttggaccatccgcgtggtcccggtccacggtagaccgaccacccgtgcgccgctgccgtgtgggccccgcttgccagcgccgcgcccccccccctttgatgacgtcagccccgggacatattgcgcaataaatgatttaaggactttttgttatagtaataaacacagtgaatcttctaaaattcataactaattcattcgtgctccgtttaagccctttcaagtctcagtaaatcaagaaaaatgtgtagaatccattaaaaatggttttgttccctgtttcagtagtcttatagcctgtttgcaatgttagccttgtatgtcgctagattccggttcttccgacgctccggtgtacttcgaaatagtcgccgaggttcctccagcagcagagcaaggcaagtcatgcttgtcacttgaacatgttgatcctatattgcaaatgctctattgtttttcttcaaatatcgcattgatttataatgttactatggggtgtttacctattgtcatagccatgctattgttataccatgtccctttgtcagcttggggttataacatgactagagattggactaggggttgcttagccatgcttagttcaactagtgcacagcggggaaaatccaattaatgtttagactgttggttctaatggttttgttggtttcgttccaccgctttggtgttggctaattaaaataaatcacatggtgggctgtgggtgcatggttttgctggtcgcacccatggcagttaaggaccggttcacgggatgccctagaagatcttatcgtacttaccacaagccagcgtgggcaacggctgggcttgtactgtagcttttctctagccgacgcatccaggcaagggtgggcgtgatggagtttggatgggccctgcgacggcctatgtcgcttccggattcacctaggcacgagaggggactgcccgctgccttgcgaggagtgggagtgaaacctaaggtgtggtgtgcttggttagagggggttatgcgaagggtcctgtcacggactctttccggtatgtcgtggtggcatgtcagcacacggaaacgtgtcgtggggctgtgtcttgtgggtacagttgtacacctctaatcagagtaaaactattcgaatagccgtgcccgcggttatgggcggtcaaccagattcaccgtgattagtctcaccctagtttagtctattgaatttggatagtataggtggatggttgggcctgttgcaacgtgggatagcgttggacagtggatagttaatattaattaattattacaactgtttaaatctttcaacttctgtttataaatgctcgctttatgcaaatgaaccactctagctctcctttgataattccctgcatcatacccctattccggtatgacttgctgagtacagtgggtagtactcagtcttgctctatttttcccaaccccagagtatgagtatgtgtcaaatggaggtttctccgaggagtaggcttcgtccgtgccgtcgaggatgcctgtggagtggtgttcccgctgcagttctagtcaaggcttagctcctgttgtctttcgtttttccgctgcatttttgtaagacttttatgatgtttgtaagacgtggatctgaatgtcaacattgtcgtttgtgtaccccggccggtcctggacggggattttaatgcacattctgcttggaattatattcgggaatttctgggcgtgacaatgttgatcaggcggtatccgaattgagtgatgccggagaaaaaacaccattggctttacccaagcaaactcctccaactcttgctgcccctgctcacttttcaagggtaaaccactcaccttgattccctcttacaatcatttattcatagccgatcacttataaatcttgcatttgcagaaaaagaagactgctgtgaagaagaaatcggcagcagcaccatccaagccagctccaccagtaatattttcttcatgaaattttcaagtctaatcataacccatgtggactaacacttgtcttttcagcctcctcctcctccttcacctcctatacagcaaatgtcaagtgaccgaactccatcggctataggaagtcataatattgaggaagaggaacaatcagccgctcctgccatcccagtaagtctttcattgtcttaacatcttatatcggctgaatctgtttgatcttcaactgtcttcaaatctctcctttgcatgtattaaccgatctattctcctttgacatcaaggattactttgatgaagaagcagaagaagaaaccacaagtaaggctctagcccctctcgatgaaactgtcaagaaaacacttgaagatatatcccttcggctagagtcatcattagataacctggtggccgactgtagttcgatccgggcacgatttatagaaatccaaccctaatcccacattatctagtgaacaccatcactccagcgatgtacgttgagcaacatcaattcaagctggaaaggcctaagcaacggatagccgatcggcgggagcggaaggacattgaagcaactatccaagccaatcggcagcttgtgcaagaagagtgtcacgtcctgataaattcatcccgaaataaaaatcattctctaaaaggaacaatagaattaattaaaattcgaaaagaaattgtcaaaccttaaaatgcgtacaagaaaaatttgaatgtggcccggagaattttcgttaaattctccttggtctaaaatgagccctcaaattttagttgaattttcagaacaccggaaataattattaagcaacaacaacaattatcaaagtttactaaaaagaaaaactaaaaataatccttcttcctcctttgggccaagtctggcccaaagtctccctctctccctcggcacgctgtcgaagtctctcttccctccctctcgttttcctttcccatctcactctcgggccgcccctccctcctctcctccccggcccactccctcctatcctcctcccgcctgggcctgccctggcccaacccgagccgcagccctcccgcgcacgcgcgccgcacgcgcgctgatcgcgtggaccggtgggtgccacccacccggtcgtcgtcctcctcccgcccgactcctccctctcccatgaaaccctatgcgtttcgtccttcaaatctgcgcgaatcaattcccttctttccaaattgattagggggaatgacccctttccttcctcttcaattccccctaatttcccccttgaatggcgccattagtcacccggaacggccgcgtgtcgcgaccgagaaaattgccttttcccgaacgctagtgtattaatccccgtcccaggaaaagccggggtacaccacacaaacatgatataaaagacacatctttattatatcgataatatttacattattacaaaggcgcttcaggcctgacaataaaaataaacagcagcggactagcgggcctacggctccatcttcacaggcgctcaactggggtataagccaggactccacctaagacttcttctccaaagcttctcttactgaagggggaaaagattgagca

SEQ ID NO: 26369 - DNA, 6320 bp, Oryza sativa
ctgattgtgagtatatcagaatgtcgtcaatgaaaaccacaacaaacttatccaagtattccatgaacactttgttcattaagttcatgaagaaggcaggtgcattggttaaaccgaacgacatcaccgtgaattcatacagtccgtatcgcgtggtgaatgcggtcttcggaatatcttcttcgcggatgcgcaactggtgatatccggaacgaagatcaatcttggagaataccgtggcacctttaagctgatcgaacaggtcatcgatccggggaagagggtacttgtttttgatggtgacttcattgagggctctgtagtcgacgcacctcctcttcgtcttgtccttcttctccacaaaaatcacaggagcgccccagggggaagtactcggacgtatataccccttctctttcaactcttccaactgtttcttaacttcggccagttcatttgctgccatacggtagggtcgcttgtacagaggagtggttcctggagcaagatctatccggaactcaatctctcgcttgggcggcataccgggtagttcttccggaaacacatctccgaactctctgacgatggggatttctgacagtcctatctgatgaagttctgaactactgacagaggttgggggtgcaaagaaaacaaccggttgttccggtcctcggtacagagtaacagtgcgtctcgcgcaatccactactccttgaaattgagccaaccaattcattccaaggatcacatccaagttcttggtgtctagcagaatcaggtccgagggaaaaggaatcccctgaatttctatagggacggcaggactataatactttgctgtcataacccctccaggggtggtgatgagcagagggtttctaagcctttctacccccaactgatttctccccacgaatggcacagatataaacgagtgggaagctccagagtcgaacaaaatggtagcagggatggaatgaatgaggaacgtaccaacgatgacgtctggagttgtcagcacgtcctcggccgtcacgtggttcacacgaccctgaatgacatccttcccaccgttgttggagcggggaggcgcttggccttgctggcgcctcggtttcgggcatttatccgcaaagtgcccgggctcgaagcagttgaagcacagacgctgctgaccttgagcgtccctgcagccttgaccagactgcacggctggcgtaggaggacggggcgcacgagtcccttgctgactctgctgctgctgcggctgtgggacgcgcaccacgtattgaggtcgaggcacggagcgaggttgctgctgctgttgttgctgctgcgaggaggatccccctggatagggattggtgtagcggaccctttggttagcaccctgttgattgcggaaattcgccaagcggcgcttgtgcgactccagttccttgtgcttggcttccaagcggatgctcttgtccaccagacgttggaaatccggatagtccccggagactagacggacggacagctcagggtccattcctgccaagaacttctcttgcttctcctcatcttcccgcacatcctccggggcgtaacgggccaggttgttgaactcatgcaaatactccatcacggagcggttgccttgcttcaactctcagaattccctttttttaagagccacgactccggcgggcacatgggttctccggaaagcggcggtgaaacgggcccaagtaataggctgcccctctggctgcgtagcctggaaatggtcccaccatagagatgcgggcccctgcagttggtgggcggcgaagatgactttctcctcatcgctgcactgcacagtgtctagctttttccccacggcatgcaaccaatccaacgcatccacggggttgttggagctagagaaggtgggtgggcggatgcggaggaactcggcgagtttagagtgttgcgggggtggtggtggagcattctgttgtggcggattttggaggtggtggaggaaagcagtcatcatgttggcctgctgggcgaggatttgggtgagaatggcgttggtatctggtggtggtggtggaggcggaggaggaggtggaggtgggctgccatggtggttgcggttgctgccttcaggttggttgccatcaccggcattagcacttctcctggtcgtcaccatctgaaaaccccacacagaaccagcaaacagagagagctgacaattaaggctaaccatccacgactaccataattcttaaatttattactgctattaaattggttcattaaagttcaagttgcttaggcaaataaaataaagacaggctccgacacagttatgccacacaccggcctaaccatgccccacacaactccaacaagaagacaaacgaggaagaacacacgcgcaagcctactaactgctcgtctaccactgcgacgggccagggcggaaggtgagcaacagcgcatcctccgtgctaccaacgccggaggcttccccctcctggggaaccacaggcgcgggctcggcacgaggggtctccacgaagcaggtccacgccagggactgacgaacaagctcgggcctggaggtgctcttgcgggcggtgatcttctggctgcggcagacacggcgacgcttggggcggcagacctctccctgggcgatcttgagctgatgcagctgcgcctccaccgcgtctaggtccttcttgagctgcaggttctcctgacgcagctccaggatcttcaggttgttctcgaccatcccacggcgcaccatctgatggaagtcgatacgagccgcgtcgtacgcctccaccatgcgcgccaggtgcacgatggtagcgtcgtcctccgagctagcatcccggaaggtggcgtagtcgcgggctcctccgcggtgagggtggtagcggtagggcgagtgctgcaactcgtccgggtagcgctggtgaagagtgccgatggcgaggagagcggcgttctggcaagcggcggggaaagaatctccacccgcggtgactgccagcgaagtccgctcgggagagccagcgaggatcactgcagtgacctcccaagcagcgtggggctctgcatcgtcaccctcctgcttcggaagcggcctggcctggtagtccactccatgcggataccccaggaccacgcacatgccccgcagctccaagacgaagccagtcatgtccaaaccacgacgggtgacgctgccggccatctacaaacaaaaacaaaaagaaaaacaacattttaaagatcatattttggcgataaatgaagcagcaagacagagagagactagacagttttcacaaataacaaaggatttttatttcgaaaatactgctaaggcttgggatctaaggctcgtcctagggtcaagggggctctgataccaacttgtcacgaccggaaataacccaacgggcgttccttacgtgcgtgcattaatccttgtcccaggaggcaaggtacaccaacagttgatacaaatcagagtttaacaagcggaagcgtaaatagttaattattacatgggcagcgacggcccagcacactcaaagacaacgaaaaacagcggaagactagggcgacgaccacaggcgcttgacggcaggcacgagctagacaccaaaacctccatcttccaggaactcttcttctgggcttgggaaaaaattgagcaagactgagtacaaccaccgtactcaacaagacacacccacaaatgcagaataaatgcaagggagtacaaaggagttatactataaagggttagggtttgcagtaaacagcatttaaagatatttagttgctcagagctattttgtaaacacgattctagaactgtacaatattatttatcaaggccgtgaacccacacgaacctgccttaacccaaggcctacgatgattcagaccgaactggcaacccgaccctgggtcccagctcgtcccaagccaacccaggccaaccattccacattttagttattaagcaggttttaagaattaaaacactaacttgggtacattgctcggcttgcccataaccgagggcgcggctattcgaatagattatactctgatcagaggtgtacatctttacccacaagacacatcttcctcacgtgcaaccacgtgccacataccaccacggtatacagacggaagacgtgacatagtttccaacccatcctagccatagacaagagtaccgacccaatcccacctacggccggaacccccgggacaggtaggcaggactgagcccctagcagcaggacaccggccctgtgccatgacatctcgactaccgggccgcagctcgtgtagccttcatttgccctggagatgtccatcgacccccgacttcgtccatctccaatccgtgtacttttgtttataaccagactgagccacaaactaagccttacccactagacatgtggaagtacggtagtgctttgcaacagaggcccgaagaccggtccttatatggccgaggtgctactatcaaaaccatgcaccccgagcccagcctaaaaccattttggggattttgaatagaaggagcggtgtgaagccaattccacaataaccaaaccattccatagtatccagatgatatgaatatttcccaaagtctatagttgaaaaaccacctaatgttacctaattaaattgcgaagcatctacctaaaactaaactagtggtgccatgagtagagtgtccactagttgaggttttgtttattctagggtgaacaaggtaataataacaataacaataataataaggtcataacaaaggtaaataggcgtggctaaataaaacagtgataacgcgggaatttaaataaagcgataatgcagtaatttaaatcaacataattttacaaactgggattcaatatattcaaagatgatgtgacttgccttgctcgctttcccaaacgtcggcttcaacttccacgaagagcggatcttccgaagctgcagcgtctacacgaccaacggaaaagaaaaggcttttactctaataaactccatataacaagcagaagcaaagcacaaaaatgggttcttgacttcttaaggaaaaattagagacttgaacggtccaattccgagttcaaatggccaagttatggccatttgaagtttatatgctctttgattgaatatttgcgaatttcttcatttaaattttaatttaaaatcggatttattgcgtcagccggggggaggggcgcgcggaccgggtccacgggagtgggcccacgcggcagcctcacggtccacggtggaacgggtgcacgcggcttacgccggccggcgccgtgggtcccacgcgtcagccgtacccgaggcgcgggcggctgacggccgggccccacatggcagccgcggggcgcgcccgaaggcggcctcgccggcacagccgacgggaggcggcgcgcccgcgcccctatggtcgccggcggcggccataggcacggcggagcggcggccgagagaggggagggaagggggaaacgaaatgggcggtccacggctcaccccgggtcgacggcgacgacgggaacggcgaccggagcggaaaaaggcggcggcgcggctcgggtcgacgaggacggcggcgttccggcggtcggcgggcgaaacggaggggtggacgaggtcggcgatgttgcggcgaacccgaagaaggcgacgccgaaacgggagaaggtccggggcgacgacggcggcagaccggagctcggcggcggcggcggagagagagggcgacggcgcgagctcgattccgacggggagagagagcggcgagcggcggaaacggaggagggaggcacggggatggtttatatagggttgggagtgagagagggcggccggaggagaaggaaaccggcgcggcgctctcgggctccatcaatggcgccggcgagatttgcgggggcaaatccgcccgtttgaacgcgagagagagaggggaaaatggggggaaagggagagggaatcacggggagtgatttccccctctttattgcacgcgggggcggcgggatgcggcggaatccgcggcggcggcggcgctagggcacgggcgaggcggcgggagcggcgcgaggtaggggatgacgggtgggccccacccgtcagcgagggtggcgggcgggcccgcccgtcagcggcgcgcgcgcgggggaaggccggatgggccgcgggggagaggagagagagggagagggagggggggaaaaagggactttttaggg

SEQ ID NO: 26370 - DNA, 3094 bp, Oryza sativa
ctcatttttggtttatttcaccttaggtcatgactaatattccattcgcattatgtttttcttattttgccatattctggattttattatttgacttccatctcaacatacacctcttatagtatttgaattaaacaatatatttgcaatatataaacgaataacaccagcatgatgcaaagtttttaaaaagttcgaatttttagtgatttttattattgaggatttttaggatgttacatctttctcatggggcactcgcgggtggatggtcttcctcacaatgaaagcaggtagtggcacacgagctagcaacatgaccgatttctccacaacgagagcatgccttatgttccattttattctggttgaaaccttggggagacttctcatcttcatcatctgaggagacttgatctgaatcttcactatcatacactctacctccactagctaaaagatgctctgtcaactgtggtgcacctcggaaggaatttcttctctgacgttttgtcattcctggtggaggccattctgtgctggtaatgatcatcttacggacttcatcttcggttcgcattggtgcttttcttttctgctgaggacagttccttgcatagtgcccttgttcatcacacataaaacaaatgattcttgcttcttttgagtcaacatgtgacatggcatgaggggccttctgggatgttggcggtgcgctgacttgtggtgtgagtgcttggactgcctccaactgcacttaaggttgcatctgactccggttcagaattggcgtccgatgctgctgtagtatctctataagcaatttgttctgcttaatcaagtgttggaccactgccacacaattggtgtctggtgcttcattcactcgggagcttgaggtacccatgtcctgacttctgaccttattgcctttctcattgtcagccatctgttgcaaggtttggagagggagagagggaaaacaaaggggagagacagatcaaaaactaaggataggaccttaacagatctaagtcttttgctgttatgatgtatgttaggcttattctgcaagttgattaagcaaacaacctagcatggttacatcacaccccactgatgcaaaccacgtgctacacacacaagcaaggaaacacacgactatcgaaaccctagagggtggcttaggttctacgacgggttctctaagatcttcactcctgcttcacatctagcttcactgcttccttcgcttcgctagcggaccctgcggtcttccggagcttcggcaaacaattggcgacatctttttcttcgcaaaactaaccatctagtactagttgaaaatctgaaggaggaagaagagaataaacattttgcaaatagcattagggaaaggaggaaaaaggaactttcgcaaatagtttcatttataaaatatgtccttaggttttatccacttggcttatcctacagtcgagatggctctgataccaccttgtcacgaccgagaaaatttgcattttcccgaacgctagtgtattaattcccgtcccaggaaaagccggggtacaccacacaaacatgatataaaagacacatctttattataaagataatatttacattattacaaaggcacctcaggcttgacaaacaaaaaaaaacagcagcggactagcgggcctacggctccatcttcacaggcgctcaactggggtataagccaggacaccacctaagacttcttctccaaagcttctcttactgaagtgggggaaagattgagcaagaatgagtacaaccaccgtactcagcaagccacatcggcagatgcatgattaatgcaaggggggtacaaggggataataataggggttaggttttgctgtaaacagcatttataagtcacttagttgcccaaatctattttgtaaacacgatccaagagctacacaatattattaatcaaggccgtgaacccacatgaacctgccttaacccaaggcctacgatgattcagactgaactggcaacccgacctgggtcccagctagtctcaagccaacccaggccaacctttccacattttagttattaagcaaattttaagaattaaaccactaacttgggtacattgctaggcttgcccatatctgagggctcggctattcgaatagatttactctgatcagaggtgtacatctttacccacaagacacatctttactccgcattccatgggcatggaacccgtcgtaaacatgtgacataacccttcacccatcctagccgtgtagtcttcatttgcctagacatctcgattaccgagccgcagctcgcgtagcctttatttggctcagagatatccatcgtcgcaacgacttcatccatctctatccatgtccttttgttcaggactagactgagcaccaagttaagccttacccattagacatgtggttagtacggtagtgctttgcaacagaggcccaaagaccggtccttatagtggccgaggtgctactagcaaaaccctgcacctcgagcccagcctaaaaccattttgggagttttgaatagaggggggaggtgtgtgttcaattccatcacaagccaaccattccacagtgtccaaatgatatgagcatccccaaagtctaaagttataaaaccacctaatgttgcctaattattcagcgagcatctacctaaattcatactagtggaaccatgaatagattacccactagttggggttttattttcctagggtgaacaaggtaataataaacaatagcaataataataaggtcataacaaaggtaaataggcatggctaaataaaacagtgataatgcgggaatttaaataaagcgataatgcattaatttaaatcaaaataattttataaactaggattcaatatgctcaaggatgatgtgacttgccttgcccagagagaacggccttctgaaccttcggcgacgaccgcaaacgaccgcaagaatgatacattaatggtttacaatgagaagtgccgagaattgatggatggatttcggctggtaactttgacgcatgtgtctcgaga

SEQ ID NO: 26371 - DNA, 783 bp, Oryza sativa
tagacatgtggaagtacggtagtgctttgcaacagagcccgaagaccggtccttatatggtcgaggtgctactatcaaaaccatgcactccgagcccagcctaaaaccattttggggattttgaatagagggggcggtgtgaatccaattccacaataaaccaacaattccaaagtgtccaggtgatatgaatatcccaaagtctagagttgtaaaaccgcctaatgttacctaattaatcagcgaagcatctacctaaaattatactagtggtactatgagtagagtgtccactagttggggttttgtttaatctagggtgaacaaggtaataataataacaataataataaggtcataacaaaggtagataggcatggctaaataaaacagtgataacgcgggaatttaaataaagcgataatgcaataatttaaatcaacataattttataaactgggattcaatatgttcaaggatgatgtgacttgccttgctcagagagaacggccttccgaaccttcggcgacgaccacgaaccacgcttcgggaacctccggaacgacagaagctacgcgaagcacacaagcaaagctacaagcctataaagaagcaataccaatacataaaaagaaaacacagggttctttaggttataacaaacattaagagacttgaacgggtcgattcggagctcgtatgaccaagatatgatcatccgaagtttaatgctgttatatggagatttgcggattattataattgagctttgcaactataaaa

SEQ ID NO: 26372 - DNA, 5066 bp, Oryza sativa
tatgaggatgagtagtaatgcttatgtgtcaaactacccttggattatcttaacccctgcttagaatacgattatcacaagtaatatgtatgttattagttgagttctctctacatgatctttccacgggataaaataaatacgataccctttgaatactctcgtgtgaaataatacaatggtatatccgtgctcttgtggatgaactctgtaaccataatataccagaagtattgatgcgtcattgctgtgaattatatttctagtaatgtccttacgaaataccaacagtaataattttaatattatcgatataataaagatgtgtctttttatcatgtttgtgtggtgtaccccggcttatcctgtgacggggattaatacactagtgttctggaaaagctatttttccggatgcgacaaagagaaagccaagttagatatgctctctgccgggccaattcagccgaacatagatcggcttgaagcccgcaagattgatctcatagctcaacttgaagaatgtaatgccgaactagatctggacaagcaaaagttagccaatcttccaaatgctgtcgaagaacagaaatccagactgaaattggctatcaagaatgtagctgatatgatcaagtacctcaaggtcatttctggaaccgatgctcaagatatccaagctatcgaagaagtagatcaaatcaggcaacgggctgtgtcggctatccaacgctacttgtctggataattaccctgtgtaataggacttagcaaattttgtaatcggctcagaaaccttgatactccttttgtcactgaactgttgtgccgattaatataacttctcaagttgctcaaaaatttgcaacttttgtatatatgtgcccccctaattttgcaatgatgaaggcattgataaaattataatttggactaagggcgatataaccatatcggccattgtacatcggcaaaacacaaccgattacaacaagaaaacaactaagggctatataaccatatcggccattgtacatcggcaaaacacaaccgattacaacaagaaaataactaagggcgatataactatatcggccatctcaaggcgatgtaaacacatcggctatcatgtatcggcaacatccagccgatcgtgcattaacctaaacactggggtaatatttcttcaagtacttgccattgagcgctcgtccataaacttctccatcaagtccttgcaacatataagctcccttggacacaaccttatggatttggaacggtccttcccaatttggtgaccacttgccgaatttattatcacgagtccctatcggcaaaatcaatttccaaaaaagttcaccttcagaaaaagactagggcaccacttttttgttgtaacgtcgagcaacgcattccttatccttggtaacttttacaagagctctcaacgtagattgaactaagtcttccctttcatcggccatgagattataatattcatcggctgtcaactcattttgcaactctgttctccttgggtgtcacaccctgaaaaatcgctaaattataaatcattgtgaaaaagaaatttttagaaattacttaataattaaagcaagtgtgtgaataaaatctatgaaaattttgaacattaagttgatatagataaaattgtattaaatatttttaatgtccaagtattttaaggatttttcccagaattatttgagcattggaagtatttttaataaatgaaagatcattcagtgattaatttaattggaaaagtaattaataattctttctttttcctcctttggttgtgaatcattcccagttcactctccctgtctgcggtttgttgtatccgccgacctctttccgccacggtttcgttttgtatgacgagccgagtcctactctctttctggttccgtttcattttcctttcccaaaaaggcaccgcatctgtctcccccacctttcctttctaggcaacccctcctcccgtatcgttttcctccctccccatcttttttctgtttttttttcagccgcccctagcctcctcctcctcctgtttagccgcctcctccaacaccctagccgccgctgccgctagccgtcacccttcgccgtcgtcgtcttggtcgtcgctgtcatcttatccggtgagctttcctctctcccatgtcatttaccggtgtagtttatccctagggatttaatctaatctaatctaatctaatctgttgtttggccctagcgtcgtcatcgtatccgtgtgttgtcgccggatcgtcatcgtcgaccctccctctcctgtccctttggtttggtgagatttctattcgtgtcccctcgggttaggtttagatccctcggtcgtgtcaccgccgctgttgctctaaccctagcgcagctgttgccgtgtcgcttgccggctgtcctgtgcaccgccgctgtgctagctgccttgttgccgctgcgtcgctatttagtcgctgtacgtcgccgtcgcgctgctgctgtaggtgtgccaccgcaaccgctgttgtgccgctaccgtgtgtcaatccaagccatccgatcttggtcgactcggtcgagattaatctcagccgtccaaaagcgatataaatccgttctctcttttcaatggcatattattcctttttaatatatgtcatctaccaaatatgatctaatctatttccggttttaatcttttgtctcagctataagtcatttataaattgtttaatcaatttggaatagtcttttctttaataggtttaaatggaattaaatcctgtaaaattcatatctaattcatacgaactcggaatgaggtcgttcaagtctcataattcatctaaattcaagctctacctatttatgaactttaattgtactgtttatttgggtttttattagtgttttttcttgttttgcgttctaggtttagttttccgttatttcggaggatcgttcgttcgttggagaagttcctgaagacgaattgaagatgcttgtttgcaaggcaagtcacacagatcccaaacaagcctttgagcatgttgaacccgtttaaagctaatgttttatttcaacttatgcattattttagaatgtcatcgggtggtgagcctttcccaattaattcatggccgaagatgactttattttcctatgggttataatttgactagcatggaccttatatattggattggttcagctagatgttatttatagttgcttagccatgcttagaaacaatagctcattaatgggatgaatcatactacattattatttatggttatatttaatggtagctcacgatattcagtcatgttatgataattaattggtaattaaaatatgattaatggtgggttgtgagcacatggttttgaaggtcgcgctcatgacaattaagaaccggttcgcgagctattgttgtgagacattaaccgtaccaaccacaagccagcgtgggcaacggctttatcttttgtatagcatgattcattatggtgtgccagactgagaagtggcgagaagtccgtgggggtcgctggggagtccattgcctctggttttgagggggaggttatgatccaggaatggtgcactgtggtgagttgtgttgtgcgaagggtattgtcacgatttcccccttagcagtgccgtggtggtacttcggggcatggcaacatgtgtggaatcgtgtcttctgggtacaatggtacatctctggccagagtaaaactattcgaatagccgtgcccacggttatgggcgagtctaacaatgtttttcgtgattagtcccacactactcattaatgttaataatgtgatgattaatttgactcctggtttggaatggataattcctggtttggaggtttgatctgtacgatcggggttggttgttcaggtttggttgggcctgtgcagcatgggtgtgctgttcagtgttgattaatattgatgattaattgctctactgttttacaaattctcaactctctgctaaatgctgctttcgcaaatgagcctatgttatgccatcctctagtatccttgtgcacttgcatacttgctgtgtggcttgttgagtatgtcatatgctcattcttgcaataatcatcaaacctcagttgaggaaaaggatccagaaggagaagacctttggcttagaacccagttgagctgcctgtgggagtggagctgaagcttcgctagattttattttccgctgcagatttcttcatggtgaggactaagtgcctcttatgcaagtatttatcgttttagttattttgatgaatctgtatattaaattgtcagtttgtgttcctcggctgattcctggacgagggttttaatgcacaaattagttcagaaattacttgagaatttctgggcgtgacaagttggtatcagagccatctcgactgtaggtcaagccaaacggttaaacccataaggacgtgtatttgctaaaacaagaatctatttgcaaaagtctgttttcctccttatcccattgctccttgcaaaagcttttctcatcctcccttccccgtctttcaacttgctttagatgaatcccttcaaggagaggttggaaaagatgatggcacactttgatgaaatttggggtgatctgcagacaaagattgatcagattaatgagaggagagaagctctggaaagcaaggcattattctaaaggaagctgagaaatatgggaacgatggttttacaagtgagctttgtcgtatgacgtatgatcttggatatgaggttccaccaatgtacactaaagtatctacttatgttggagaccaattgcattgaaagacaaatggtactctcgtttctgacaaggaagatcttctccaactatcatttactagtgaggccgattgtttcttctatgctcgtgaaggagttgtttacgaagctttgtgtcgtctccggcatcatctcaaggatcgtctggggaatactatatatcactaccatctaaaacatggtgatgatttt

SEQ ID NO: 26373 - DNA, 1496 bp, Oryza sativa
aagacgattatgaagatgtgaagcctattcatgttgtcaagcatctctgcactagaattatttttctcatggaaggtttattcccgtgaagatgagtcacttgagaagcccaagttcaaatgtaaaatgaagaagtcttaaagcacctatggcagaacctaagctttaccctcaagagtagtggtctcttgtttagttagatcgttgtgttagcttgcttgcttaagttttgtttgtgtgtgtgtgggttttagcgtatggagtatatcgagggttgtgatataaccatactagtttcagtgttcagttcagtgttaaagaacaacctacctcacatcaataaaagttaaagtttagtaaaaaaaaaagtctattctattctgagtctcctatctactttcttaacccttcctttctctctcttacctcctacctaagagaatggatttaaggaaaggaagttttgtgctcattagtgccagtggttttaacaagttaacagctaaggaacaatgtgtctggatctccaaataaaattcatcctgaagctaatgtggacaacacagtctgtcatccaaggaaagtaaaaagtcagaagctcaagggataccattgaaaaaaaaatcaagagaattctttacatttggtctcattcggtttaaggttccaagtttgatgtgagcaagagtcattaaggaataagaaagacaaaagcttacatctatgtcatcaagatgatcattatcactataatgtggtttaaagaaggaacaattatatcaaggtgtctaaaaagacaattctttttgtactatttttaagtcaagaaaatagtgtcagcaagaccaagacactcaacaatgagaaatataaagagatgttgatttagaagaaaaaatagcaagaagattcaattcacacgtcttcagtgtgaagtaaatggaagttaaagtttgcattgttatggaaaagtgaacacattaagtagagcaattattcctgttatcatggtaatggaatatcaagtgaaggctcggttcataaaagacttgtctttcaattaatggaatggatcaggagataatgattgctagcccaatttagtaatagtcaggctcgtgaatgatggcagaagttgtaatcgatcattcgatggtttcttgttgatggcagtaatcatgacattatttctgttaatagtaaccatataatactatcagatgtgatcaacaaaagtatcatcaagaaaggtcgcgctcatgacaattaaggaccggttcgcgagctattgttgtgagacattaaccgtaccaaccacaagccagcgtgggcaatggctttatcttttgtatagcatgattcattatggtgtgccagactgagaagtggcgagaagtccgtgggggtcgctggggagtccattgcctctggttttgagggggagattatgatccaggaatggtgcactgtggtgagttgtgttgtgcgaagggtat

SEQ ID NO: 26374 - DNA, 2726 bp, Oryza sativa
ccatgacaagccatccgataggaccacaatgctttggccaacctagtgtgtcattgccgaggataatcagagatctttctcttaatgaacttaatcaaactcttattagatgcctcggcttgcccattagcttgtgcataatatggcgaagaattcaacaatttaatacccatgctatcggcaaactgaacaaactcatcggacacaaaaatcgagcctcgattggttgtaatggtctgaggaataccaaatcgataaataatatgcttttgaacaaattgtatagcatcccctgaatcaactttcttcaaaggaatcgcttctacccagttggtaaagtaatcggttgccaccaatataaacttgtgtcccttgctcgatggtggattaatcattccgatcatatcaattccccaacctctgaatggccacggtttgatgatatgattcataaccgatgctggcgctctttgaatcgctccaaacttctgacaatcttaacatcccttgtaatatcggaagcaatcttccaacattgtcggccaaaaatatcctacccgccgaagcaaccacttcatcttataagccgattcatgagtgccacatataccacgcctatcgcaaccttggcttgataggcactcaaacatttaagcaataccccatcaatcgtccgataatacaattcatcatccaacaaggtgtatttcaaagctttatagcgcaattttcgtgaagccatgcattattttcgaatgtcatcgggtggtgagcctttcccagataattaatggccgaagatgactttattttcctatgggttacaatttgattagcttggaccttatatattggattggttcagctaaatgctataagtatagttgcttagccatgcttagaaacattagctaattaatgggatggatcatatatactacattattatttatggttatatttaatggtagctcacgatggttaatcgtgtaaagttaattaattgataattaaaacatggttaaaggtgggttgtgagcatatggttttgatggttgtgctcatgacaattaaggactggttcgcgagctactgttgtgaaacatttaccgtgccaaccacaagccagcgtgggcaacggctttatcttttgtatagcatgattcattatggtgtgccagactgtgaaacggcgagaagtccgtggaggtcgctggggagtccattgcctctggttttgacggggagattatgatctaggaacggtgcattgtggtgagttgtgttgtgcaaggggtaatgtcacagttcctttccgaggtaccgtggtggtgctgaggcgcatggtgacatgttgtgggattgtgtcttgtgggtacaatggtacacctctgatcagagtaaaactataaaaatagccgtgcccgcggttatgcgcgagttgggcaatgtttttcgtgattagtctcacgctactcattaatggtatttgtgctaattaatgtgactcctggtttggaatggtatattcctggtatagaggtttgatttgtacaaccggggttggttgttcagatgaggttgggcctatgcaacacgggtgtgttgtatggtgtttatttaatactgcttaattattcaactgttttactattctcttaaatatttattaaatgatgtttatgcaaatgagctttattatgccatcctttgttatcctgtgcacttccatgtttgctgtgtggcttgttgagtatgtcatatgcttattcttgtaatattcattcatcagaggaggagtacttcagtgaaggtgatgatctggaggactaggcttgatccgggttaagttgcctgtggagtggagtcgccatagctattccgtagtttgctgttatttttccgctgcgtagaatgttattctttgagaggaactatccacctctgtaataaattattatttgcgaatattaaatagctgtgtgttcgtactctattatcaatttgttattgtgtgcctcggctgattcctggacgagggtttaacacacatgtaagcgtttggaattttggatagaaattccgggcgtgacaccgattgagatggattctgcaaatattggaaaacatcatatcttcaatcatcaactgttatcgtagcaacttctactttgacatcctttatcatcggcttgtactccgatgctccttgagccgagtcattagcttcaacattttgctctcgagacacatgcgtcaaagttaccagccgaaatccatccatcaattctcggcacttctcattgtaaaccattaatgtatcattcttgcggtcgtttgcggtcgtcgccgaaggttcagaaggccgttctctctgggcaaggcaagtcacatcatccttgagcatattgaatcctagtttataaaattattttgatttaaattaatgcattatcgctttatttaaattcccgcattatcactgttttatttagccatgcctatttacctttgttatgaccttattattattgttattgttattattaccttgttcaccctagaataaacaaaacctcaactagtggacactctactcatggcaccactagtttagttttaggtagatgcttcgcaatttaattaggtaacattaggtggtttttcaactatagaccttgggaaatattcatatcatctggatactatggaatggtttggttatt

SEQ ID NO: 26375 - DNA, 1816 bp, Oryza sativa
atgccacctgagagagacagagttccggatagacctagtacctggaaccaaaccctatccataagagaccatacagaatggcagctaatgagttagtagaggtaaagagacaggtggatgatttgcttcagaaaggatacattagacccagtacttcgccgtggggagcaccagtcatctttgtggagaagaaagatcatactcagagaatgtgtgtggattatcgagcgttgaatgaggtcactatcaagaataagtatccgctacccaggattgatgacttgttgtcacgcccagaaattcccaaatagaattccaagcagaatgtgcattaaaatccccgtccaggaacggctggggtacacaaacgacaaagttgacatacagatccacatcttacaaacattataaaaagtcttacataaatgcagcggaaaacttaaaggataactggagctaagccttgacttggtctacagcgggaacaccactccacaggcatcctcgacggcatggacgaagcctactcctcggagaaaccactatctgacgcatactcgaattctggggtttgggggaaaatagagcaagactgagtactacccacagtactcagcaagtcataccggaatatgggtatgatgtagggaaatatcaagggatagctataatggttcatttgcataaagcgagcatttataaacataagttgaaagcagtaaaacagttgtaataattaaacaatattagccatccactgtccaacactaaaccacgttgcaacaggcccaaccatccacctatattattcaattccattagactaatctagagtgaatctaatcacggtgaatctggttgaccgcccataaccgcgggcacaactattcgaatagttttactctgatcagagatgtacaattgtacccacgagacacagccccacgacacgttacagtgcgccgacatgccaccacgacataccagaaagaggctgtgacaggacccttcgcataaccccctctaaccaagcacaccacacctcaggtttcacccccgtccccagcaggcaacgggcagtcccctctcgtgcctaggtgaatccggaagcgacagaggccgtcgcagggcccgccccgctccatcacgcccacccttgcctggatgcgtcggctagaggaaaactacactacaagcccagccgttgcccacgctggcttgtggtaagtgccatgggcgcgactagcaaaaccatgcacccacagcccaccataggatttattttaattaagcaacaccaggacggtggtactgatccaacatcaacactagaacctgaagtctatacattaatatgatttcccccattgtgtgctagttgaactaagcatggctaagcaatccctagtccaatatctagtcatgtcattccccaagctaacaaaggagcatggtaccaaaagaaatagcatggctataacagtaggtaaacatcccatagtattattgtaaaacaatgcagaatttgaagaaaaacagtagaacatttgcaatataggatcaacatgttcaagtgacaagcatgacttgccttgctctgcgactggaggaacctcggcgactatttcaaagtacaccggagcgtcgggagagccggaatttaagcgacatacaaagcaaacaatacaaaaaagctataagactactgaaacagagaacaaaaccaattttaatggattctacacatttttcttgatttactgagacttgaatggccttaaacggagatcggatgaattagttatgaatttcagaa

SEQ ID NO: 26376 - DNA, 3471 bp, Oryza sativa
cggagaagatgtcttaggtggagtcttggcttataccccagttgagcgcctgtgaagatggagccgtaggcccgctagtccgctgctgtttatttttgattgtcaggcctgaagtgcctttgtaataatgtaaatattatcgatataataaagatgtgccttttatatcatgtttgtttggtgtaccccggcttttcctgggacggggattaatacactagcattcgggaaaaggcaattttctcggtcgcggcagctgttgacatttggaccgtaaaggagttttctggttacagccgagtgtacgtgaacctacagggtcgcacgctcaatgggccagaataaggggattggatggagatccaatatgagcttaattcggatagggatccgagtgggagtcctacgggtcttggaggcccgagtgatagattctatatattcatgagggatgtgaccagcggaggtaattgcatcacgtgagaaaccctagctgtcactcccctccccgagcaaaaccctagccgcgcgtgggtgctagcacatctgcgcgtggcgttccgtccttgtaggtgtggatactcgtagaggcgccgctggttttcggttattaataaccaaatttagtaatccaagtatcggagatggagataaaacaaagcggaatccaagataaacatcgtttcggaaacagagcgagaatcggctaaaagtccgaatcggctatgatcaggatcgacagagtttgagtcagactaggttggccgattgagccgatgtcgacaatgtgacgcggtacacgttgtcgggttgagttaatgtgcttcatgaggattgccacgcatggattgagtcctgagaaggcaattgtatctattaattaggatatttcatgtaatttccttagagatatgtttgggcaaaagtctgccataaagacttatggtatcttagagtttattagagataagagtcgtgtctgacacagacatattttgcaatctcgggtataaatagaccccgagtctcatgtaatacaacaacacacgtttaatacaatctcgggtcatcgccacccttttactttcgtttttgtttcgacgagttcttgctttcgggttgagctgcatcggtttcgatcttcaactagaggtaaaacatgttatggcggcttgcattctcgggattagtgcttctatttttatgataccctaatcttgtttatgtaattcgttgagttatcatatattctatataatccctggcaatattgttcttctttttatacttatagctgcatcagttgagtttgattttataagtcgtgattagaatctcaatttctagcttgcttttggttgccgattagggtagcatcggggtttcagccgatcttacctgatttagccttatatttcatgtgcttgattgatatgctaaatctgccctttatgttaagatcttgttgcatttaggtatattaggcttctgtttgatatattttacttgcttaatatagagtggtatcggagtattagccgatacatgctagatctatctgatcggctatgctatgagcatctataatctcattgttagtatatatttcgatctaagtgatttatactgtttcggcatggcgaccgatctatcccaatcacttgatttaagtatatatcgacataaagattatatattgttaatatctacagccgatcgagtagatttaagtctttcttatttattcatgattgcggatcgattcacatatgacatcggctcaaagataaatgatatgtcatcggctgctggccgatcggctatcatttatggatttaaccgtggtttctttgtctttatttcttgttgattgcaggatcaaatcaactggtgtgctcacgaacctaaaggcaagatttttggacctgcactgaagttaagtagatcttccaggcctcgtgtttttgcatcaacacgcttttggcacgttgccagtgccgatttagctctttgggagatggatggtattgattgcctgtctggaaaagtttgggatggagattttctaaaagtgtccgattgtgatatacaaccaattgaagatggagagcccaaattattattttgagggcatcaaacgtctataccaaggacacagtagataatctcgatgacaagcaaggacagggtttcatgtcggctgatgatttggaagaaattgatataggtccaggtgacagaccaaggccgacgttcatcagtaagaatttatctccggaatttagaaccaagttgatagagcttttaaaggaatatagagattgctttgcttgggaatattatgagatgccaggactcagccgatcaatcgttgaacatcggctccctatcaaaccgggggttagaccatactagcaaccgccgaggagatgcaaatccgatatgcttgaagctgtcaaggctgaggttaaacgtttgtatgatgccggttttattcgtccatgccgatatgctgagtgggtttccaacatagttccagttatcaagaaaaatggcaaagtcagggtgtgcattgattttcgggatctaaacaaagctaccccaaaggacgagtacccaatgccggttgccaatcaattggttgatgctgcttcagggcataagatattatgttttatggatgtcaatgcaggtaacaatcagatctttatggcagaagaagacattcataagacggctttcagatgtccttgtgcaatcggcttgtttgagtaggttgtaatgactttcggtttgagtgaatatttgctttaaccgaatttgatcttcggtatgaatcaccaaaggcgattaagggacaggctatagccgattttattgtggatcatcgtgatgactcaatcggctcagttgaaattatgccttggacattgttttttgatggatcagtatgcactcatggttgtggtatcggcttggttataatttctcctcggggggcaagtttcgagtttgcctacgttattaagccctatgcgaccaacaatcaggctgagtatgaagcggttctcaaaggattgcaattgcttaaagaggttgaagccgatgctgttgaaattatgggtgattccttgctggtgatcagtcaattggcaggagaatatgagtgcaagaatgatacattaatggtttacaatgagaagtgccgagaattgatggatggatttcggccggtaactttgacgcatgtgtctcgagagcaaaatgttgaagctaatgaatcggctcaaggagcatcggagtacaagccgatgataaaggatgtcaaagtagaagttgctacgataacagttgatgattgaagatatgatgttttccaatatttatagaatccatctcaatcggtgtcacgcccggaatttctatccaaaatcccaaacgcttacatgtgtgttaaaccatcgtccagga

SEQ ID NO: 26377 - DNA, 1474 bp, Oryza sativa
ccattaatgagtagcatgagagtaatcacgaaaaacattgcccaactcgcccataaccgcgggcgcggctattcgaatagttttactctgatcagaggtgtaccactgtacccacaagacacaatcccacatgtcaccatgcgcctcagcaccaccacggtacctcagaaaggaactgtgacattacccctcgcacaacacaactcaccacagtgcaccgttcctggatcataatctccccctcaaaaccagaggcaatggactccccagcgacccccacggacttctcgccgcttcacagtctggcacaccataatgaatcatgctatacaaaagataaagccattgcccacgctggcttgtgattggcacggtaaatgtttcacaacagtagctcgcgaaccggtccttaattgtcatgagcacaaccatcaaaatcatatgctcacaacccacctttaaccaggtttttattatcaattaattaactttacatgattaaccatcgtgagctaccattaaatataagcataaataattatgtagtatatatgatccatcccattaattagctaatgtttctaagcatggctaagcaactatacttatagcatttagctgaaccaatccaatatataaggtccaagctaatcaaattataacctataggaaaataaagtcatcttcggccattaattatctaggaaaggctcaccactcgatgacattcgaaaataatgcataagttgaaataaaacattagctttaaacgggttcaacatgctcaaagggttgtttgggatctgtgtgacttgccttgagcttccacaaacacttccgaaccttcttcaacgaaagcgctctcctccggaacgtcggaaactaaagcaaactaacaaaatcaacaaaacagtacaaaaactagcataaacagtacatgtggatatttttaacatgtagatctcagttttagaaaaatttagcaacttgaaccactcgaatcggagttacgatgaattagttatgaatttccgaagtttaattgatttgcatctaataaagaaaaactaaaaggaaaagattatgacgtcatgctgacgtaatcctcgccggcttgacacgggcgatgacctcgccggcgcttggaggctcggccggactattggagggcacctacgcgtagaggacaacattgcgaactcaccggtactaacaaacgcgacggatgacgacggatggcggccggcggcgagcttgagcggcggcacagttcggtcgacggcggcggtggctctccgtgtcgagtcccaaaacaactctcaaatacatcctcgaaattatgcatagaataagtaaaaatccatgtgaaagcgtgcccacaattagactgggcaaagttaaaagtcgaatacggcttggaggatttttgtagatttcataaaagcctaaaatgagtacataaattttagtggaa

SEQ ID NO: 26378 - DNA, 9986 bp, Oryza sativa
caagccgatcgtgttcgccgcctgtgtttcatcaagagtgcgtcgtagccccgtcgtcgtctttgtcctcggctccgcatcatcaagccctgtgtcggccgtgtctcgcctccgtccaaggatcgccaccgaagtcgtcccctcgccgttcgtctccgtcgtccccaagccgccaccgccgtgcccgttcatcgtcgttgttcccatgcctcgtcgcgtggtggtaaggatccgtcctctcgctgcccccgtcctcgtcctttcagtgtcgcccgtgcccgttgtgcgattgtcgaccccggtacccgtgtatcggtgtcggtagtcgttcgcatgtgcgtgtggtgaccatgttagtgtgcccgctcggtagctgtgtggtttccacatgtgaagcccgcgtggtgtctagtggagtccgtttgtcggccactcacctcggttgacacacggggtctgtttctgtcgacctgtggactgtctctgtgtactcggtataccgtggtcctttaggttgacgtgtggggtacgcttgtcaacagcgtagccttcctgtcttttccaggctagcgcttacacatgttttataattgcaaaacctaattataataatccacaaatcttcatataacagcattaaacttcggatgaccagatcttggtcatacgaactctgaatcgacccgttcaagtctcttaatgtttgttataacctaaagaaccatgtgctttctttttatgtattgttattgcttctttataggcttgtagctttacttgtgtgcttcgcgtagctttggtcgttccggaggttcccgaagcgtggttcgcagtcgtcgccgaaggttcgcaaggctgttctatctgagcaaggcaaatcgcatcacccttgagcatattgaatcctagtttgtaaaactattttgatttaaattattgtattaccgctttatttaagttcccacgttatcactgttttatttagcacttcctattaatccttgttatagtcttttcattgttattgtttattattaccttgttcaccctaggaaaatgataccgcaactagtgggtaatctattaatggttccattagtatgaatttaggtagatacttcgctgattaattaggcaacactagatggttttataacaatagactttgggagttctcatagcatttggacactatggaatggttggcttttggtggaattggacacacacctctcttcctctttcaaaacccctaaaacctattttccggtggggtttgggtgcatgtcagttgtgggaagtagtaccccggccaatacaaggattaagctcgggcctctgttgcaaagcactaccgtactaaccacatgtctaatgggtaaggcttaactcgatgctcagtctagtcctgaacaaaaggacacggatagagatggttgaagtcgttgcgacgatggatatctctgaggcaaatgaaggctacacgaactgcgtctcggtaattgagatgtctaggcaaatgaaggctacatgggccggtgtccattagttgagatgccatggcacaggactagtacgcgggtggtctcacccctatgtgtgtggcgcacctggtctagatcctgttgctaggggctcaatcctggcctgcctgtccgggataccggctgtaggcagggttgggtcagtacttttgttcacgactaggatgggtgaagggttatgtcacatgtttacgacgggttccaaggccatggaatgcggagtaaagatgtgtcttgtgggtaaagatgtacacctctgattagagtaaatctattcgaatagccgcgccctcggttatgggcaagcctatcaatgtacccaagttagtggtttaattcttaaaacttgcttaacaactaaaatgtagaatggttggcctgggttggcttgggatgagctgggacccaggtcggattgccagttcggtctgaatcatcgtaggccttgggttaagacaggttcgtgtgggttcacggccttgattaataatatagtgttttactgcaaaacctaacactatattatcactccttgtacccccttgcattaatcatgcatcttccggtgtgacttgctgagtactgtggttgtactcattcttgctctatctttcccccccttcagtaagagaagctttggagaagaagtcctaggtagagtcctggcttataccccagttgagcgcctgtgaagatggagccgtagacccgctagtccgatgctttttatttttgattgtcaggcctgaagcgcctttgtaattgttgacggtcgttattgattagtttcgaccgtcaatattaccaaaatagaggagaactagtgatgcttgcaatgcataaatatgttagaataataatattccactagtattgggtttactaaccttttgcagagaatgacaataaaatgaaggagaatcgacatcaacttaaatgataaatcaatcgaacgatgtcgaagtccagacttatgtatgaatgggccaagaactcagaattgacacgacgaatcagaccaaaattcacaagtctacaaagtaaagcagcagaggaggccaccagcgaaaatgtgggctggttgggctggccccaggttcggccgaacctggtggttcggccaaacctcccgtgaagccgatggatgcagggttttgagggaacggtggagattcacaacctatggcggttgaagggtattaccgacctttccaaccgccataaccgtcattacctgcctatttaagaagctcactctcttcacttcaacacacacctcaagcaagagctctctcattcctctcaagtttagtttagtagtatctagctggtggaatagaattagaataggaatcaggagtccgaaagcctttagaagagtttgggtatggctctagtagcttccctttcctcttttgtaagctttgtacttttattagaaaactcttctaaatacatttatggtattggaatactttccaagtatatgagtacctactttacattatgttcatgttatactgagtatactgctagcttatctgggagatgctttggtgcgggtatagtgtttgcttatgcaattactctatgtcatgacaatgatattagagtagtatctagtagtttagacgtggtgtctagattacgggatatcattatttggggttatatattgcggatgagaggttggccgctgatggtgacagctcagtaagggtattcctccgcgcctatatataatcctaagttaatttccatgggagggtattcctccgtatttagctccggttggatggtcatgacgggctgtcgtaaggaactcggcagtcaggggtggcttcttgaagtaccaggagggcatcggatagagggtattagctagtataccagttaactagaatgtatgtatactatgtatattagaggtataggaatagattctctttctcttttctttccacctagcttagattaattattatgagcatgagtagtaatgcttgtgtgtcactctacccttggattatcttaacccctgcttataatacgattatcacaagtaatatataagttattagttgagttctctctacgtgatcttcccatgggataaaataaatacgataccctttgaatactctcggatgaagtgctacaatggtatatccgtgcgcttgcagatgaactctataaccataatataccagaagtatttctgcgtcattactggaaattatatttctagtaatgtcgttaagaaataccagcaagcatttctagcgccgttgccggggaagattcatgatagagattacttgaactaatactttatatttacctctgtataatcattttcctttgcaggcttatcttggttgttttcactctttcttgtgaaaataactggtagtgcattttcctctgtataatcattttcctttccgttggtagtgcatgactggttccaacctgccggaaaacttcaaagaaaatccataagttttcttccggagcatcaggccgcgagtcattgcttcgcagaaaactttaccgacagagaaaccagccgtaccagcgccaccaagactcttcgcgagttcgctgctccctctgctgacaatgtggccatcgggccacaagtcaacataggagatgtggatttcgatttgaagtccagcctcatcacgatggcgcaggctagcccgtcctcatcatgggatggatgactgtctgatcctacagaacttttacaatgggctcaccctgatgtcccgcgatcacctggacgcggcatctggatgagccttcttctctaaaacggttcaaggagccgttgaactcatagagaagatggtctccaatatgggttggagcgaggaacgactccagacccgtcagcgaagcatgcacaccgttaaggagacagagttacttgctgccaagctggacctcctcatgaaatgattggacgaccatgagaaacggccacaaggcaccgtcaaggccttggactctcacatcacgtgtgaagtctgcggcggcacgggtcattctgggaacgactgcccggaaatccgtgaggaggcgatgtacatgggcaacaacaacaatgggtatcgtccacaaggaggtcaggagtggaaccaaccacgcccatattatcaaggaggtaataataacagtaacttctttaaccaaccctccttgaaggatcttctttttgtgcaagctaaaccactgatgcactaagcaaaaagcttgctgccaatgataagatcttagagaacataaatgttaagctagatggctttgcttccgcatttcaaaactagctgagctttaataagatgatcgaaacccagttagctccgttggcatctttagtccctacaaatgaatctgggaggattccggggcaacccgactcctccattgaaaatgttaaggcgatcacaacgaggggaggtaagtccactcgtgatctgccatatcctaagcctgtaggaactaatgggatgtcaaaagaagcgccatctattgactcgttttgttgaagtaatccaaaagattcacatcaatgttgtcgcgaccgagaaaatttgcattttcccgaacgctagtgtattaatccccgtcccaggaaaagccggggtacaccacacaaacatgatataaaagacacatctttattatatcgataatatttacattattacaaaggcacttcaggcctgacaaacaaaaataaacagcagcggactagcgggcctacggctccatcttcacaggtgctcaactagggtataagccaggacttcacctaagacttcttctccaaagcttctcttactgaaggggggaaagattgagcaagaatgagtacaacccccgtactcagcaagccacatcggcagatgcatgattaatgcaaggggggtacaaggggataataataggggttaggttttgctgtaaacagcatttaaatgtcacttagttgcccaaagctattttgtaaacacgatccaagagctacacaatattattaaccaaggccgtgaacccatacgaacctgccttaacccaaggcttacgatgattcagaccgaactggcaacccgacctgggtcccagcttgtcccaagccaacccaggccaacctttccacattttagttgttaagaaaattttaataattaaaccactaacttgggtacattgctaggcttgcccatatccgagggctcggctattcgaatagatttactctgatcagaggtgtacatctttacccacaagatacatctttactccgcattccatggccttggaacccgtcgtaaacatgtgacataacccttcacccatcctagccgtgaacaaaagtaccgacccaaccctacctatggccggtatcccgggacaggcaggccaggattgagcccctagcaacaagatctagaccgggtgcgccacacacatagcggtgagaccacccgcgtactagtccagtgccatggcatctcgactaacgggcaccgacccgtgtagtcttcatttgcctagacatctcgattaccgagccgcagctcgcgtagccttcatttgcctcatagatatccattgtcgcaacgacttcatccatctctatccgtgtccttttgttccagactagactgagcaccgagttaagccttacccattagacatgtggttagtatggtagtgctttgcaacagaggcccgaagaccggtccttatagtggccgaggtgctactagcaaaaccctgcacctcgagcccagcctaaaaccattttgggagttttgaatagaggggggaggtgtgtgttcaattccatcacaagccaaccattccacagtgtccaaatgatatgagcatccccaaagtctaaagtaataaaaccacctaatgttgcctaattattttgcgagcatctacctaaattcatactagtggaaccatgaatagattacccactagttggggttttattttcctagggtgaacaaggtaataataaacaatagcaataataataaggtcataacaaaggtaaataggcatggctaaataaaacagtgataacacaggaatttaaataaagcgataatgcattaatttaaatcaaaataattttataaactaggattcaatatgctcaaggatgatgtgacttgccttgctcagagagaacggccttccgaacgctcggcgacgaccgcaaaccacgcttcgggaacctccggaacgacagaagctacgcgaagcacacaagcaaagctacaagcctataaaaaagcaataacaatacataaaaagaaagcacagggttcttaaggttataacaaacattaggagacttgaacgggtcgattcagagttcgtatgaccaagatatgatcatccgaagtttaatgcttttatatgaagatttacggattattgtgattaggtttcgcaattataaaacatgtgtaagtgctaacctggaaaaaacaggaaggctgcgcttgttgacatgtagactccacatgtcaacctaagggaccacggtggaccgggtacacagagacggtccgcgggtcgacggaagcggaccccgtgtgtcaaccgaggcgagtagccaacaaacggactccaccagacaccacgcgggctgcacacgtggaaaccacgtggctaccgagcgggcacactaacatgatctccacacgcacaagcgaacgactaccgacaccggtacatgggtaccggggtcgacagccgcacaacgggtacggggcgacaccgaaaggacgaggatgagggcgacgagggagagatccttaccaccacgcgatgaggcgtgggaatgacaaagacaaacgagcgcggcggagacgactcgcggacgacggaggcgaacggcgagggaacaacttcggcggtgatccttggacgaaggcgagacgcggccggcgcagggcttgacgacgcggaggcgaggacgaagacgacgacggggctgcagcggcatacttaacggatgcggacgacggacgagaacgacttgacggagggacgaacgccacgacgaccgggaacgacgagaggacgacaacgatgacgaccggggccggcgaggagacgatgatggcagccgcggcagctgcacagaggtgaggccggcgtgggacacgccgcagcgatgcccatgacggtggcggcacaacgagacgaggagccggcgaggaggagcggccgaccgaagggacgtcggtgacgacgaggatggagaggaggcgatgccgaggacgacgtcaccagttcgccgctgcgatgcccgaggtggtggtggcgcggccgacggcgcacgggtagaggaagggccaaccggggaaattccggcgaagtggatggagaggccggcacggcacggcggtgttccggcgaaaccgaggagtggccggggaaggagacgatgccgcggtatcgaaggaggagacgaaggcgtcgatcggcgtatcggtgatgaacaggagccggccggagacggtgtagtggtggcgacgccactgaacgccggcgagaacgcgcctccggtgctctccgcgctaaacggaggacggcccgggggagaggaggcggctgcgaggctgctggtggcgacggcgcgaccggatggcgctccggcgaggtgggagaggcggctggaggcggccggcggcacaggagagagaggaggacggcggggagaggtggtgaggccacgggagagcgcgggagggggctaaaatgatagaacggagtgagggggttccattgtataggatggtggagggagccgggcatgggagaaggcggaacggccacgggaaacacgggcggcggccatggaaggcggccgggaatggcgcggccgttccgagcgttagagggcacgaatcaagggggaaattggggggaatcaaagaggaatcaatggggattaattccccctatttaattttggaatcccatgagtaaatcgcacagatttgagggaggaaaggagctagggttcacgggagagagaggaaggaggccgggcgggagcaggacgacaacccggcgcgtgggacccatgcggggcgcgcggtcagcgcgcgtgagggggggcggctcaggaggctggggcggctgggtggggcagcttgggccgggaggcggcccaggcgggaggggaggaaaagggaatgggccgggaggggaaggggaggcccaagagaaggagggagagaaggagagggagagaaagagagggaggaagagaggacttggtccgcgggccgagggagagagagagagggggcccaaaggaggaaggaggattatttttaggtttttctttttaataaactttgataattgttgttgttgcttaataaatatttccggtgctctgaaaattcaagtaaaatttgagggctcattttagaccaaggagaatttaacaaaaattctccgggcgacattcgaatttttcttgtacgtattttagtgtttgccaatttcttttcgaattttaattaattctattattccttttagaaaatgatttttgtttcgggatgaatttctcaggacgtgacaaaaccaccccccttacaggaatctcgtccccgagattcgaggaggctaacaagaagattggttgggcggtcttctcttcttgtctgacttctttcgtcgcgtcttttataacaaacttgcctagcaaaacttccccactctgaactgcttggcttgatctcctgttgcagatggaatcttcttttcacctgacttgtccttggttgcaccttgagctaacttcgactgggatgcggtacttgaagacagggcttcagttccagaacttctcataattcatatctttggcgtcaacctcatacaagttacccacttcacgttatgcaccgatatcagcttgtcattactaggataccatgcttgccatcgggagaataccacgcttggcgtttccttccagcttaccaccatatgctttagactatgatatcccgcttactaagaataccatgattgacaagttgccactaactgtctcatattagctttcctggtctccggttctagatatttcctctattcaatgtgagggtcgataactttgcctttgaattatgtttcccaagggaaccaacttatcccacttgacatgctttgacgtcttcccaaatgactttactgctgaacttgttattgtctgatcgttatcctgccaaatctgaagcttcgttgttggatgtgattttaatctgacctctgtagattttccttgaacatatcacttgtttcataactgggaatggctctcacgaacaagcaactcggattcactttctttacattcggtttactttccactattct

SEQ ID NO: 26379 - DNA, 3165 bp, Oryza sativa
aagtaaaattgagggctcattttagaccaggaagaatttacaaaaattctccgggccacattcgaaatttttcttgtacgtattttagtgtttgccaatttcttttcaaattttaattaattctattattccttttagaaaataatttttatttcgggatgaatttatcaggacgtgacaaatgtgccatttttggatgctatgcaagtaccaacatacgcccgttatctcaaggtcatactcaacaacaagagaccgctcccaacaacggaggtggtcaagctaacggaacactgcagcaacctgatactccacaagctccaggagaagaagaaagatccggggtgtcccacgatcacctgctcgatcggggcacaacaattcgtccatgccttgtgcgaccttggagctagtgtcagcgtcatgccaaaaaacgtctttgacaaactcaacttcatggtgttggcaccaacaccgatgtgcctccaactggctgattcatcagttcgttacccggcggggatagtggaggatgtgcctgttaagatacggaatttcttcatcccggttgattttgtggtgctagacatggacatggggaaggagacaccgctcatactggggcgtccgttccttagcaccgcaggagccaacagtgacgtgggaacggggagtatcagtttccatatcaacgggaaggagttaaagtttgagtttcaaccgaggacggaacaatgcttcatggtcagaatcaagtacaggccaaacccgcagaacattcaagaggtcgaagtggagcaacccaagacggatagcctggtaaggttcatgcagaacttcctgggaaaggaaacaacaatgcccaggaaccgttattggaggacgctagtaaaatcacctgtaccggccaagaagttagagcagccagctcagaggaagccgtcttctgcactaaaatcaaaggtgtggaaggaaaagccaaagacgcccgctccattacctccggagacgggtggaaaatccgtgaactgaatcgaaaggaggtatggtcttgcacgacggactttaaatgacgcgaccttcgccaacaggtaaattggtatgtatccgcatatttgttttcaacaatttgaatttttgcatcaccacatatttgaatttcaaaattgcttttaggacttttgaattttgaggaaattcttcaaatgaatttttcagagcaaaccaaaataaaattttcaacgaaaattcactgtgccacgatcacactgaccgttggattccaacggccgaaagtggggccggttgggcccactaggggttcgcccgaaccggccaggcaacggtcagctgcctcactttttgaggcaacggctagtgggttccacatgtcatttttgaccgttgtgggtatcctacaaaagccagccgcccgagagagggaattctaccccatttcaactcattttcatttcctctccaaagtttgctcccaagttcattcatgctttgatagttttcctcaacttcaactctttagttgcatacatacaagttgctttggtgaaactaacaggcgggtgaaactcttgtcatttctaacccccgccgagttagcctgttcttgctccattgtgtagtatgaggaggcacctgtctcgtctgtcaaaggggtcgggctctctatcaagtcgtcatgacgagtctagtactcgttcatcagccgatgcctcgatggaaaacgccgacgctccgcgacaactcctgagcgacactgacctcgaccttgtcagtgatcgggagagacaagcctactacatcctgagcgaccgggagtatgctcacacgcgagaatactcaccggagttgctgaaaaagataggtttggatgttgaatttcgttctatttggaaagctgttggttggcagagatttgctgtggtagatgagtctggttctcgtttgcttactttgcaatttctgtgcactttgaaagaaatagaagatggtatttcttttcgccttttcccgtaaggagttcacgctcacatgaaaggcttgagtacacttcttgtttttcacgattcctttaaaatcgatctccagaaaggaatttcttggttcaagaaaaataggttttgggaagatatttcgggtgctccaatttgcaagaaacctagaacgaatgatatccataatcctgcacttaggctcatgcacaaatggattgctatgactttgtttcctagaagtgatctgagacccattaggggagatgaattaattatcatgtttgccatggttagaaagatcaaaatttctcctgtaaaatgtatgataagacaatggttagaaaatataaagttctttgctcctgttgagtgcacttctctgattactcggatagcaaaagggctaggggtcgttagcgaccaaattgcttttatctcagccgctcgtccgcgtattgatgaggcttattcagtgcaagggcatattttgaaacatggggtagatggatctttgatatacttttttcccggttgtacaaatgaaatcccgttgccaaatgcggggtatcatttgtacaactgccatgaactaaccattcccctgcagaccgtagaagaatcccgtgcagatggaacatacagggagacgcgcaagatgacaaggaacgaacaaggaagttcatcaccctcaacacccgtgcagatgtatgaggcaggttgggcaccaactggggatgcacccggatggacccaagctccacgccatagcatcggagtctcaacctggtcaagcgccagtgaggaccggtggcatgcgcctgatgacatccactggggggataatcaacctcccagatcaagtggtgtgcctccatgtccaagtgaatggggctcgagttcctctcattgcaacttgggtgaaatcactaggagaatggacacccttgatatgcagacgggggagatccagtatgacctgatggaacacatagctcaaacgcaagaatggcaacaatctgctgatgctcaattcaccaacatcaacaacatgatgcagcaacagcacgacgaccttcaagcatacttttgctttcaggggttcaatccttatcaagggccctaagcaaaagccaagcttggggggagacgggct

SEQ ID NO: 26380 - DNA, 5179 bp, Oryza sativa
gtacacctctgatcagagtataatctattcgaatagccgcgccctcggttatgggcgagccgagcaatgtacccaagttagtgttttaattcttaaaacctgcttaacagctaaaatgtggattggttggcctgggttggcttgggacgagctgggacccagggtcgggttgccagttcggtctgaatcatcgtaggccttgggttaaggcaggttcgtgtgggttcacggccttgataaataatattgtacagttctagaatcgtgtttacaaaatagctctgagcaactaaatatctttaaatgctgtttactgcaaaccctaaccctttatagtataactcctttgtactcccttgcatttattctgcatttgtgggtgtgtcttgttgagtacggtggttgtactcagtcttgctcaattttttcccaagcccagaagaagagttcctggaagatggaggttttggtgtctagctcgtgcctgccgtcaagcgcctgtggtcgtcgccctagtcttccgctgtttttcgttgtctttgagtgtgctgggccgtcgctgcccatgtaataattaactatttacgcttccgcttgttaaactctgatttgtatcaactgttggtgtaccttgcctcctgggacaaggattaatgcacgcacgtaaggaacgcccgttgggttatttccggtcgtgacatctcctgtgaccggcgacggcggcgagggggcggccgaggttccccacctccgtgcgcacctaacggcggcgatggcgaacgcgacggcgcggcgcggctgggcgtcggacggcggcggcggcggcttggacggcgtggcggcggcgctacggggcacaagaaggctcgggagttagggcaaacgaaagagggcgactagagggtgctatttatagccttagattggagagatcggactctaaccgcgagtaatcggaccgggaaaaactaggtttaggttttggggataaactcgaaaacgagtttgattcaggtaagatacgaagcgattagctccgatttttgggggtaaagatagaggacaacaaggggatcaaaacccctcaaccaatcggaaggcggcggctcgggcggactcggccggccggaggttgaagacaaccccgacatgtgggccccacatgtcggcggctgtgaggagggggaggccggtggctcggctgggctcggcgtgggcccgcggctcgcgcgaggagggagggataaatcggcccaacggcttgggggagggtttttaacactttttcaattaaaataatttgtgaaatgttgtttcatttattaaaaatacttcccttactcaaataattcccagaaaaatctagaaaatagaggaacaagcaaaatatttaatgaaattttatctagctcaattttatgttgaaaattttcctagatttttagagattaacttgtaggcttttaaaataatttctaaaaatgatttaaaatatgcattattaatttaggcgatttttagggcatgataaacctaccctccttaaacagaatctcgtcctcgagatttagaagaactggcaaaaagatgaggatgatctgacttcaattcatcttctcgctcccaagtggcttcttcttctgaatgattgctccactgaaccttacagaaccgtatgacgcgattcctggtgttcctctcgctcacttccaagattctaactggcttctcaacataagttaaatcttcttgaagctctatacgctcaggatctgcttccttcataggtacacgcaaacatttttttaactgcgacacgtggaacacgtcatgtattcctgccattgacagaggcaactctagctgataagctacttcaccttttcgactcacgatcttaaaaggtcccacaaaacgcggtgccaatttccctttggtttgaaaacgatgaactcctcgcagtggcgtaactcgtaggtatatataatctccttcttcgaaagccaaatccctacgacgattgtcggcatagctcttctggcgcgactgggcaactcgcaacctttcttggataatcttcactttttcttctgcttctcgcaagatatctgtcccaaacacttgacgctcaccagtttgatcccaaaggagcggcgtacaacacttccggccatacaatgcttcatatggaaccatttgtagactagcttgataactgttgttataagagaattccgcgtacggcagattcttataccaacttccaccaaaatctagaacacaggctctcaacatgtcttctaaaatttgattcactctttccgtctgaccatcagtttgagggtgataagcagtactaaaattcaaacgagtacccatctccacttgtagtttctgccaaaacttcgaagtaaactgactacctctgtctgacactatcttcttgggtacaccgtgtaaacataccactctggccatatataactctgcgagcttatttcccgtgtaggttgttttgacaggtatgaagtgagcgactttagtcagcctgtcaaccactacccaaatagaatcatgtcccgacgacgttctgggtagaccggtgataaagtccattcctatttcttcccatttccactctggaatcttcaacggttgcaacagaccggctggcttccgatgttccgccttgactcgctgacatacatcacatagagccacatattctgctatttctcgtcgcatgctggcccaccagaattgttgcttcaggtcttgatacatcttagtgctcccggggtgaatggaatacaaagtttcatgagcttctttcatgatagtatccttcaactccttattgtcgggcacacaaattctttctcctagccacacaattccttgctcatcttccacatatccgatggcttttcctcttctcatgttcttttttatttcttggatatcaggatcattcacttgagcttatctaactcgatcaaactgggtaggttgagcttctaaagcggcaacaaaacctttgttgactattcccaagttcaacctttccaattcctagcataactcccaaggtagatgtcatccttctgacatattacagtagcttttcctgctgagagaatctgctaccacatttgctttacctatgtcacgcccggaatttctatccaaaattccaaacgcttacatgtgtgtgaaccctcgtccaggaatcagccgaggcacacaataacaaattgataatagagtacatttattactctaattaataagcgaataaaatgtcattacagaggtagatagttcctctcaactcaatcaataaagatctaagcagcggaaaataagataaacggcgcagacggctccacaccacaggcagcttgaccaaggctacacctaatcctccacaccatcagcttcactgaagaactcttcctctgatgaatgattgcaaggtgagtatatgacatactcagcaagccacgcagcaaatatgcaagtgcacaggataacaaaggatggcataatagggtttcatttgcaaaagcagcatttagcaaacatttgagaatttaataaaacagttaagtaataattaaacaatattaaatcaacgctatacaacataccctgttgtataggcccaaccattctgaacaaccatcccggctgcacagttctatctccaaaccaggaatataccattccaaaccaggagctaatcaaattattaccagttatagcatcatttactatggtgagaagggtgagactaatcacgaaagacattgttagacccgcccataaccgcgggcacggctattcgaatagttttactctgatcagaggtgtaccactgtacccacaagacacaaccccacatcatgtcaccatgtgcctcaataccaccacggtacctcggaaaggagttgtgacaataccccttacataacacaatccaccgcagcgcacctttcctggatcataatcacccccttataaacaaggcatggactccccagcgacccccgtgggcttatctccgccacttctcagtctggtgccccgcaatgaaccatgctatacaaaagataaagccgttgcccacgctggcttgtggttggcacggttaatgtttcacaaccgaaactcgtgaaccggtccttaattgtcatgagcacgaccatcaaaaccatgtgctcacaacccaccattatcaggttttagttggcacattaattaattaaccaatcacgattgaccatcgtgaactatcattaagccatcattaagtaatgagtcataagttatcccaataatgtgctaatgtttctaagcagggctaagcaattatatctaatatctagttgaaccaatatacatagcccaactagtcaagttataaataacccaaggtatcaaggaataaagtaatcaagaacaaaagggctataacaaagaataggttaattccacccaatgacattcgaaaataaatgcaatagttgaatagaaacaatagcttaaaataggatcaacatgctcaaagggttgtttgggatctgtgtgacttgccttactggccttggaactcttcaaactcttctccggcgaaaacggactctccggaaacgacggaatctaagcagaaaagagcaaaatcaccaaaacagcacataaacaagcatgaacagtacatgtggatatttttaacatgtagatctcaattttagaaaaatttagagacttgaaccaactaaatcggagctaagatgaattagttatgaatttttgaagattaaatcggattaaaacacttaaattgattttaattgaattatgacgcaataatgaattatttttgaaaaggaaaaagggatttattgcgtcagcgggctagggtttcggtggaccgggcgcacggcggcggttcacgcgaacggacggccgagatcgatccatccaaaacggacgtgtcgagatcgatcggtccacgaccggctcacgggagacggggacgatgacgtcagcgatgacgtcaccaccggcgtgcggcggctcggcggctcgacaaagcaagcccgccggcgaacggcgacgcttcggcacgaacggaggacaccaacgggtagagcgcgacgcgatgaactcaccggtg

SEQ ID NO: 26381 - DNA, 2038 bp, Oryza sativa
acacgaagatacacataatctccttcttcaaaactcaaatctctgcggcgattgtcggcatactcttatgacgagactgagccactcgcaatctttcttgaatgattttcaccttttcttctgcttcccttaggatatccgtcccgaaaacctgacgttctcccgtttgatcccacaaaagcggagtgcggcacttccgaccatacagtgcttcgtaaggagccatctgaaggctagcttgataactgttgttgtacgaaaattcagcataaggtagattcttatcccaacttccaccgaagtctaaagcacaagctctcaacatgtcttccaaaatctgattcaccctttcggtttgtccgtctgtctgcggatgataagcagtactaaagttcagcttagaacccatctcttcctgaagtttcttccaaaaatttgaagtaaactgactgcctcgatcagacactatctttttaggaatgccatgcaaacacacaattcttgccatatacaattctgctaaccgactcccggaataggttgtctttaccggaatgaaatgagccactttggtaagtctgtcgactatcacccaaatagagtcatgacccgatgacgttctaggtatttttgtgataaaatccataccgatttcttcccgcttccattcaagaatcttcaaaggctgcagcaaactggcaggtttctgatgttctgccttgactcgctgacaaacatcacatactgctacgtactctgcgatttcgcgcttcatacttgcccaccaaaatctttccttgagatcctggtacattttgatactaccagggtgaatagagtataaagtatcgtgagcttctttcagaattgcatcttttaaatctttgttgtcaggaacgcagattctctcacccaaccatacagttccgtgctcatcctccaagaaaccgatagcttttcctcttctcatattcttcttgatctcttgaatatcaggatcattaatttgcgcttctctaacttgatcaattagagtgggcttcgcttctaaggctgcaataaaatctctactgacaattcccaaatttaatctttcaaattccttgcataattccaatggcaacttgtcgccttctgtagcattgcaatagcctttcctgctaagagcgtctgctacaacattagcctttcctgggtgataatgaattcccatgtcataatccttaattaattccaaccatctcctttgtctcatgttcaggtctggctgagtaaaaatatactttaaactcttgtgatcggtgtacacctcagtacgagtaccgaaaagataatgacgccaaattttcaacgcatgaactactgcagctaactcaagatcatgagtagggtagttcttctcatgcggacgtaactgacgagatgcataggcaaccaccttcccatcttgcatcagaacacaacctaacccaagtttggatgcatcgcaatacacttggaaacccttctttggatcaggtaaaatcaaaataggagctgatatcaagcgattcttcaactcttgaaaactctgctcacattcttccgatcgtggtaacacattacctaggtgataatgaatttccatatcataatccttgatcaactctaaccatcttcactgtcgcatgttcaaatcaggttgagtgaaaatgtacttcaaactcttatgatccgtatacatctccgtacggttaccaaaaagataatgacgccaaatcttcaatgcaagcactaccgctgccaactttaggtcatgcgttgggtagttattctcatgagggcgtaactgcctagatgcataggcaaccaccttcccatcttgcattaaaacgcaacccaaaccatgtcgggatgcatcacagtacacttgaaaacctttcctaggatcaggcaagactaacacaggtgcagtcactagcctttccccccctttcccgctgggccggccgaaggccgaggcccagctgagccgagccggccgcccgcctcctctccc

SEQ ID NO: 26382 - DNA, 2055 bp, Oryza sativa
  unsure (1)..(2055): unsure at all n locations
catttaaccttggtttatttcttcttaataataatttgtgctctgaaaattccactaaaatgtatttacgcattttaggcttttaggaaatatacaaaaatcctccaagccttattcgacttttaactttgcacattttaattgttggaggctttcacatggattttacttattctatgcataatttcgaggatgtattttagatcgttttgggacgcgacaaacctaccccccttaaacggaatctcgaccccgagattcggaagaactggcgaagagatcgggatgggccgccttcagctcgtcttcacgctcccaggtagcttcttcctcggcgtggttgctccattggaccttgcaaaaacggattacccggttcctggtcctgcgctccatggtgtccaggattttcactggcctctccacgtaggtcaagtcttcgcgaacttcaatttgcgctgagtcggcctgctcggatggcactcggagacatttcttgagttgcgacacatggaacacatcatgcacgttgcccaaggaggcgggcagctccaactggtaagcgacttctccgcgccgagcaatgatacggaaaggacccacataccgaggtgcgagcttcccttttgtctgaaacctgtgtacacctcgcaatggcgtgacccgaagatacacaaagtcacccactgcgaattccaggtcacggcgacggttatctgcataacttttctgccgggactgtgccacttttagattatcccgaatggttctgactttagcttcagcttccctcaggatatcagtcccgaacacttggctttccccaacttggtcccacaatagcggtgtccggcatttgcgcccgtacaacgcttcataaggtgccatttgtatactggcctggtagctgttattgtaggagaactcggcataggggagactcttatcccaggtcttcccaaaatctaggacacatgcgcgaagcatatcttctaggatctgatttacccagctcttcttggagcttcttccaaaagtgagaggtgaattggcttcccctatcagatacgattttcttgggaacgccatgaagactcacgatcctagcgaagtagagttcggctagtttggtccctccataggtggtcttcacaggaataaatcgagctacctttgttaatcgatccacaactacccatatagaatcatatccaccttgggttnttggaagtccggtgatgaaatcccatcccaattcatcccatttccattctggtacttggagaggttggagaagtcccgcccgtccgttgtgctcttgcttgacacgctggcacacatcacaaagggccacgaactctgcaatttcccgcttcatactaacccaccagtatttctccttcaagtctaagtacatcttcgtactgccagggtggatggaataaggactttcgtgagcttcctgaagtatcagctgtttaagttctctgttatttggaacgcatacccgatttccattccatagggtcccgtgttcatcctctgtgaaaccagcggctttaccctgtttcatattcttgaggagtccatgcatgtccgggtcgttcttctgagcctcgcggatttgatcgagcaaggtaggtttggcttccaacgcagccaagaatccacgactaactatgccaaggttcagggcttccatctgttgattaagttcgggtggaatgccacggacgttaagagtgttgcaatggctttttcgactcagagcgtcggcgaccacgttggccttaccaggatgatagtgaattcccacatcataatccttgatgagttctaaccatctcctctgccgaagattcagatccgactgggtgaagatgtatttcaaactcttatgatcggtatatatttcacagcgattcccaataagatagtgccgccagatttttagagcatgaaccaccgcggctaactccaaatcatgggtagggtagttgccttcatgaggtcgtagctggcgtgaggcataggccaccacatgaccgtcctgca

SEQ ID NO: 26383 - DNA, 743 bp, Oryza sativa
agctcatccatatctgttcgccagttcttccgaatctcgaggacgagattctgtttaaggggggtaggtttgtcacaccctgaaaatcataaatatataaattgttgttaaattggaattttttagaaataattttaaaagtcttgaagagaagatctaattttaaaaattccaatataaaatggggccagataaaatttcattaaatactttgcttaattctataattcctagatttttctgggatttatttgagctaaggaagtatttttaataaatggaattgcatttaagaaataatttaaattgaaaaaggttttaaaaagtcttcttttggctttgggccgaaagtcggcccaaaacctcctctctctctcctcggcccagccggcccagtccgcagccgcagccgcccgcgcgcgagtgcgctgtcgctgacaggtgggtcccacctgtcggagtcgtcgtcttcgtcgcgccgccgccgcccgaaaccctagtttcgcgccgccgccgttcctttccaaatccggtcgatcctttccgtttccggccgaattgatagaggggaaatgatcatcgggatctcctctaccttttctcttttggaaacatccgctaattcgttttggaagttcgtggaatcgagttcgattcggatcggcctctttcctccgaaccccgaagtttccttctcctccccggccgccgtgggctttcgtcaccgcctccgagccccttta

SEQ ID NO: 26384 - DNA, 704 bp, Oryza sativa
agagtagtactaggtctatctaatagatgtgatcataatccatattggttaaaaaatgattttaagtattgtgactcatacatctgcataccagaaaatattgtggagcagagtacaaataagttaaatgatgtgccagcgcttgttacacatgccctatactatatgcctcttattaagtgccaatgggcaataccattctgttatttgagggctgttgaatgacacttgagaatgtccaacagttacatactcgacacaattgagattaagctaggcttcacgaaatcattcagtggataaacagaagagcacctaattcgaagcctcaaagaacaaaccttgttctggatggagaaattgatgaagtttgtatccacaataacccggtatggcggcccgagcgctgtgttgtagctgaagaacagcgccgaagagacctgaggcctaaaataataaaccaacaagacttgattaatccaatcatcccaataatcgttaaacactttaaacaaatggatcccaaaacgcggtaggcactcacacattccgcccgagcttctccttctcgttatccttcttcttggggttcaacacatcctccttgtacctagaggagacaaaatttagggtcgcaacaaaaagaaccgaatcaccaagaaaccaataggagagggagatggtttgcctacttctggatggtc

SEQ ID NO: 26385 - DNA, 636 bp, Oryza sativa
caaaagacaaggattatactggctcaagccccttatcaggtaatagccatagtccagtttatatgagattgatgatggtgagaacagattacaaagagaatagacgaaacggatgataccgataagatcgtagtcgatgagttcgacgagatctcccggcgacttggctccgcgcactccggcttcgtaaactatggtgggtgtgttggcgatggaattggatgtcctcacacccctccttgagggtcccttttataccgtggatcgtattgacccctaagaaagattcgaggatatttgatctggtacggtataacagaaactctatacatttccgagtaggactttggacatcgcttgactcgtagagataatttccataatttggaacggatttctaccacgtacacgggaacgatccgtatacgtgaaggtataccatattcgtatattccataagtcgtaggatagaaggtatgccttatctgtaaccctaacatcgggatactacctaagatttcgttggatcgtgtagtaatgaatagtaggatcgagatattatgaaaattaggattctatgtgtgatcggtatcgttcggcttgataggatcgtagtatcgtaagatattcgaatac

SEQ ID NO: 26386 - DNA, 741 bp, Oryza sativa
aatttatatatatgatgatagtatgaggctatatatgagctgttgttaggaatttagagaatttagagagggtgttttcttcgatgaactatataaaaacaagaagcaagatgagcaacaatctacatttattggaagagaattttttgtacaagttaaaggatgaggacatcatcactcatttttaaaatatcaagcattgaaaagttctcctctaaattgtaagttttttttatcattttaccattttctatcctttacatgttatatatgttgccactttcatatgtcgaacaattagtacttatatatgttaaagaatttggacttatgatcaattctatcaatttataaagttatggccatatgctataatattatacaattagtaatgtgtaatattataccaattaattattggacttctagaagtaaaaagaattttgttttacccctacctatttcgaatacccaacctctaaatcctgggcccgccactggatcataatccaacggccaggtccaggtgactgaaatgtgcctagcgaatcctaacatattcgttctttggccccggcgatgagtagcaagtttattactctctccgtttcaggttataaaacattttgactttggtcaaagacaaactgtttcaagtttaactaagttagtttcatcaaatcaataattgaatatatttttataataaatttatcttgggttgaaaatgttactaccttt

SEQ ID NO: 26387 - DNA, 504 bp, Oryza sativa
tcgtggaacagcgtcgacctgcgcgacctcaaccagctcccgtcgttcaccgtcgggtggttcgccgtcacggcgggttccggggactacgtcatgctgcgtcacagtagtagcgggctcttcctccgagctgatggcgggaacctcctgtgcaatagcgtcggcgtcgtcgtcgacatgttcgacttccgccgcagagagatcaggcagtgggtggtggaggccattcccccgagagattccatgcctatcctccccaatccttcggtgagcttgtcatgccctgtttcctttcctgatgcttgcagaattgattgcattactgggttctccggggatcaattcttgttcttgatcttttcttgtgtctgattgctgcgaattgtgttaattcctttctcctggatgcgattctttgctctgtttttgccatagttcaaggtgtccattctctatggtgcgcattcgtaggtggagcagttctctatgttcttcagttcttgg

SEQ ID NO: 26388 - DNA, 541 bp, Oryza sativa
atctctcatctctcgtctctctctatctctctcactttctcactcccccgccatccctccgtcgtcggtgactccctcgggcggcggcaccactgccatccctcctcactgccgctccccctcctcaccgccgtgaagtcctctctctctctctctcacacttgggcggcggcaggaggcggtgggcgacggtgggagcggcggcggcggcagctaggaggagcgggcggcgacatcaaggaggcagcgggcgatggcgagatggcgggagtagcggcggaagcaaggaggcgtagcggcggccgcgaggagggagcgggcgacggcagcaaggagccgcggtggcgacgccctacggcgagacggcgggagcggcggcggatcaggcggcgccgtcttcgggaagggcggatccgccaccctaggggtctcggcggggagcggcgggcacggcgaccggttacgggggaggatccggcggcgccgtcctcgggaaggccggatccgtcgcccttgggggtctcggcggcaagcggggggc

SEQ ID NO: 26389 - DNA, 1258 bp, Oryza sativa
atctagtcatacttagttgctgaaaccagaatatgacaggaaagcacatcttctggaaaagagatgttgtaaatagtatgaaagtctcagtagtcagtagtacataaagaggtttgatattcaaaccttcaactaagaataaaatcatgtttattgtatatcctactaatacacagtactacggtaccgagacttgaattgcagattttgagcattatgaaacagactacagaagtatagagtacttgcctttatgtatgaatataacagagacttgaactgcaattcttttcaatgcttttccttttgagaaaaacactactacttccaatcttggggacaaatgctgcaaatccataccagcaatcggaaaacttcagaaccattttgatttctgaatatcaaacagaacaggacaagtactaggataaccgaaatattcagttcagatcatcagaataacttcagaaacattctgaacatcacatcatccagtcaaaggcaatctgttcacaggatcaagatggacacagaaatttggggataaaacagattacttcgattgcaatttcagaataaccagcagttacattgcaaccatggaaactaagaatcaaagactacgacatgacaaagcgacgatctaataataacaccaactggtagaacatgacaagtccctatgaatcaagcaagaaccaaaggagggcggatcgcctaagcgcgctcaccgcggatccggcgcgcgagctggatgtccttgggcatgatggtgacgcgcttggcgtggatggcacacaggttggtgtcctcgaacagcccgacgaggtacgcctcggcggcctcctgcagcgcggcgacggcggagctctggaaccggaggtcggtcttgaagtcctgggcgatctcgcggacgaggcgctggaaggggagcttgcggatgagcagctccgtgctcttctggtacttgcggatctcacggagcgcgacggtgccgggcctgaagcggtggggcttcttcacgccgccggtggccggggccgacttgcgcgccgccttggtcgccagctgcttcctcggcgccttcccgccggtggacttgcgcgccgtctgcttcgtgcgggccatcgaggaggaggagaggagagcttggcgcggcggagaaggcgaggcggcggcggcgagtgatttctttggatttgagacttggcggtggtggattgagagggggggaattcgcggtgtttaaataggcgtg

SEQ ID NO: 26390 - DNA, 839 bp, Oryza sativa
aatgtacctctttattccatcataaattgttgttttttgggggccatatttcaaaccgtctaggtaagttgtcatagcatcttcataattgtgcatcaagaactgaacttcacctttacaaaaatatcccttccaaaaagtaggatctacctcaatgcatttatctgcatcttcaagcccttcagccaatgcatttagctcgatgcggcatttagctctgtcgctaaaattctgggtgatcaatcataaaagggcataaaaaatgaatgccaaaacttaaaaaggagtagctcgagacatatctttcaccaaagaacaaaatatctttcgactcacaaccagtagcggtatcaatacttactctgggattcaatggattcctttttatggctttagtaaactggattgctgcttccttgtactttttcttactgagaagttctttgcctgcaatatgtgtacatactcagcagcggcatttgtacatctcaatgagatggcaattatcattttactagtactagttaggagctggttatatcatgcttaaagaaaggatgtagacaaatagtcctacaatacaagccccatccagatattcagcttactttgagttactctacttccactgtaacaaccagaacacttgttgcaaagtacaagttctagaggaagtacacggccttaacctctatccccaggatgccacagatgccatatgatgaggtggaggaaagaagggagtagagaaaggaggagcctgtgagccacccttatgcaagaggtaacatgtacacaaacttccagagaaagaaaagataaagagtaaatcgagagca

SEQ ID NO: 26391 - DNA, 2261 bp, Oryza sativa
ctaaaaaagacagaatgtcaaataccttatattgcgcgacggactgatgtacagatgtagtatttgtttctatcttgcggtcgatccgttgatggctcatgaatcatttctctctctttttcgaaggacgggaatctgggttggtcactcacaaagatgaaggattgataccttaatgagatgcctggacgtctaggtatggagcactggaggctcttctctatgccattaggccatattgcccttacagcaggttaatgagataacaaggggtaggtgatcacggcatcacgccaaggataattggataaagcaacttgatttgattacaaggggtggaaaaatgtgctgcatatgcgagtgcctgtgcctgctaacacaaggcacacctgactgatgccgcatgcttccaaacactactccctccattttacaatataaatcattctagcattttccatagaatgacttacattgtgaaacgaaggaagtatttagtcttcaccttgtgatttccaagatctcttttgacacttgacatcgcagtagctacagcttccaaacactatttagtcttcaccttaagactcaacaatacagttacctaatggactaaaatttatcttcacacaaatataagaacagcacaggcgacaaagtattaagcaaaaaagggtacaactgtaattgatgggagctaaatcctattgattccaagactcacatttcgatgcattgagaggttgcttgcgtggtatcagccacatgtgaaaccgcttcaagcatcctcatcttattcttcactactcacaagtgccattcatctgaacctgactctgcatatggtcactggaaccatattggccaagtagcaggcctacaagggtaaccttgagtgatcgtttgcaactttgcataactggttccctttccatgtagtgtacaaagttttcattccgctcatgaaagacaggaagattgagggtcctcggagaaattcgctgcttccttcaaatccatttacatgacatatggttgatccatgaaggcccattcgaagatctgttcatactgtgaggcggcatggtcccatgtaaagtcgcttgacatgcctcgcttcattagaccctcccaagaggacttgtgttccctgtatgtcgaaattgccatccgcaatgcctgcaagaaacgatgcaaatttttagtacatactccaaaagttcatatggtgtaatgcttgtgccctgaaaataccattttcaatgaggcttttattactgattctacaatgttttctcaacaaagtttgtagctttccctaattattatcttgactacttgagtacaaggcaaaacaaaactgactagtactcacattaaattgtagacaagcaatgcaaatctttccttgtcaaatccatttttttatcagtttcatttgaagtgttcaatgacacaaaatgggccctgtttccctgtttccacattcgaagtatgtaccaaacatgcaattcaaatcatggactggtcagtcgagcaatttagcaacctaagcacatatatgcttcagggttctattccccactaattccagtttcccattaacccaccaagtgctgagccgctttcttctttggatttcaatcacgtgtgttccttttctttagtttgcttgtcaactctttcttataatatttacttaaatctgaaaactaacaagtactaggagttcaatcctactggaataccagacaataaccagaactggctggaacatacgtcatgagcctcaccttgttttatcctttttacttctggcaagaatcaaactacattatgattaccggcaagaaaaatagcagtatacgatacaaccaaaatgcatagttgaaatcatcatgctattgatgttaagagggccaatagtattgatgttgtatggcatatataatgggattaaggaatggatagaagaactaaaactaggtgcaggttcaacataaacttacccacagcattttttcaatggttagtggcgagaatgcccacctgcaatatgtcccaagtagcaacagttaaattaattggttataaattgaataatatacaaaaaaaaattgaatttaattaattccactaaaataaaataaatctgcaattttactttaatgaagcattccttaccctgtaccctgctctcctttctcagcaaacgggttaaaattctccactgtatcctgttgaataaataaaaaaaagtg

SEQ ID NO: 26392 - DNA, 1191 bp, Oryza sativa
tctagtctcacgcagaaaaagaaaacagaacttacgaattgaatattgtcccgcatgagatctggaatggcaagtttaattagatcaatgcctttttgatagtccaatcttccaataaagccaatctgtaaataaagctaataaatccaactgcccataaaagaatactaaaataaataatttcataaatatttgtatctaaccagaggcacatcgggccttataggtaaacccagctccttctgcaattcagctttacacttggcctaaacatgaattcgaggtttcataaattagtctgtgaaagaaacgacgaggtgcaaagaaaaaaatgaaacgagatgacaatctgtatatacatggtactatacttcacctttccggacaggtcatcaacagaataatgataagggagaaacttgtctgtggatgggttccaatcattaatgtcaattccatttacaattcctacatatccagggaatagattgaattaatttgtatcatccaccctattacaatgatcagtccaagaacaaaatataaaaacccaaatataggtaccattcaatacactcttccgggagcttaagagctcattgaggccttgcccaccttcagcagttgtgacctcccatgaatacccctggtaatgaaacataaatgattccttaattgagtgcaagacaaaatgaacgaagaatttgcggtttaaaagccaaggcataaaaatagactaggatgggaaaaaaaaatcaactctaaggttaagttcaaatttcaaattttgactgtggccgtaagccaactagtagacgaaaaggaaggaatctcacctggctgacagtcacaattcgatctgctgtcacaactgcgccttttaaaaaattgactgcctcacccttgtcaagggcatgccgccttgcccactctggaaacacccattctaatgctccataccattcaggtggcaatcccaggtcaggatatgtactggcaggctccacaccctatcacattgaaacacaatgaaatactaacatactgcacttacaaagtgccattacaaaactacttaaaagatatgcaaaatgataggctcaaacctgatgtgctagattatgtatgacaagaacactgcgggcatccctgtaaacaccatatggtctatattttgcagcaagaaggctg

SEQ ID NO: 26393 - DNA, 706 bp, Oryza sativa
gtttaggtttttgattgtttgcgtatagttgcggttaccggattttcgtcgatcgcgggttttctcgaagattcgtgaagcttcgtgaagaccttgagcaaggcaagtcaccctttgatcaattgctcctataattggaaaatcattattattttgtttgcaacttgcattattagaatcactcacttaacttgcttggcctcggtttgcgtgccaaaccgacggacctacccagtagtcgcactagttcctgtaggctgtactaccctgattccttgtcgctccacccttgtggtacttcggtatccatgctctctgagcgcgcataccaaatatcccacatacaccattgattgtcgaaaacttgggaaatgggtttgtgaagccttcaaaacccgacatgtggtgtcggtgtgtttggaaataaaatgaattgtgaaaactcgcgatgcgggggttgtgcctatgtggcactgtcccgtattcgcatataaggaccgattcctgtgggaaactcatcgagcataatcaaagtgcaaccacaaggtggaataggacaccctggctaagtaactagtcggttcagggaaacctcgcatgccaatagttaggaacgccggggcggggtcggacaaaccgggttcctggtaaggcaaggacaagaagcttgctgacttaccgatcaaggtggttggagtttgatttg

SEQ ID NO: 26394 - DNA, 5750 bp, Oryza sativa
cctttagtagatcaatttccttaaccgaatatagcaagaatccgacaactgacgacttgacaactctcatcggctaatctcaggacttcgaagccgatgctgactctaagccgatgactacttcgggcttgccaaatttcactgttaacacattggtaagtggtactaagcagtaacacatctcattgatgttccttatctcaggtagccctattatgctctacttcctcgtcaatgttgtccctcttacgctacctatgcacctcaatctgctgtttttttcccaaaccacatcactgccatttactacctccgttacgtaaaaaaccaacataatactggtgtgacacaccctagtactataaatctgaacaaatatctgtccagattcatagtagtagtactagaatatgtcacatccggtattagattcactttttatgggacagagggagtatatatcagtgtaaaatggaaatttgctaattccggctactccatcatccttcacaaaaaaatgagctataaaatattgggaatgtgtcttctggtcattagattgtttcctagaaaagaatcaaccgattccacgtttgcaatctcttcaagatcacccaattaaaccgtgcaagcacacaagaagatcagatcaacactgttacgtagacgtcacgttagcgaaactgtcatctaaaaccatcgagagagtcaaattgcaccagttttaatagttgcgggtcaagatatccggtattgcggttcaaaatacaaactagattcggtcactagttaagatagacaaactgaacttattccattttcagaggaaaaaaatattccaattgttacccacgctacgggcccatcccacctctcaggaatactgggcctcgtgtcgtgccaggcccaatacgcgtcccctgttccaccaacctcctctcctcagatgccacgtcacacactgtcacacacaccagccaaaacccgccgctaccgatcgcgctctccagatcgattcccccaacatattagggctcacgcctcccaaagtcaaaacagcccagcccgaacaagcatttcctcgaacacttcgccctccaccaccatggccgccgccgcctccaccctcgcctccctctccgccaccgcggccgcggccgccggcaagcgcctcctcctctcctccccctcccgctccctctccctctccctcgcctcccgcggccgcatcgccgtcatgccccacctccgcgctggcatcctctccgccgcaccgaggagggcggtgtcggcctcggccccggccgcggccaccatcgcggtcggggacaagctccccgacgcgacgctctcctacttcgactcgcccgacggggagctgaagacggtgaccgtgcgcgacctcaccgccgggaagaaggtggtcctcttcgcggtccccggcgcgttcaccccgacctgcacgcagaagcacgtcccggggttcgtcgccaaggccggggagctccgcgccaagggggtcgacgccgtggcctgcgtctccgtcaacgacgcgttcgtgatgcgggcgtggaaggagagcctcggcgtcggcgacgaggtgctcctcctctccgacggcaacggcgagctcgcccgcgccatgggcgtcgagctcgacctctccgacaagcccgccggcctcggcgtgcggtcccgccgctacgcgctcctggcggaggacggcgtcgtcaaggtgctcaacctcgaggagggcggcgccttcaccaccagcagcgccgaggagatgctcaaggcgctctgaagcgtgaacaactcaagccatcctccacttttcatctcaaatctccatagctcggttcgttgcctacttctctcaagtgttcgcttcttttcctgaataataaatcatgtaataaatcatggcaccaatggtggaccgtgcagagtagtgttgtcgttttgatgtgtgaagcttctatagcgaacatagtgtgcaatttttaggtaacatatatgagtcttggccttgcactgtttgtcaggtagtaacaacttggcacagctatagactgtagtaacagagttcctttcatgttgaatggtgaggctgtgatgtgttctagagctgaataaacgtgctctggtaaatactgtcaccagatcagactatggagtagtagtaagattttgcttggttaattgggcaatggctatttttcaggatcgttcagttgagataaacatgttttgctgttcagatgagttcgaaatgccgttgtttgttctttttttaatgccgaatatatggtgagagattcagcaagccaggggtcagatgccccttggcatgaaacaaaggctcttcttgcatttgctgacagtagtcactagtcagatcttatttatgtatggatttctcaaaatttgcccatttcaccaaccctactgaaaagaacagacactgccgagtgtaacacatgttttaggcatctcgggaaaattcctcagtaatgcagtgtagtgcactttggcgactttgttataatgctttgggtgaactcgttgtttactttgttagttgcgttcatagaggtttactgtcggtgatatgggcccgggggtatcatgtttagaggcccagagattggacggaggaggctgccccccaatgccacgtggccctcccccgaggggagtgaggcctgaggtggggtggcggccactccttcccaaagactagtcggaggaggttgccccccaatgccacgtggccctcccccgaggggagtgaggcccgaggtggggtggcggccactccctcccaaagactagtcggaggaggctgccccccaatgccacgtggccctcccccaaggggagtgaggcccgaggtggggtggcggccactccctcccaaagactagtcggaggaggctgcccccccaatgccacgtggccttcccccaagaggggtcgggcccgaggtagggcggcggccactccctggtcgagactagagggggaaggctgccccaggcgccacgtggccctcccccgaggggggatcgggcccgaggtcgggcggcgaccgccccctctcgtgactaggggtcgggctcccccaaccccctctctaggtcatcacgtacggtgggttaggtgtccgcctataggtgtccacttacccgcatttatggcgacccgagcggtcgcgccacgccgcatttaatgtgccgtgcagtatactcaaccggtctgtgaccggtcgaatcaccgatgagactgggtagtgcgcctgtgcgctgctcgtgtgtcaggcggcgtgcagcctaacatgtcctatcaaataatgatggtgagaggttctcatcctcttatcccagccggagtcggtcctcccgccctggtcaaagctaggctcccgtttcccggtgtaataggagcccggaagtcttcacccattaaaagcagctgacatgggcgcccctcgtgtcaggcggcaagatttgacaggccccatcatcaagatgacgtgcgcttgcttcccaagtcaagagataagacaggcatttaatgcaaaacacttctttaccggagctaggtttttgggcccatgtggtaaccccttgaggtatgaaaggagatccaggcctagtaaaagggggagggatccgggacgatccattttgatgctctagagcagtctctagccccgaatgatcaacaccacattttacttcaacaagaggatcttgtaatccttcacttaaggagcatagcacaggagtagggtattacgcttcttagcggcccgaacctgtataaatcccttgtgtctcttttgcctcgaaaacctcggatctcacccgctgcccccggccaaaccaaaaaaggggatctcacgatctcccgctagagaggatcactcctcgacatttacattagcatgccgtgattcaggcctccgtgtagactacttctgcattcttttctccacttcaattgatgaaacgaaaaaaaatcctatttatctctttagttattgtctgtccgaattaccctcctcaacttcaatacaggacattataccaccaaacttcttaaacctaatgaactaccctttgatcccagtccatgtaattttagccctacctggtagacactcgacagttcagttagcaaggttataaagatttcaaaaaaggtatagttgatcccactcgttagtctcttattcctcttaattctctctcaactcccccctctccccctcatggaggtgtccctagagtttagtgccctagaacccatggcagggttggagtacagaggtactccctccgtccaaaaaaaaaaagacaaaccctgggtttccgtgtccaactttgactatccgtcttatatgaatttttttttataattcgtatttttattgttgttagatgataaaacatgattaatattttatgcgtgacttatctttttaattttttttataatttttttaaataagacggacggtcaaacgttgggcacggaaaccagggtttgtctttttttttggacggagggagtagctgtgtagctcggtgtcgttgatccctgtggacgagctgaagccccaagcagtggcacttgtgtcaacatcaatcctgtcggaggaggagcttcatggcggtggtggcgcatgaatgggggtggttctaggagagactgctttaggaggggagcgtagttaggtggtgccgacatctacatgtgaggatggatgaggggagcgcaaacgccggcattgccgaggaggaaggggaggcgaggctgatgggagaagaggttgcacatcggagtacgaagaagaaagcagagaggaggaagaagactaggaagaaccgaaggggcggacaggtgtgcccattgtcattagggtaccacaataccttgggagtactgaagccaccctggagtaggcggtcgatgggtggggctgttcatccatgggttgaaagaaacctgcctaaccggccgtattcattttttctcgtaccatatgattatgaagtgtgttaatgtgttattggtacctagacgctgttctagaagacaatgacatcgatgctcatccgtgcgttttgatgtaaacccgtgcttttcttcagctaattttttcttcgctgccttcgctgcacaaaggcagccaggacatgggccttcatgggcacgaaattggcgccctttcatccctggaagacaaagtagacttattcctttatccagcagcaatacgaaagcccattaaaagatcagcccaaagaagcccacacgaacaggtataggtgcaatgcaatccacctcaaccctaatccccatccatttcctgccgccgcactcctgttgcgcaatcgcgtgagtaaacaacaggtagcgaccgcccaacgccgctcctcgcgcggtcgcgcccaacgctgcgccgcccattaggccctttacagtgcaacaccgtggaccggtgctccagctcgacacgtcggattcgagcttgcgtggcgctagggtccgcgccccagcagaggacctcgctcccgcggagggaagtgcgattactccctgccgcgagcccacgcgaggcgaggaaacggcggcttttctgcgctgtggagcgcgttgccccgcccactcgtgccctcgcggcaacaaatcaacaaatcgcagcagccgtcctcttgcttatgctcctcctcctcgcagcg

SEQ ID NO: 26395 - DNA, 7062 bp, Oryza sativa
gccctccgcgccctcgtcttcagccagaactggaggggccgtccttcgctgccgctcggcccggaggagaggagagccagcgccggcggagggaggaggggagagagccggtgttgagactgagtagtagttgggggatttggataaagtagtatttgtgggtgaagatttacattgttctctcgattttagggtggttactgtaaaatttggactcctttgcaaattgataaacacatgagggctgaaatggaaagttacaggggctgaaatggaaaagtaagtcactcatgaggctatttgcaccgtgggaataaaaaaacttgaatccgggtcttcagcctatgtggaatgggatgagggaacactgcactgtgaaaagccttagttccttgcgcccagcgccgcaccgtgttgctgtgccctcagcctcggcgcacattctcctctcctattcctcccgagttgaagcctgaaagggtagcctcataccctaaaaaaagagaatgttcccgtgagtccaagactgacgccttttgttgattccgggcccttagatgcatgatcagatgcgtgatggttgagattgtccccaacgtgcaggtcaagcacagctccaaccctcttcgctgcttcgtcattgccatcaacaagcttcgttgtgttgtccaccatcgttctctttgctgttgtgcatccaacgtgcggggccccgatcgggttccgaggacccgctagggtgagggtgggggcgggagatttcgccctaaactcccgaactcctggtcagggccgggggtggggcgaagaatgcggggacagggccgggggcattctacctccaccaggccccgactcatcccgttgccatcctattcacgtgtcgctatcgtcctcaccgctcaccccattgccatcctattcacgcgtcgctgatcgtcctcaccgctcagtctcttacatgcaaatgaggtggatgctgcaatcgggaacttagtcgagtcgctagatgtggagaaggaagatcgtgagattaggaattcgtggattggggcatgggaatatgttgtaatggttcttttttgaacccccaaatcccaaattgggatcgatgtgtggataccataggtgatgcttaccaaccttcagtttggaggtagtctttaaaaaagtttcgaggtggatagcacaatgtcgtctcgtctacatgcactctttgcaatccatatggtgaacaatgccgtcgtttaactgaagtttcaaaccattgacacgacagttgaaagtaacttcaataatttccaccattagcaaccagcaccgccgaagatgtactattcgccgctaattgccttccaagaagccattgttaacgtgatgagctctacgttttggcaaacttcagaaaccaaaacagtgaagcgttggtagttatccactacggatccgctttggatgagcttatcctgtacttcgaaaggccatatatatagccacatcacagatttccccaatgtacatatcacggaaaacattcagtatttctgatcactggaccatccagaccagttagttttgcgtgccatttcaagactagtatgacgaacctaagtctgcaggccagcaagcacccactgcagcaaaactggttcaccacgtttgtcccttccaatgagaattttttttatttataattttttttattaaaagttttacaaaaataattttccattttgaaaattgacggaaatagtcgcctaccgccctctgggaaaaatcgccctcccagagggcggcgaaaatgacgtggcagacggccgttcgctctcgggcgacggccgtcaacgaaatttgcaggcggcccccttgccgccctccgcgagggcgattttgtactgtgcggggggccgcctgcaaatgggcggcgagggggggcatggaaatttgcaggcggcccccttgccgccctccgcgagggcgattttgcactgtgcgggggcccgcctgcaaatgggcggcgagggggcatggaattttgcaggcggcccccttgccgccctgggggagggcgattttgtactgtgctctatattttttttatataaatatcaatagttatcaaatctttttatattgaaaactatacaagattaaaatctccaagattggtaaaatacaattttattattttttagggcatatttggaatgttaccgtacaaatattttgttaatgccaaaatataagcaagttttggcactaccaaatatttggtaaggtaaaattgcatttgatcatatttggtttgctgccaaaatgtaaaattgtagtgaagaatgttgtacataatctcaattctagattacgtattaccaattaataggcttccattttcgtgtgtggtgtggtagtgggaaagaagatatgaagaggttgccttcagattgtcaattatatagcgtcgttttcactgcaatatatgtgaactcaatgagatacattattcattagatgtgacaagacgatcacgcgtgggcgtgattcactttatgtcaacaggcagcgccgaaagttgatagtgataactcgagctgccgcttttcatgtgtgctgttgtggactgtgcgcgctactggatatggcactaccgtgaagcgccgaaagtgtgttgttgtgagcataagttgttcaagcaccatacgaatgaaaagaactacgtagacgagacaaacacaagtagtactgcagtagtaatagcaaaagtagtactgctttacaagtttgtaagccaaaagaaacggtcacataaggactgaagaggtagaacactactgacgaggcctcttacccctgtccctcctaccctgcgccctaatgtgcccctgggagtacgtgagtcggtccgggggtacggcacggccaacccgtcctgcctgtacaggtgtgacctctggctgctcctgagtgtgcgcctctggagctcctccaagctgagaggagcctagtacgtcctggtggtctgcaccgtgcaagtcgtcgtcgtagaactggctagtaggaccagtcctaccggcgtgagacgaagaggccccagtaccgaagatcccggctgcaaatcctgctggacaaggaccatcagtttcgtataggtatttaacagtattaataaaaagtaaagtaccgtgtgggcgagggatcgacgctccgtgagaggaagagctggcgaacgcgcctgaagaggtggcgaacgcccctgcggagctcgcggaagcgccggtcgtgcctgcgaacgcgctcgaaggcatacgaggtcctgcgatgaggaaacgtgcagttaaaacatggtgacacattcgtgcaaaagctgaaacaaaaatgaactaatatctgggctgaactgtaccgtgcgaaaccggtgctgtaggtcgcactgctccgaagctaggggcgctcgaagacaaacgaggtcctgctccgacgataggaccgcgaggccgtgggtgtaccggaccagctgaaggtacgacgtccacggcgctgcgacaggagaagacgcgcatgaccgcacgcatcttctcctgcatccggtcgaaggtcgacctctgctcaacgtcagtcaagtgcaaacctctgttcaacctcacctggactgcggtgatatcggcactgatatcccgtgccgcatcagcctatgcaagatggaaataaaaaattcagtagttgtcctatattatgcaagataaatgacataattgttggaagtaatacaaattggacgtaccgccacgaagtagtctcggtcacggtgcgtgggatacgcgtccgtgacagcggcaacgtgcggctctggggcgtctggagtgaaggtcacacgcgcacgagtgcgaggaaggtaccagcgaaggtcacacttgctgcagcgtaaagtcctcccacctgcttctgactcatccatatcatttctgatgcgtctagtttggcgtcgaccctttttcaccctaaacttagatggatctggaatataaaaaacttgggcactcagcgttgtgtaagatcctgagatcccgaacccatatatctcctcactccatgtatgaaagattgcttctttcctgaaataatttgagacgtacacattgggagatatgccacaatcaccggcagcagcaagaacgtgtgagcaaggaaggtgatgaagcttcggcttcatacaactgcaggtacatccaccatccgccttcaagacacattcctgcacggcttgcttgcgatagataccacgcctgctcctatcaacacacattatttcataccgatgcacttgtgtgccttgagcaacaactctatgtctccgtgcctttttgattttatcttccatgtactttgtcactacgttgccaaacactatgttgttatcggccatggacggaccaattttcttgtatcgatccctaaagtaggcttgcgtgccgtgaaggatgaattcaacaatagcaaccaatggaagtacccgaactcctcgcattacccagttgtacacctctgccaaattggttgtcattatgccataccgagatccatcggtgtcgaacaatagagcccacttctccttaggctcattctcaatccactgagagaaatttttgatggccgaccctgacctccttctcattgttggtgggtcatcatgtaatgcaccaagaggtatgggaggctcgtcaccttcaacttgtggtctgcgagattgctcatctgtttgcttcgttgtcaactcatccaacttgtcccacaactcattaaatttcttctcttggttctgtgcacagagcctcttaaagagctccataagatgcttgttcttgaattgcttgtagaaatttgcacccatgtgacgcatgcaccaccgactccgaacatcaggccacttagctggaagtcccttctcatcccaaccgttctgcaagtagtcaatagcccgcaacatacccgcatgacgatcatgtataaggcaaacgttgggcctcatacgcaccactgcaatgtgcactctctctaggaaccagtaccagctttcagtgttctcactctctacaaatgcaaaagccataggtagaacctggttgttcctatcacacccaattgctgtcaatatctgacctcggtatttacctgtcataaaagttccatctatgcatagaacaggtcgacaatgcacaaaagcattgatgcaagcacccaatgagaaaaaggctctttgcagcacactcttttgttctatcttcaaccgatgtaaatgtatgtaggtcatagtaagtattattattcctctgggcaatggtggctaacaaacgaggcaaattatcataagaagcttcaaatgtgccatacctcatctcaatgatcttttgtttggctctccaggcctttgcatagcttatggtgtacttgaatttgttctcgatgtgcctaataattgattttggttcaaagccaatgttaccaacaacactgctgtacatctcacttgccacaaaagctgaagtgatgtttcggtgatacttctccaccccttgtaagtagcacttgtgctcggtcacaatgctaactttccaataatcattccatttacccttatatgcatggacacgccacggacaatcttccttcatgcacctcacttcatacacataatttgttgacttgaccaccctaaactctctctgcaatgaaactgcccaatgcttcaccgcctccttcatctcatccttatgagcataccttgcaccctcaattacctcgtactccttatactcccagggtacatgatcaccctctgatataacaagaccagagaagtcctcatttgcccaatcagtggccattacatcaccttcctcatcggatgatgcgtcgtcctccgcttgctcattatccgaatcttccctctccatttcatcaacaattataccgactctctccccctcatccgccatgcccatggcctgctcctcccttggttgattttcctcattttgcatcgatggtccaacaacatcccctgcattgctaggaccctccacatcttcggtttgcattgaaacatttgtatctttctcttgtaccgacacaaatataacgaggggccatgaccgttcaaaagccatttccacataccgtctccaagcagcagtgctgtccatcggcattagttcccaaaaataaccttctattgcacgactcactacaacagatactgacattgtgtagacttcttggtctattctaaatcctctcaacaaccaactataaattgactgaaatgttctctccgcaggcctatcgatgcccttagatgtcattacaaaatctgacagatcaacaccatctggaccaaatctaatatttccttcaccgtgaactatctgaaatgtgaccttacttgacattgtgcctgatgaaaacaataactgcgttaacctcgcatttctgtactacgccctaagttacattctctacaatattgttctctaaatttctaaaagtaggttacattctccagatcaaactaaactacatcttacaattaacactactgtctatgtctcaattcatactattatattctatgctctggatctacacatatgtgctgtgtgctacagatctgctaaaatatatggaactaaaactaaaacgcaacatatgtactcaaacgtaatatattagtacaaatgcaaaagatgtatgggagcatacctgtgatgaagtgagcgaaccagcagggcttcgccgctccccttctgctgccctcccctctctctctctttcgttttttttggatttttagtgaatataatgaaatttcataggggaggggctgggctttataggggggaggcaaaaatcgccctcccccagggcggcaagggggccgcctgcaaaattccatgccccctcgccgcccatttgcaggcgggcccccgcacagtgcaaaatcgccctcgcggagggcggcagggggccggctgcaaatttcatgccccccctcgccgcccaattgca

SEQ ID NO: 26396 - DNA, 19335 bp, Oryza sativa
gagggcggtaggcgactatttccgtcaattttcaaaatggaaaattatttttgtaaaacttttaataagaaaaattataaataaaaaaaattcttccaatgacgggttggtagtctcttatatatatttttttttcgccaggacagcggcaaaggaaacgcctgaccaattatattaagaaaaataagaagatttacataaaacaaccagcatggttgttgtggacacaaacagggtttcccaaactgccggggccggggttaccgcaccccgacggtaagcacggttatcgtgcggtaaccacgttaaccgtgaaaaaccgtacaaaatttatcaaaaattcaaattattttttaaatttatttgaatttaaggaggttaccgcagtatttatattaccgtacccccacggtaagcccggtaactggcggtaaggtaaaccctttacataacccaaccctagaataggaaaaggttttttaccggtaaacgcctaattacatgacacaactaggataacatatgtcttatctctcttcgttcgtgatgcctccaaagccagcagctcaatgttatttacaaatgtattttttttactcggcctttacatccaatcgactatataaagctatttaaattgagaatttagtctcgcaaataatccaatttaaaattcgctcctaacatgatacctccaaagccagcagctcgtcatggccaccattcttccgatatgcactggaagacctcgatggcgatcttactggctccttcgaagatcccggtgtttctgtcgcgaattaaatcatccaagtaatcaagatagtttgtacgtctaagattttctactgtgatgttttgtatggcagcctgagaagagtgccaccaagtttccatgtcagttgacatatccgggctccgaatgaaatgtaatcgggtgcagatcctatcccacacttgtcttgtgaaagcacaggccatgaagaggtgatggcaagtcgttggctaaacaccacaaagagaacagacttgttcttgaggccaacctcgccgtgccaaattctccgccgtcaaacagctcctgccgtcccgcgtagtacaagatactcctccttaaaaaaaaaatatatgactccgttaatttttcgcataacgtttgatatgttctattatcaaagaaaatatagtattaacttatagtttcatatatttatattaaatttttaaataagacgaatgatcaaacattatgagaaatatcaataacaatatactaaatttttgaataagataaatgatcaaatattatgaaaaaaaacaattatgccattcattttgaaaggagatgttacataaagaactttcatttcacttcttaggtaccttgaccttccaaaggaaaattagcaccgatggagagagttttatcaatgaaaaacattggtagtctctatgagagtatgatcattgtttttaattatttatttgtaatagtataatatgtgaatatgttttcatgataaatctactaataccattttcacatatcaaatattttttggttgcattttactagcactaggttcacattttgaattttgtctcaatttttttttcgaaatttgaccacactcattctaaaacactattcaagtataagcatttcttgccttccaaatttatacacggccatttgccctatactacactactaccaaacacctctcgtttaattattatccaattttaccctcaccatcctcctacatctaattacatcatatttaaaactaaaagggatatatcacagttttcttttcataaatttagcctccactaaacaacattccgcaacagatcagggaatacttttggtttgacaacacgacgagtaagaaattaccacggcaccactacgacgacgcatcccactgtaccactcgaggaccgaccagaccatcttgcgtgcggatttctcacctccctgcagactgcagtgaaggacaagatcttcacggctgcagagcgggtaccacccaaatcacaggaaccgtacatctgcctcatatcagttacccatagcatagcttattaagaaatacaaattaatttattgttaaaattgttgtatattttttttccgtagtaacttaaaagccgatattaaaaatatcttaaaattaactttaaaaaaattaaattttagttttaactttagtttattaggtcaaccaatagggcgatcgaccaaaaaagagaagccactctgctctggcattttgcctgctggatcgtcgctcccggccataacgggcaaacggacagggcttactacaaaagcatttcaattttgaagcgagggaagcaagcaagcaaaaggatggcactcatcccgtccactcagattcaatccatgcatgacaccgtcgtagctttcaaatatgagctcgcggttacctagttaattaaaatcaacttgtattaatgttgacgcccttcgatcatttagcatatacgtactatacatgtatctaagataggtaaggtacaacatatactgtgcataaccagtggcggagacaggataaagttatagcgggggctaaactaaaatgaccaagaacaactaagagagatttagggttgggttaggattttttagcctttttagtcttttgggccttctaacaacctcaaacaaagtctatattagcccctcatctataaatatatggattagaattttagagggtaggggggtttcaagaccccccgcccccacgctgtctctgcccctgtgcacaacgctttggagaagttgcaacatgcacaaaacccattgaagtttggtttcatggtatgaagtatgcctgttcaaatatggcttgtttttggttgcaatgatgatgaagttactaaggctgggtttagtaatctctctttccatcttccactcaccagtctttcataagcacacttttactaaattactaaacgatgtatttttaatataaaaattatataggaaagttgtttttaaaaaattatattaaaatttttaagtttctatagctaatatttaattaatcatgcgctaatgtgtcacctgttttccgtgttagtgagaaaaggttccaaaacctttagattctaacgcatcctaagggtttcaatggtgcaaaagaaaagacctcctacaacatatgtaacaagatcatccaaagggttgagtcttcttagctactccctccgtcccaatatactacaacctacccatataaaacaaataatagccaaatataattaatagccaaatatacctaattaaatctgatatatatttgctagattatttctataagaaagtgtttgctagaaatttgctaaaatcgacaaataaaggcaagtgcggcggcctcgcgctgaaggtgcttggatggtgatgcctgctattaatggtagggacgtaatcataatagtgggccgacgatttcaagcgaaaacccagtctttttgaggagcggcagtcccgatgcttttgggcggcgtagtccccccctcccaccccctcccgggggtgggggctttcgtggtatctctcattctttctctagtggaatccttcaggtgaaaaatcacatcctagtttcctaatggtgagcgacgacggcatcatctgcgtctctcgttctcttcatggtggaattctttggtcgaaaaccacatcctaattttccaaaagaggtgacgacagtgtcacaaccttcgtggaggcgttgtttgaaggttcgtttctatcaaactcttctccaaatggattgttctcttaggacgacaccatagccatcacaagaaaaccatgctggtgggagatcagatctattcttatctttcaccatatccccctccacccaaaggcatgaatggattttcattagcagtgggtgcttgtgttgtaggtgcatgtgcaacatagtttggtacttttgtttttcttgattataccctaccagtgctttggtctttttttctcactatattgatatgaaacctcgtactatcacacgtgaattgttttagaaaaaggtaactacaatacaataatatctttgttttcaagactactccattattgtagtttcaaatttaatcacacaaagtttacatacataaaacatatcaaaacacaataatgaaattttggagggttcgaatcatgaggtaaaatttctattaggtccgccaggatgaatcgtatatattataagtaagagatacgatagaaatatgttagatcaatatatgaaaggcacgttagtaacattgtaccaatcttgtttcgaacacatttgaaatatagcataggaaatatttcgttctggtcaaatcctgtagttgtagttcttaaacacaagttacgtcatgagtacagccatatcaaccacccatatcaataaatccaactaatactataaatgccataaaaatgcaattaaatatgcataagatgaatctatatctcaattactcaatactagaatcagactagcattaaatgaccatattaaccatatcaaatctggtggatacaaattcaataaatagagtaatatcacgagcaaatcctcaataaatgatatcaaagctctaacacatttatacatttaaaaccctcgtatctcaattactcaaaattgcaatcgaatttaataggcgcattcacacaggtagaaaatcatctgtccacatttgcatcatcacacttcgaaatcacaaaacccccaacccaacccacaaccaccccatctcactgacctgcgggccccatgagccagacagagccacttacagctgggccccaccatcccctcccctcccgcttgagcctatcctacccagtgctacagccgacggaagccggcactctcttcggctatttaatccccactcctcgcccgcttcgagctccaccgccaccgccaccttcttctcgccgccggccagccaccgccgccgccgcattccgcgcctagcgtgttctcgcttcttcgtggtctcagcatttgccccgagaatggcggcggcgggggcggtgttgccggagcagatcgcggcgatgtgggagcaggtgaaggcgccggtggtggtgccgctgctgcggctgtccgtggcggcgtgcctcgccatgtccgtgatgctgttcgtggagaaggtgtacatgtcggtggtcctcgtcggcgtccacctgttcggccgccgccccgaccgccgctaccggtgcgaccccatcgtcgccgccggcgccgacaatgacgaccccgagctcgccgacgccaacgccgccttccccatggtcctcatccagatccccatgtacaacgagcgcgaggtaaccaaaattattcaaatcaatccgccatgcatgcaatgcaaactcaaataaaaaaaccaaaaaaaaaggaaaaaaaaagggcactaaaaagttttttgggtttattttttgttttttttttggggtggcaggtgtacaagctgtcgatcggggcagcgtgcgggctatcgtggccgtcggatcgggtgatcgtgcaggtgctcgacgactccactgaccccgtcatcaaggtgagagccagcgtttttttttcctttttcacttcatttaattacagcgctatctgtccccgcgtgtcagtgacacaccagtggcgttggtctggtccaaggagtgaaattaattgcggctgtctgtcactgacagtcgccgctgcgtggtggggccacaccatgccggcatgaggcgcgtcgtattcttcaaaattttttcatcgctaagagctttcaaacttttttcatcacgagagctttcgaatttttcacacggggaaaaacgtattgtaggtacaaacaaattagaggccatgtctctgttgtcgtagtcgcaagaacaagcgagtctactttcactgaggaatttttggctggctgtattattttaaccccgagaaaaaacttggatttttttttgaggaaaatattggaagtgttcttcttttcttggcctagctagggacagggagggagtgacgtgatgcatcatgcagcgaatttatatttttctggtactagtactccattttacacgaaagttcatgggcaactcgactggctagctccttgtcccaccgcacgactcccgaggtggaacaatctgaaccataccgcatttaactagcaatcgttaccagaatggtttactgtagtagtaattaactagcagtaaaaataactggtggcaaaagaagagtcaggattaaatttagttaaaagccacttaattatagagcttgctaacaatgagacgatgagtgcaactgcaggagatggtgcaggtggagtgcaagaggtgggagagcaagggggtgaggataaagtacgagatcagggacaacagggtggggtacaaggccggggcactgagggaaggcatgaagcacggctacgtccgcgactgcgactacgtggccatcttcgacgccgacttccagcccgaccccgacttcctcgcccgcaccatccccttcctcgtccacaaccccgacatcgccctcgtccaggcccgctggaagttcggtgagtcagaagtcgtagttttttagataatagattaaaacccgacctctacatccacacacaaccagaagtccatagatgagtccaagtcacatttttttaaaaaaaaacacaaagtggctattggtaaaacgattttagtttttgaatggttgccttggctctcgtgttaatggatttgtctttgtcagaagaattgagtggttggttaggtttctgaatggtggtaagcagatataggaacagcataaaaatggcagttcaaaagggcccggataaagcacatgcacctaggagtacacacatactcctataatcaacagtgagtgcagcagataggagtatgttttaggaaatgagtgcactgcattagtttagtgttcacggcagttatagtagttggagataaggttagttgttgaagccaaagcatgggagcagtacacttggaagctggaccttggtttgtgatttgggggatcatgtgcacctgtgacttgtaactgtagtcctttggaccatgacattgacatgtgcgttgttctgaaaaagctggagtagtatagttaaatcttctgcatcactattggataaggccgagtaaaaattgtcagtatggttgactgaattgtttgacttatctttggcattgatgatataatgcccttttttaactataatatgatataatgtccttttttttaactatactatgatataatgtcctttttaaactatactagtgtagcacactggccttgttttggacttttttcttttggcatggtgatgacatgtttgttgctgctgacggtggtgatggcgtgtgagcagtgaatgcaaatgaatgcctgatgacaaggatgcaggagatgtccttggattaccacttcaaagtagagcaagaagtgggttcctccacacacgccttctttggcttcaatggtaaaacttgatctcaattcatcttgtcttttttcttctctcttgtggggcattatgtgtatccatttctcagttccatgattctgcctctccttctgtagagtacatatgtttattttacttaataatgagaaactgtttcgtaatctttggaaagaaaaagacatgttaaccacatctaaaaatcatatgcaattgcatcattctagtttattccttaaaaagtacaatacccagttagatcttacacaaagcagaaggaaagagtagtgcaagaatataacacatgcacaagattttcaatgttgagaacttattttctctagtaaaagtcatatttagcagcatattttgttttaccctgcaaaatgttatgtgaatagggactgctggtgtgtggcgcatatctgcgatgaacgaggcaggaggctggaaggacaggacaacagttgaagacatggatttggcagtcagagcaggcctcaagggatggaagtttgtctaccttggtgatctcatggtaaatatgcactagtagcctaacaattcatgcaatatccaatgcatcaatttgcgcttctatatattacattgttattaagctatataaggaaggatgtaactaacctggtaatgttgtttgaaggtgaaaagtgaacttccaagtacattcaaagcattccggtatcaacaacacagatggtcctgcggaccggcaaacctgttcaggaaaatgttggtggagattgccacaaacaaggtcccttgcaccaagctatattatggaaatattttataagttataacacacatgcatcttgttgctaacaagccattgatcttgatgcagaaagtgacattgtggaagaagatctatgtgatctacaacttctttttggtgcgcaagattattggacacattgtgacctttgtgttttactgcttgttgtcccggcaacggttttaattccagaagttgagataccaaggtggggttacgtctatttgccatccatcgtcaccattctcaattctattgggactccaaggtgccaaatcttctccatagctttgcagttttactttcagaatatgaatccaacctacagtacccaacctacagttttacttccagagctttgcagttctgagcaacctaaaaatttacatgaaaatatgcaatgatgcaggtcattgcacttacttatcttttgggtcctcttcgagaatgttatgtcactgcatagaacaaaggccacgctgatcggcctgttagagacaggcagggtgaatgaatgggtggtgaccgaaaagcttggcgatgctctgaaattaaaattgccaggtaaagcattcaggaggccgcgcatgaggataggagacaggtacgcagtcgaaacattttagtcctgcattttccaagttccaatccttgcagctaaactttgatcttgaaccagggtgaatgcattggagcttggtttttcagcctacctgtccttctgtggatgctatgatattgcctatgggaagggctattacagtctcttcctttttctccaatccatcacctttttcatcatcggtgtgggctatgtggggacaattgtcccgcactgattacagaacctcgatgaggctatccatcttggatcaacgaccggctctggttctttccagtctcatggtgttaggtatgcaacaagatgacagatcaagcaggcttctcctgtgtgcaagtgcaaagtttcctgacaacaatgaagtgtaaaagcactgcaaaacaagcaatagataaggcttttagctgctaggaatatgctgttatgtgcattacaattgtgatgatctagcagtctgttcagagtctctgtgtcaccttagcagaatctgtagtgggaaagataggagttgttaaaagctttatattttctgcaaacaggaaaaaaattggagtttttggttttagcatgtagctttagttctgggaacaggaagaaaaaataatatgtattggttcctcaatatgctcacctggtacaaaagagaggctgtacatctttgctttaacttttctttctcctaatgttcaagtgtaatctgggaatatccatttgagatacagtattttgaggagaaacagagatactgacacagaagctgacctctactgttccatctcttgtctcagactctctttgagttcaccagtcaccacactgatgattctgtcatgtgtttcattcagaaacttcctcttcacatggtacaatcagtactgtctgtctgcctgtctgtatttctgtctcctggcaatccgcatactgacatttgattcttactgaactgctgacattcgaggatctgcatgtgactcgagaacagtgaggatttgtttcatggctctgcaagtctgcaaggatccaaaccacagactaggaccagatgtcattcaaagtgttctgaatctcaataacatgaacaggtgatgtgatcttgtgttacataatgctagtattctggaagcaaggtcgtgatcagtgactgggatagagcaaaagggtaaatacattacaatggtgtactttcatgtcgtttgctccggaccttctcccatatgtttatcttggcgccaattttctcatgcatcagatttctccaagatgcaacttttgtagttgcagcccgaacccggctaataacagatcaaaattgcagtgggtctagaacaagggcacaacagttctcaagttgcaaaaaatctacaggccctgtgatctctttgaaccctctttgaaagaggatgcaaaatttgcaaatgttcatgaaattgagcgagtgacaactgacaactgacaatcgatcatttagcaggcttgttgcttcatagaagcaacatctcaaatgatgaaaatgcaatgccacttcacatcaccaatcagctcagctgcaatggctggcatcatctccatccataaccggaggcacggactgctcggcgacggcggcggccaacgcgttgcaggccgcgtatatcgccgagcgctcgtcgtggtacgagtcgccggcgaggaaggtgtgccttttgccccggacctcgacggcgctccaggccggatccttcttgattcccagcgaccgcatcgcctcgtgcgcgccggcgacgctggcccacatctcgcgcgcggcgtacgcgttcgccaggacgacgtacttgccggcgttccccggctgcagccggaagaagcggcgcgcggcgagctcgaccagcctcacgtcgccgtgcttcctgccggcgccgagcagcgcgccccagaccaccgagtgctcctggcagtccggcaggttcttgacgagctcgtaggcgtcgccgagccggccgaccctggcgagcatgtcgaccgccgccgcgtagtgctcgcccctcggcgtgaggccgtagcccgacgacatggacgagaggtggcgcagaccctcgccgacgagcccggcgtgcgcgcacgccgagagcacggcgaggaacgtgacgtcgttcggccggagcccgtccacccgcgtcatccggtcgaacagcgccagcgcctccgcggcgcgcccgtgctggccgtgcccggagatgacggcggtccacatggtgacgttccgcgccggcgccgccgcgaacgcccggcgcgcctcctcggggctgctgcacttgaggtacatgtcgacgagcgcgctgtcgacgaagacgttgccgccgccgacgcgcgacttgaccatgacgccgtgcacgcgccggccgtgctccagcgcggccagcctcgcgcacgcgcagagcaccgacgcgaacgtgaactggtccggcctcatcccctccgcccgcatcgacccaaacatctccaccgcccgcgcctccgcgccgccgcgcgcgcacccggatatcatggcgttccacgccacgacgctcctctgcggcattccgtcgaacaccttccgcgcaacaccaagctcaccgatcttgacgtaaaagatcagcagcttggtgacgatgtagacgccgccgccaaaccccaccgacaccatgcgcgcgtggatcctcttccccatcctcgcgtcccgccggttcacgcattcctgcagcagaagcgcgtaggtcccctcaccggggcacaccgtactccgccacaggagacccaccgccctagcgagatcgccggcgacgcacagcgacctcagcattcgcgccaagccaacggagcccatgatccagctgcccaactctcttctatccgaattcgagctcgctctaatggcgtcgcatctctgcgccgctcagattagtagtgtatacaagatgaaatccgagacctaggagaaatcaggctactacatttacaacaaaaactctcgggtcaattacaagatcgaggatatacaagcgaaacttcatttttgtttcgattcgtctcctgttttgtctctcttcttgttcttctatctatctatggtggtttgattttttttttgtattagacatagtaaatcatgccgacctcgagggtggaggcgtgagggatggtgacggcgtagttggggccgcggctgttgcggcggaggaagtcgtagcagaagttgatgaccagccgccggaagaagctggagccgctcttggccttgacgtaggagtggccgaggatgaacgccatgccggcctcgcgcgcgtccatcagctcctgcagctcctcccgcacgccggcgtccggccgcgggctcgccgccggcagcacgaaccgcaccctcttcctcggcgccaccaccaccggcggcggcgacggcgacggcgacatgatctcccttgcgccgccgccgccgcgcgagctgcctctgccgctgccgctgccgctgccgccgacggtgtcctccgacgacggcgcccccgcgccgccgtcctcctccatcatccgaatgctgccggaggggatgacggacatccgctcctcctcctctttctccgactcctccgcgccgccgccgcagacgttcttgggcttgaaagaggccgcggcgtcggccgcggcggcggcgccggagcggatgaactccgcgacgctgcagacgagctccttctcgaactcctgatcgtccttgtgcacgtcgtggtagccgtacctgacaatgcaccggtagattctgtactccttggggccaattcttccgacgaggaacctctcctccggcgagacatgcggtatcgggacgttcttgatgcagaggaagatgagcacctgatcatcatcaagaagaagaagatgatgagcactgtaaccaaaattctgaatttctgaacaatgacaacaacttcagaaggcgaggaatgatggctgatgagcaagattacttgatgaaatgcaggtaggttggtgacgaaatgcgagaagattgccgggatcccagagtcgagctcggtgtggatgaggccgatgccgcggactcggacaatgccgaggttggggctgaggccaaggagccagttgatggagaccttgttctggagatcgaactcatacttcttgatggtgccatagtgccagatgcacattatcgccatgaagatgaaggccagcacaattgggacccaggctccttctctgaacttgatgagtgatgctgagaagtagagtgcctcaatggtgccgaagaagatgatgaagccgaatgcgaggaagatgctcttgtgccaacacagaactatcaccagggacatcagacatgtcgtgaccagcataacggttataaccgccaatcctgttcaaaggacaactattgcatatcagacaaattccttactcattagcttcagtatgcataggtaattcgaacatggaataatcaggtggtttgatatgtcaaaaactaaaacaagtggtacatacctgacgcattgcccaggtgttttgtgtctctgaaaccaatggtaatagctaagcacagtatcatcaggatccaattgatctcagggatgtaaatttgcccgtgtactttgtcagatgtgtgaactatcttcacccgaggaaagcagccgagagcggtgcactgcttgatcattgagaatgtgccagtgataacagcttggctcccgacaactgctgcaagaatggcaattgccagaactggccacctaattttctctgaggatggaaaacttttaaatattaataaacagtactaggagaatgatataatatcgatttcgctgttgatgaaagatctggagaacatgacttgccaggcacagacacatagaacccgatcctgtagtcactttcaatgatgtgatgcttacacagataagcagcttgccccatgtatgcaaggatcaaggatgggtaaaccatgcaagtaaaagcaatctgcaatcaggaaatgcttatcagagacaaaactattgaccgcatgtccgcatattgctactatgatgaaaccaagtaaaacaaaacattgagattgcactctatttcatcacctgtatcgacagctgattaaaatgccccagatctgcaaacattgcttcagaacctgaaaaacaacactcaagttagtaaagttgtacacttcagagatcattggcatatggtagaaaatggttgttgatcatagtaccagtgatacataacaatattcctcccagtgacatccaacctcctctctgcgtcttcttcaaaaacttgtacatataatatggagataacgctcgatagacattgggctcccaatgcacgatattgtaaacaccaatcatgcttatacatagaagccatgtaatcacaattggtgcaaaaaggaaccccacccggtgtgtaccatagtgttgcagacaaaacaggcaaaccagtacaaaacaagcaataggaacctccacatctgcagattcaaatcagtaaaaaaaactttgcacagttagtaatgggttaaaaaagaaacaaaacatattagcaaaacaagaatcagaataaaagcacatgcttaaatgattaaaagtcaaaatagagtttctttactccgcacttcagaattcagcacttattttattactttcagcatgtgtagcttccattttccagaatttccgaaccttattaccactagctgaccatatttctgcccagagtgaactctatcctctgccaaagcccaagagaatatgaactgaacagatacagtaatttagatgatgaccggcttatttaggaatcgctcaaatcttttctttctgtttcccactacagttcttcacaagaatcacaactgcttgagtagggtagttccatttattgtagtcatcaatgctactagataagagtattaatcttctccagttcgtaggctaatagcattatagcaacaactgttaggcatacattgactaacaacagtacggagttgattgttggtgtccatgcgacaacgctgcgttgctcatggtcattccctgtcaaagaccttcctaaatgaatttggcacgcaattgatcatctgatatctgagccgataagctcgcacggaaacttccaaaagtatcaatcccattgaagcaaactgttcagacttcatcagttaacataattcctggttttacgaacaccaaattgcacagaatccatctcttgcgtgcatcttacaggtaaaatttactcgaattgtggtgcactagtatgactgaaactgcacacttttttcaactaaaaaaacaagaaactgcacccttttgagtttgaggtggaccctgaattatctaaaaaaactcagaacatgatgatccaggaaacagtagttaacaagatgaggaagacaaatctacaatcatatcaaaagacagaaacaatggaagggacaaaggcatggttgggtgttcagatccttacatttgtgctgatgcttttccatggacaattccagcccggataccgccgagaacactgcaaaaacagaacacgccatctgaaaatcagcacacgacaacccaagaacacaaacaagccagcaaatcaagcgggggcgcgcacgcaccggagatggccggcgtgagcacgccgtcgccgatgaccatgcacgtgcccaccagcgccagcacgaggagcacgcgctgcagcaccttgtgccgctccagcagcctcctcacgccggcggcggcgccgcctccgccggcgcgcccgctcagcgccagcgcattgccgttcgccgcggctttcttgtcggcgcccgcgtccaagaactggtccttgtcgcccggctcgccgccgccgccgccgccgccaggcgggaggagcgcggcgcgggcgtggcggcagaggagggagtagagggcgaaggtgccgccctcgccgttgtcgtcggcgcggaggacgacgcagacgtacttgaggagcggcacgagggtgagcgtccagaagacgaaggagagcacgccgaggatctcctcgttggtctccgagtgctggatgtcctccgcgaacgccggcttgtacacgtacagcggcgacgtgctcaggtcgccgtacaccaccccgaggctctggtacgccaggctcatcgtcatccgccatggcagccgcctcctcttgctgctgctccctccctgctccatccatccacccacccaaatcaaatcacacgcgcacacacacattagcaaagaatccaagatcgcaccaagattcaacaacaccatgatcaatcaatcaatcacgaccaccacaaccctcgcaaacccgacaagattagaccattaaccatcaaacatgacacgacctccaccacccaacccataccttgcaatcgggagaactcggcgactcaggatccacgggagacgggctcttcattcctcaatcccaacacaagaacagaggaagcaaaaccactcctactcctactcgtcctacagcagctacagggtttcttggctctctctctctctctctctctctgaatccctgggggtatcaaatccaacgattcagaggagacggtaatggggattattaggcggtgggaaaatttggagttattgaggtttttaagagggtcaaagcggaagcaaaacagggggcactttggagggaggcagcattggcgtggtgctgctgctgctgcgactgtgaggcagggagggagaagcggaacaatgaagaagaagaagatgagaagcagcagaagagagagagagaagaagagggccagggaggattggaatatttgggagtgggacagcaaaagagaggggccaacaatactgggggaaaccgaaaaagcagcagttttttttttctactgcaaaatgtacttcctgtttggccggctcctctgcatagggtccttgtgtggactcacaagggatgaactcttgtttacatcctgctaaaattgtactacttcctccatcccaaattaggctgtgttggataccaaaagttcccactccccatctcgttttccacgcgcacgctttttaaactactaaacaaaacagtgtgtttttttgcaaaatatttctatacgaaaattacttagaaaaattatattgatccattttttaaaaaatagctaatacttaattaattacgtgctaatagaccgctttgtttttcgtacggagaagatatgttcccatcctcatcctccagtaccaaacacaaccttagttatctttctaccatttaatttttgtctcacagtacttgtcacttccaagtattacttgtctcatcaatcacatatcattcaaacttctgtcaaccaaccttctattcttaaaacataattttttttataagggtattgtagttttttattctaaaccttagaatatgccaaacaattttaaaggaaaagcaatttaggacggtggtagtatactctatcggtctcaaaataagtgcgatgtgatatatccaagaattataaatttagataggtatatttgaaaagaaacacaacctaaataagatagttcatcaaagcatgattaattaagtattaaaaagacttggaaatagatcattatgatttttctacagtaaaatttcaacaaaaatgtttcaaaaaaaataacatcgtttaatagtttgagaaacatatacgcaggaaacgagggtatagtgttcttaaaaagttgtgatgatattaacacattattttcagtgatgatctatttataagaaactgacaattaatgttgtgaaaacgggtttcatacttctaatagtagacgatatcaggatttatgatttgtgtattagtttggcagccataatgcggtttctagtagtagtatgatacgggtttgggattatgtaattgttttctaattaattgaaaaaaatgactacctctttcaatgttatcgtagtaattattgtttattaatttaaaataaatgtattgtgctattaggagacatttattaggtggcatagatagcagggcaataccagtttcatgtagatgctctataaatatagaggttctggaattagaggtactattacattcatatgttagttacacttgtttattggcctgaagctaattttagtgacaacaatagttcccagttggcatatatttactgcccctaaactggatcagtatgggagatagtaacctagttgcttttgtttattgttggaagcatggatttgtcatgtgaggtagatgtttcctttgtagattaaacctttttagtacgagtactgtcaatcattttgctattaatgcatgaaagtaagattcaaagtactatctactagtttagaataaaactcaagaaagcatctactcctgcattttacccttactatatgtctatatcccgcgggttattcttgaagcgcataataacataagaaagtcaacaggtgaaagttttctgcataattttttttaatacaatgcaatgctccaacctttcacctgttacatactatattttattttttccatgttcatatgttgttggggctctatctatataggcattttttgggtcttttttccacatctaatgaaatggctcacaaagcttttgcgttcttgggagaaactccaatcatttgaactaagactgataagctctgagaaaaattaactaaacaaccaaaaatatttaatgagcaaaacttttatacatttgttattaacgatttgaaagataatgttaaaaaaaacaacgatgaaatgcatacatggcaacctttgaatatgattttagtgattagggatgcctctttgaatgtgttttagagaacgaacttatgtgttatattgtctacagcttgaaagaggcactactataaaacatcaaataggtgtcaccactataggtgccggtagtgctaaaaccggcaccaataggccttttcataccttcgtgggttgaaattagaaaaaaaggtatctttaagtaatcataggttccgttctaaataaaaaccggcacctattatattttgtgttggttttttttaaaaagccagcacctttaatatattataggtgggaaaaagtacgaattaacccccccaactatcgcggtcgtccgaattactcccctgaaccacaaaaccggacattcttcacaccaaactatgcaaaccggacgaattaccccttggatccaatccgcggtggttttggtctacgtggcggtacacgtggccatcccagtcagctgttttctaataaaaaaaattgggggacccgcatgtcataggcttcgct

SEQ ID NO: 26397 - DNA, 37332 bp, Oryza sativa
  unsure (1)..(37332): unsure at all n locations
ttccccaaaagccactgaaaagctgtactgtgccttgtattagccaaactgaactggtaaaccttaaaaaaataagttaaggagaaaacgaaagccgatctgaactatcgaagtatataatgaaggcattaggtatcttggcgtcactctgaagataacaaattcatgggcggtgatatgatctgatctcagcagataaaaattatacggtcttacagccacagacagttgtgctttgcgtcagcatgtggttacaaaaactcgaatttttaattttgtggttatgtagcatcctattatggccaggaccagtgtattggtcatgtcttatttcaacgagttcgttttcactactctacttttttttagaaaaaaataattttactactaccttcatgtttaaatagacgatgatattagttttttgacgtttgctcattcgttttattaagaaatatatacagatttataaaagtattacataaagtatatgtaataataaaacaagtcacaccaaaataatagtacttacatttttctctaatttttgataaaacaaataatccaacgtgcatacatatctaaaagttgacaacgtcataaacttttttaagaaccacttaagtgtatcaaccgcagaaaaactcagtttgatacactaggatggcttgatactgagtgtatcaacttttttaaaaagtgtatcaaccgcagatacttgagaaaaacgtcatatactaggatggcttggtgtcttctcaagtatcataaaaactcagttttaagcaggagagtatacctacgtacaccgcaccgggtagatcatgtatatttcctgttcttttatgttcttttagactatgttaattattgcaaaatcactcaacaatcagactattacttggatatacaaacccaaggtatttttgttgtaagtttgccactgttcccaagttatcaagtatgagcagaaaacactgttgctaaaaagaagaaaaaacaatcaacctccatactgctctaatgttctatggccagcacacatatcggatgacaccagaaataatcatagagtattagaataatgaggatcacagacaaaaacgtgcaaggaggcacgcatcaaagcgagattgcagatggacaccctgtagtgtccctgaaaatgtctcgttttccctgacatgagctcaactactgcctgggcattgctgcttctgctcctgcaagctgcatgctgaaatgtactatatgaggatgatcacatcttcatatatgcatggctgtcctggatctatttgtttagtaggatgatccatggaattaagaactggaattattggagagggatttctatactgactgaatctttatattccatccaatattttccaacaagatacagtacctgtatattattatatcatgattatcccttgatttatatctaaaccaaatcacgcttccgtgtacatcataagctgaatcatgacacgcatgtttcctacatatgccccaaggtatcagtatttcaaaagaatttgcttgaagagaaacgaccagaattaacgggagctatctagccaaacagaaaagaaaggcactcagctatctcacccttgcaaaattgcatcaacatctccatcaaaaacaggccaaaagaacaagaagatgctggtgtcaccgtcagtctgtccttggtgcacaaatggacccacgttttcatgccacgttgaaagtgaagcgacatcgccattttcaggaaatacaccgcactgccaaaactgaccacaaagaaaattacatcgcttctctagagtattaaaaaggaaatagaaaagaggatatctgcaggtattctgcattatttttcaacttccgatatgccaaaagtttcttcttctttttcctttgaaaaaattggctctgtcaaaagttttggagtgtaactaaggtcatgtgctggcacaaccgaatatattgtcttgtgatgtgaagcgagcaaatcttttctttttttccttacctgaatattttctcaagctgcataatgaacgtacaggatcaacaattcaacatagtgacgatgcttttggctttggagctgtatgtgctagtaaaacttttcatagttgcggtcattttcgcatcttgtgcctgtcagtcgcggtaggtgcagaaagtactcagatactacggtattagtgtttgcaaatttttacaagttatctttatgtgtacatctaattgaaccattgagataccacttctttttttttaacaaaagaaaagaatttctcgaatgtgtcataattttttatccatcttagttcacaatttgcacaacttgtgtaacatactatctgagagtcttatcaaggccgtaccctacggtgatgaatatggctagttcattgcttttgatctaacgaattttattaagggcatcctcaatgtatgtttattaagtgggtagtaaggtgggacccacgaaactaggttataattgtttctacctcttacaatgtgtgggaagtaagatataacccacatgtaaaacaatgattggatagaaaagagagtgagagaatgagagaagagagtttaatattttttttatgcttgttacctggtagtagtactattgcctgctatagttattacctcctctactacccacctccacaatgttaaagtaggtagtaaggggtcttactacccacttttcatccacattgttgatgccctaagtactgtgaaaacgccctatttgttacaaagacaatgaacacaatcgtagtggtaggtagacatggtgcattttttcaaaaaaaagagaagaaattatagatcctgatatctatatctttaatatacgtatccaagcgtcgccataatatggctttcgagtttattgcactgagaacacccaagtccgaagttgatatcacccatggaaaagatagcaaccggtacttcgattcataaaaccgctttctacatctgtatggtacagtggatatacagtggaagattattatctgcaatatgatctggtggccacaagttggatggcccaatccaatgacaagctccaacttgtctacggaactcgaatagacatctcaattattggccatcgaatggaatggagatcgatccatcgatcgaacatctcacctcttggcatcgattcttccatcttcagagtatgcacatgctctgatatgctcatgaagaagtactcacaatcatggtagttacatacaacccatgcttcacctggagatcgattaatcagtagcttctgtagctctgttcctatagcaaattttaacttcagtaaagaaaaaaaaaaccatctctgaacttaattctctcgctgatgtccatgcatatgtacttgagtctacatgacatttctctgtcatgagagacaaacaaacacaaatgtacggtgtgagtacggtgatgcatactacaccctgctacgtacaaacatgccgtcacagttgacgatcagagtgaacagtttgactgatcgacagtattgcaacaatcgtgctccaggccgtgtctaatccttgaacagtattcgagtagtgatctgatctcagagacggcaaagatttgtcatctcaagagggcgacatgaacaaggtacatcactattatgtgtttgttgctttggaaaatccgtatcatcatactagtaatactactgtacccatctaatcaggttagctgtacatcttagatctttttcttctcgtcctctctaaaaaaaaaagatctcctttcttttttgtcatgaaagtagctataggtttttcatgatggtccaatgaccaaaaccaaaaaaagagtacacttgatggcgccttttccgcttttaagtttcagcaagttggagacgaatgaagcgtcccccggtgatccggtccccttcttatcccatcacgaattcgcgcgtggccgggtgactcatagtccactcaatgctaccaaggtttattttctgagtaaggatgcagattctattctcatttttattagcacataatttaaaccgctaaacaatatttttttaaaaaactttctatcgataaattcattttttcaaatttatagtaataattaaaacttaattaattacatgctaatgttttttttaattcgtatcctaacttcatgctaaggttatcctaagagacgcactcgctgtgtgcggcccaaacgagcagtcttttcgatgtggaggtttcagataaccttagcgagctctaaagcgaaatttttcataaatacaagtatacatatatgctttgcttatctcggtggagaagttgattccagctttggttttgtgtgatttggcggcgatcgatctctgtcggccggctggtcagatagattaatccggtaacgttttaggtatgttttggaataaagcgagagcactatcctgctagctttatggaagtgtgtttagtgtgggttattaattacaagctaatgatactccagctgattaatcagggccggtttggtgcagacatatctctgtctatcagctgcgacgtgtgatgtgtatatacatgcaatgctttggttaattgcttgtgtggtcgaattagtggcttgctaaacctcttttttgtggtgaaagtggctcatcaatctttggctatagtactgctagtgcttttgtttttgattgatgtgctacacatgttgaatcctctgttggctttggctcatgactgtttggaaacgtcatttttttgcgactttctgcagtgctttttcactaggtttgattgctgcggtcgtggaggaaaatgacagcacaacgcaacactgtgttccctcattgtttttcaactaaggagacaatagtacagcgatcatgatagaactacagatgtcacggtttgtgcttataaaattgatgacacgagatttggcctgtctgagatgcataggagcccagcccagatagcccatcaacctggcccgatcattcagaccaatttgttttttttttcttctacattttacccggtccctacatacaaccgatatatgcagcattttttatatactcctttcgtcccataatataagggattttggatgaatgtgacatatcctatgtctagattcattgcactaggatgtgttatattcacccaaaatcccttatattataggacggagggagtatattgaatttagtgcttcaaacaaccccttggaacttagttactcaaacaatccaatctgaaattcgatcctatgaagatttcaactcaggatttagggtgctactcatgtcattgtaataagagatcttttacggtgtttgcgaggtatttagaggtggaataatgtgcaccgttgatcaagagaggggcaaggtacggaacaaaattattgtaacatgatggcatttgagtaattaactagtaaaacataggcaatacatttgaattgaatacctccttccattggtcggtgtatcgtagtagctattggtatcgttgtagagaaaaaagtaaatcaaggatactccgttgatttagggattgattcgattatatcaaaaagtaaatcgtgtctcctttcttctctccctttggttcgttcgtgctctagggtttgaaccagttcatctccgacgttgtcgccagcagcggagccacctccgctgccacctaaagttcctcccatcacccacaccggtgccggtgcggcagtgcaacctgcgtctctcccatcgctagtgccggtgaaggcccgtacgttgccatcttcctcttccccaggttggacatggcgctaacgaccagattaatggcactcaccggcttgccgctagacatggacgtggagaccaaatctgcaagtgcaattcacgcatgtgctatagatctatggaaatgtcctctctttgcaactccatctgcttcgttggtcttgcgagaactagttcatgagcaagcaaatgacctaaatgacgatgacatggatactactgaagctgggattggtgatgaaaatgaggctttcatagatgacgaaaatgaaaattatatggatttcgagtacgttcgtcaccaattgctagcccaaggccagaaacatgttataagaacacaatgtaaatctaaagaaaatcacgtaaaagagaacatcaaacaatacaaagtaaatctagagaaaatgaattaagaacctgttacgctagtgccgtgtaaatgacctaactcaaacacaacgtaaatctacaggaaaaccacgcaaaagtgacacaaataagaacatgtaacgctggtaccaggtagatgttaactcgtacagtcgtacctacttagtacctattataatttgggggggggggcaattttaccctttttgctctattaacaaaattatatttttatccttagtacctaagtatctatactaatacttaaataccttttatatagtatctgtgattgagaactgttggatctttaccttttttggaatgcaaacaccgtaaaagttctcttgtactaaactatatgccctttagcagaccagctgttttggcccgatcaactaaattttttgcaactggtctagtcttatttacaactcttgacagcagtagtacatggtaaactaaggtcaattttgctatatatttgtcaacaaattttctcctaaaaatttgacggatgttgtaattacactataacttatatgtaattacattgtaactataatgtaacttgtatgtaatattcaaaaatctcttcgtaacatgttatttcggtaaaatggaggtcgtgggaacaaatcttctcacatatgtgtgtgctgtgattttttttcttcctcagcagaacaaatcttgtaagagatttaacgattcaaaattacgtgaaacttacatacaagttacactgtagttacatgcaagttacagtgtaattacatacaagttatagtataattgcactacgattgtattataattacacgtgtcaaatttttaggagaaaatttgtcaacaaatgtatagttgatcccaactaagataaagagaccagctatagcttagggctatgtgtaatacagcagcgggcacgcgtgggacgtgcacgaatcggtctcgatcgcatctagtaggcactacgcggcagagcagggcggcgatcgacgcgcggaagatgcggccagtgggaatcgatcagcgggggaagtggatgctctgacgttagtgttcgcggtgacgttacttcatcgtgactgacatgtggaccccaccactcttgagcccacatgtcaaccaccaagttagtggaagttacgtcagaggatctcaatccattggcgggggtagcgggctggagtgggtgctaccaagcgtcgcttgactacacgcaggtgaatgacgtgcaagggatgaaccagacgaggtcattgctgatgtcgacgaagagcgacatggagcaggccgtggactgagagtgacatcgtgtagttgcttcccggcgcaagagctggcacaaatggggaagagaggggagagggaatgtgcatcccaggttatttatttatttattaggatgccacatcagctaaaacatgtatctatacgagaaaatatataatatgtcactgtatatgtgggggtttcgatgaaatgccatttaatagaatgcacagaataaaataccactcattatgttgcctatcggaggaaataccactttggggggggggggtttaatcatttctatgcccgaaatgcccctggctatgggagggagggagggagagcgagagagagagagaggagcgctggggaccgagcgggtaacaccagaggcctcacaaggtggcggctgcgggcgacaaggtggcaagcgggcgaatgaacggtggcgggtacaacagggtagagaaagaggcgacgacatgtaaagaggaggatgggatggcgaccggtgagcgtgctcgctggaaggcggcaacaacggggggagggaagggaggaggaggaggaggagacgacacgggggaggaaaacagagtagcagtgcctaagtggctatggagacaacgaccatctgaagctccacctctgccgcggtgatctcgtcctcatcatcgcctactcctccctctgccccgttgtcctctccactgccgtgtcctcctccccccatatattgtccccacaagctctatcgctttccagcgagacctctagcgccgccgtccctagtgctcccctttccccctctctcttcacagctagggactttttggtcatagagatggttaaagctctccaaagtggtatttttcatccattaggctacgtactaggtggtattttatccggtgtattctattgagtggtatttcatcgaaaccccatatatagagtgcatattgtccattttctccttagggcttgatttggatgattttgctaggtgaagatttttggtattgtgatttagggatgtcaattaaacatgacgtaaagataggatgataagtggtcctattccatgtacaaataaagaccatgggccacatctgtatgtattggttgagatttttcagatactatgggcctgtttggtaggggtcgaaactccaactccagtgagagctggctcctataagagctgaggtgggtatagaaaatgtttggctagactactcagctctacaccaccacattcctcgtcaccatttcatggcaacctaccgttgtcgccgcctgcgcaccgcgccgcctggcaacccgcgggccgccgccacgggtcatcccacgtccaccgctgcggggtagcccgcgagccgccgccgccagtcagcccacgcctgccgcctgtcgacgttgccacctcgagctgccgccgccgattagcctacgagccgggccgcagcctgtcgacgccgccgccatcgcctgctgccctcgccatcgcgtgccgcccaccgccgcgttcgcggcctgccgccacgaccgcggcccgtcgccgtccgccgtcactgcctactgccgccgacgcgactcggccgccgcctgtcaccatcgacacagacgcaggcgctgctaccacatccggccgtttgaaggaggatgggggaggagagagaatgggaggagatgggataggaaggggtagttcaatggaatttctgtgtaaatacactaaaaaaataaaagggtagtgggtttttgaggtgcagtggagctgtggagcagcaaaaattcaattccacccctatagtacaaatttgtggagtagctttgctaactccgcttcgaaaaataaagaatttgtattgtttggcacagctcacagctcttggtaagttggagttgggagagctacgccaaatggagcctatgtgcatctcttaatgtatgactaaatccataaagttaagaaacaacttagaaaaatttatctaagcaataccgatgtacaattcttttgtaagaaatcttgtttttgaaagcatatcaataataatccacacctccattaattggtaaaatatacttgcaactcactcagaaaactgtcattccaaaattccatcagctttgttatagatcaccaaaatctttatttgtcactcttgtggaggttgatgccaccaaactatcacaacaaaccatcgccaccaatcggagcgaaaataataggatgttaactagctaaatctatatgaaaagtaaacataaatgtttggtgcaaatttttaaaaattgtatacatcctgttgggtatcgtacactcatccacatattattgaatgattgttgaagatactctatcgatttaagaaggttttattatttcccaacaaaaaattcaataaacaatcatagagcttgctgaataagcattttctgaataagagaatgttatatttgtttctcaccaagatctcacacaaaatatataagctttgaaattagaacccattaccaaacagatttaaaattagaactcacctatggccgaagatttatagtgtaccaatagcagcatattcctatacttttcccttggtatgattttttttcagttctaagttttcacatgcaatttgtgcgacgaggatgcacaagctgcgtgtctcgtcatgttttttttagcctgccggcattgcgacatggtctttagtttctcaggcgactcggcacggacaggcggcggtttagttacagctgcttgtcggataagggtccgatcagctttacttttacctgaaattttgcctgagccaaagacagacgactcaaaaattaactatgggtaatataaaaaacaatccaagaggtgcaaatttgaatttttttttcttaaagagatgctgaaacctcagatagttggtttgtatgggcttgttccatacataaacgatcgttagtggcacgtaatagaagagttacagagtagtagtagtactatcattcactgagtatagtacagaaaattggtaggaagtaatattattcagcagtacagagaagtatttatcgtgcgacgcttaccatagaagtgcaaacagtaaccgttacttagagcaattgtgtgctacctctaaaaatgacacataggattagattatgaggtagagaagagaagtgaggagagagatgaggaaccacccccaaatcaagaggtagcctccacacaaactccaaaaaaaaatatgagagtactaaacgcattgatatttgtttattagagtgaatgaaataaataaattagggatagcaataatcacatctactgtagcacttgccatccgtagatcgaacaaaaaaatactactactgttttataaagaataggttcaattcccttaaaacaatcctataaaaacgtacatttataacatatgatataatatacgcttgttaaaaaaactaggaaggtaacccgcgcgaatgcgcaggtaagtatgtttttttacacgcgtttgacaatttgtcttatttaacatttttatgcaaacatgtgaaaatgtaagtcatgcttaagttataaagcaagtcacatcaaaataaactaaatattatttattttcaatataaataaatcatcgaacttgtactgaaaattcaacagcatcatctatcgaaaattgtacctttaataatcgtacaaatttttcaaaaatattatttatcgacattgtttatttttaagctttttgttagatacacatgtttatcatgtttatagatcaatactcactttgtaaagtataagtatatttggatttggtacggtgtttgagatactggattgtttgcaatttagaaaaaaaatattttataaatagacccctagaagaattattccagaaatgatattttttatgtgccagagtggctagtgctatcatccaacatggcggcgcgtccccatgcaactatggtaccgcgtggccgaccgtagctgacatggcaggagaatggcgccgaccccctccccttcataaggcatcaacgcctctgtggcgcgctcaccctaaggggtgggcagcacttaatccgctcgggccccaccccctccccctccccactcattcgccctcttctcccctacccgagcccgagaagagttcttgctttctttccccctcacctttccttatcaaatccactcgttttgaagccattttttacgagaatttttgggtacattgaagagcaaggtatactccacgcccctcctcccgggtctttttttcgttttacttggtgaaatttgtagatcggaggttaaccctataatccattctttgcccaaatttatgaatttgatcattgaaattggggatttgttgataatagtgttacatgtttgctatgtactcactggtgctacgatttttttaagtatgtatgcggtaatgttgattaagtttaacatgtttgacatatcactattttaaatacgcttacattttgcttctaaaaatatacttataattttggaacagaaaaagtgtatgataggataatccacatattaaattgttctctaatatttgcaaatcggtttatggcatgtatagtgtaagaatatggatccatgtaccatatattacttataatataactactaattaaattattttttatattaattattagctagaaaatagaagacgttagcttaaaaaaaaggacacgggaggggagggagtacgtacgtgtatttctaaacaataatagatctaatcaatttaattagtgggtccaccagttaagggaaaatcaatggttgggattttttttcagaatatttaggatctttctaatttattagaggccacgtggcggctcaggagcgcttatagaaatcccacgtgacggcttgagagtgtttctagaaagtttaatggacttttagtatataatagatagatagatagataattacattcatcaaataggataaaatatatgcttcattttttttgaaaaacgtgtttcatagagtgcgagttcataanataaaaatgtntnttatatgcactcttaaatgatgatttgttctattaactatacatgtaacacatctatagtaatggcgatggtggtggttctgccaccacactaccaactgacatgtgggattataggtccatgtgaggaaatagacacaacaaatatttttaaccttatctagtgtttaaacaaaacaatggacatgatttgaagttttgaaccatatttttttataacgtgtcaatttgacatattaagcatgaaaaaataagcgtgaaaaattatcttaaaaatcaacttttgaaatttaaattttgttatggcttataattaacaggtagatgatgttaggtaaaaacttgaaaaaatattttataatttctaagaaaatccgatgcagcgcacatgtccttggctagttgttcaaaaatatctttgaatgaaacttgctcctatgctaataatcatccggaataatgaatttagacctaaactcattgtttatatttaaaaataacatctagccattttagatgccactaatcgccgtgcttcacatatttcaaagaacaaccgttttagtgtattcagaattttcttttcttaacaatgcagtctgtgaaattaaaaggacaatcaaggtatttattggcagaggtattattgttaaccattcacataaactacatgagtggttgaatatatatgaccatccacagcattaagttatacaacaacatatccctcgtctactttgcttttgatttgcaagagagtagtagatcggaaggctctggaatctgaatagagtgtttctttaatcattaccaaacgttttttcgagtatgtttttcaaaagttatttagttgttgttgttattggagtatcttctagatattactgtgcatgtgtgtgcatgagaaagtgtgcattgcacagcccatgcaagtttctatcttttttttttaccactggtaaatccttgatttatctcaaatgttaaaagtgccaagtggcccaatcagaagcgggcaaacctgccggcttgagaatatttgactagaaacaacggcgcggccttgccgcgctcaactgacattggaccaatgtaatttgtcgaaattaacagtagctattacattaagaaaaatcaattatatacccctccaaagatctccatgccgcttatgcaccgtaggtccataacaacttgtgattttgctaggaaccagcagtattcacttcccttgcgaaaatcgattatgtgcaggaataatttgctgctgctgctgctatgctctagaactctttggccactgcaaatcctggatttgtgcacattttttccacagctagagcacttcctagccatgcttattaatgattgatgatggaagatggaacagatggcacaataagctcaacatagagttcttctccctgtccctgtggctagataattaagctggtgtgtgtacagtgttatagctagaggcttaataaaggggcaataaaatgtgataggggctagttgggaaatcatctagcactcccgcgtgaaagaaatggacatcttggcatcacctccctatggtagacatttcagggcaaaaatatgtcctattttttttcaaacatgtgtatagaaccaaccgaatgagtacaggtgtctgttaaactgaaaatgggatagcccacatgaacgtattaaggatggaccatcaagctgctaattaaggacaaaaaggaagagcacatgatcaggtgcgttcaacaacaaacctttatttccacagtttcactgccatcttaaaaagtcattgtatcactgaagtgcagttgtgctctgcaaattatatataactcgtggaaggtaaaaaaaatcgctataaatagatgaagtgtgatcaaaactttcaaaaatgacacaattgctagctgcggcagctggcagattcttttgttacccctgcttgcactttggcaagtcattccttgcagttgtaaacaaataacatttgttgtttggcaaatttaaatttgtaaacaacatacatcaagtcattccctgctaatgtttcccatatttccagcaattgacagtatatataaagagtatgaattagttatgtgaatatctgaaatttagaatgcactaaacagaatagagaacttcaaaataagccttatctgtgttcatcacacaaccacctaacaaaattcgttgtgcactaatataaaaattcaagtttagcaagaacagaccaacattttggctattcacttcatacaaatagaatgaaaggtgaatgccaggttgagggacaaaccaatagaaagctgagtattgcactgttggtccaatttctcacatattttcatgcaaaattataaaagaaactgtatattcagcacaaaccaaaccaatgatatgcaattaggaacctgaagacattaatttttcaaggaacagtttctgttacaagcatgacatacattcctttgtaatcacaactcgtccaatagaaaactgagatattattttccttcatggaagtttgcattgcatcttccaagtgttggctcagtgctttcatttaccgtgtagtgagaagaccagggtataacatatctgttgaaacatgtggcatgactaattaagagcattacaagcaaaattaccttcagcatataagaaaaaaaaatagcagctaactggaaagggacagtatagttaagaatacaaactggaaaaggaatgtgtgtcatgcttgattaattccataagtaaattacttccgtagttgcatctccatgttctcaatggatgacaaactgtaaattatcgaagacataaatatagactgtctattacatagacatacattgttcaaacctgaaatgatcaccgcttttgataaaggtccatttcaattttctgataagtgcatctcaaaattataagatagatcacatcacaaagtagctacaggttttgaccagctttgaccctcatttcatctacatatcaatgttctgacctctaaccttatgggcaactacctgcagctaagctagatccaagaatacaaatcggaatgttataatacatgcataaactaatgccacactctacaacagaagaagacctcagatcttctagcgcagtaatgatttgctcacgcacaagctccgtactcttcaaataaacctccagattgagtatctgctgctgccacccaatcttggggttcgcccccccccccccacccccaaaatcccattcccaagctcattgctgaagcagtctacccagccacagcgattgaactgatgaactccttcagaagcggtgacggagttggagtgctttggacagcctcctcgttggcacccctggcatatgcgcaattagcggagttgagttctccatagcagcaaggagcggctttgatgagctccatcagttgaagtcaatgcaggcgtcaaagacaatgctggggcctccggctcagttttcgtttcgtttgaaacagcaaatcgctacacagccaacaataaccagtaggagtatttcaaaataatctaaggcagattactgacaaagtgacaagtttatgcacacttagcgagctaagtttgaaagcataacaagctatcctccattacttcaattgcaacagggcacctgaaaatatgatacacaattccttcatataacaaggaaaagacataactcacacaagtggttgaccatcgggtctgctcgccttcttggccagggcgctaatcgtcacgctcggccgacgcgcgcaggctcgtcgcgggggtcgctgtcgcgcgcaacgccgtaattgccgcgaccaacctaaggctggcgcgcgcgctcgctgtatacgcggtgctccgggtggcgatggtggtccggcgcttgtcgccagggcgctcgccgagggaggatgcgctaaccttcgcagcacgatggtcgacgccggagacgccgtgctcggcaggtacccgcgcggccgcagcaagtggaggcggagggggtagagagacggcacggaggggtagaaatagctcgtcatcgtgacgtcgacctcgtcgcgcgactctgggaggaacgcgcgacggccgccgcagccgtgttgcggacgcactccacgccggtggcgagcctcatccacctcacgtccaagaaacgcgtaatcctcggccttctccaattccgggtgaaactcccgcgcgccgtgggatctgcctggccccgcgaggccctagccggtggtggccgccgagaggccgcggacgagcgcgtccggtggagagatcagggcgaaacgggcggaggtttgtggcggcggcgcacgggaggggatgagggagcagaggatgggtggatagggattgctttgcttctgcaaaaagactgttcaaacatggtatattacaacgaggtccacaacagcgaaccatcaccgtcgatcagcgatccgacggctgcgcgtggggactaaatgctagaatcgcggtgcgccacgtggcggggctttttgcacgagaatccgcccagaattcggtattagagattagcaataaaaaataatttatatctgtgtttaaggtttaaaagcctatgctcaaaaaatataatacgacaaaaaaataaattttagttgtggctgataagttaaagagcaaacgatgatgcagtatatatgttctttgctttttcaatatatatattctgttttcaggaaaaatacgtagtgtaaacatcaaaactctcgctttagattctatagtattttaattgtattcattacatgtttcctttgtttccttcattccgatcgctacctccgtatcggtttgggatggggcagcaaccaggccatggcccatgggcctagtaaagggatgactagggattgggaaaagtacacccaaggtccctcaacttgtcatcaagttacaaaatcgtcccccaaccaaaaatcagaaacaacgcaacccccaacttaaaaaactagtgcaaactaggtccctcggcggttttgaccccggctgagttagtatgggacccacgtgggccacacatgtcaggatgccacgtcggcggccagcctctcccttcctgtcctgaccgggcgcatggtcgggcacaatgggtcccatatgtaagtgaattaaaggtaaatgggtggatttaacagagaaactaggcatggtggggcccgcatgtttgtgagacattagagtgagattaggggaggattacagtgcggatctgattaggaaatcgtggggcccacgtgggtctacacgtcggtgtctttgctcctcctctccatcctctcggtctctcctaccattcccctttgagttgagagtgaggacggcggaggccggcggggcggaggaaccggtgtgaggaggctgtggccggggtcggcatcctggaggcggcgctccccctggcgcaccagcagcggagagcaggggaggagcggtggcctaggaagggtgtcgccgcggggccggcgatggacagcgcggcgcggaacgacaaccagcgtcgcaacggcggagggcaacggagcatagggggcgcgggaaggagtggacgcggagccgccagtcagcgtccgcgaagaggcgcgcgtggaggccgccacgcgggcgcctggtgtggtgcgacggcggtcccggagggcggcggcagcctcggtgatgctccggccgatggaggcaaaggggctaggtggtcgcggaggcggcgcccgtgcgggccggctatggcgtggagcgagcccgtgataggatggcgcaatggcggcggtggcaagcttgctcggggaggtggaaagatggcgacgggggatgggaaggtggtgaatggtggtgcggggcggatttcatggccgacggtaataggccagatgtggggaggaggtcgcccacgccttcggcttccgcttctgggtcggtgccggcctcccctcctacgttggcagccaccatcgccgccgcctctccgccaccgcgcttgcccgccgacgccgcctcaccctgccgccgccctacccttctcccgtgtctccgccgccgcgtcacctccgccgcatcgtcggccggccatcggacctcctcgtcctggcaacgtcctccacaccgagagaagagtgagagagagagaaaggaggaaaggagaggaagggagatgctggcctgtcgacgtggcatcctgacatgtgggtctcatgttgactcagctgccacgtcgaacaaaatcggggtcaaaaccaccgagggacctagtttgcactggttttgtaagttgggggatgcgttgtatccggttttatggttgggggatgattttgtaactcgataacaagttgagggaccttcggtgtactttttccctagggattggacatttgatcccaatcaaaactcagaacggtgtgtcaccgtacaagaaaacatatcatcatcttcttcccctactccagtgactagatcagtttgttctccctactccaatggctggatatacttcttcctccactctggcaaccgaatccaccaaatagtactaccatttcttcataaacatacctcctccacctcctcttccaccgcacaggtaccaacatgttgatgaaaaatccatgcttggccgatggtgccaaatctgtgttggcgcgaactaagttgatgaacacaatggccagagatatctacttagttctagtgcaggtccaaaatattgatgagatatgggcctgccggtcagtttgatcctccaactgacaagatagataaatatgttgatcaccaaaaagccgatcggctaacgagccgatagaacgataccagctgatgttgatagggttttgaagaattggctatatatccaaagtatattctaacacttgagtaaataatgatataaagacagtcggctgatgataatgtaataaaatgacaatataaactagtagaaaccaatcggctaataatgataatatagaataagcgttgatccgaaggttaaagcatacatcggctggaggtccaatgtcattaaatccaaaagattagataaacaatgaaccctttcttgcgaacgactaaatccaacttgtatataatccttataagccgatgcgacgtctagataactcatcgtctgaaatcccgataaaacctttattggcaatcaaaaagtaggctagagactatggttctaagcacgacttagtaggtcaaacctaattgatgtagcactaagtatgaaaagaaacataatacctgacaatcaattcttgactgatttttagggtggtagatattttagttaatctagattgacaaaataatttagtcgataccggcaaaaccgttgaaaagatatgacagatacaagtaaattgaataatcgacatagattaactaagatatatgataaataggtaggcaaatatatcaaccgaaccagagcgatccaagaggtcgaagcgatgcagtcttgaacagcaccaatgtaggcgacacaattgccagccccgtgtcaggtgccaagttccgccagcgataagtaaaaatctcggaaaaagggtggcgatgcaccaagagtagttgtattgatcgagagatagattatgtcgatgagggatacccgtagactggataaataaggtattggagtatgttgataggaggatctacacgatatgacatcactactagaaaaacaatttttcgtggcgtcacactataattttcaccggcggttatatgctaaaactgacagcaaaaacgtaaggaggggtggggggtataggatcaccagcgaaaatcgattttcgttggcagccacgttaagagatccgccataaaaaatactatatttttcgaggtggacctcttaaatgtccgccagcgaaaacgacattttcactggtggctactaaagagatccgccagcgaaaaacaaagccacgctaaaatttttatgacggtatttaaaaccacgtgcgcgagataaggatttcacccacccacccatccacccacttcctctctcctctatatccttctctccacccacctacccatgccctctcctcctcgtcccccatctctctcccctcctccttccctgcgcccctagcctcctcctcctgccggtgactggcgacggcgatgacggtgaccacgacgggcaggagggctgcgggcagcggatgtgcacgccgacgacgctggcctgccctccccttccttttccagatctagccgaagggaggaggcggcggccgccgtggcggcgacggtaggcgggcggcggcggagctgacgacgacgacggcgacgatgctaccggatctggtggctccttccctcccctccctctccctctcccagatctagccagagggagggggcagcggctgccgcggcggcgacgccaggcgggcggcggcggagttgacgacgacgacaacgctgccggatctggcggctcctcgcctcgcctcgcctcgcctcgcctccctccccctctcctagatctagccggagggaaggggcggcgatcaccacggtagcgacggcaggcgggcggcagcgaagctgacgatgacgaccgcaactgtggtgacggggctgatggtggcggtggctaggtcgcgggagagctctagtcgcgggaggggatggggccaatggtggctagggttccattgctagatgtgaatttttttgtgcatgttgttccagatgatgcctatgttttgatttgtatttcatgtttgatctgtgtaaatgatttgcatttcaaatttcctctctgctggcagctagggcagctacattgggtctacttttttggcccaaaataattttttctggcggtcgttgtaacatagccgccagcgaaaatgaattatcactggcggtcggtgtaagacacccgctagcgaaaatggatctttgttggcagttggcttaagacggccaccaacgaaaatgaattatcgctggcggtcgatattgctttgtgacggctccaaattctgctagtgaagactcaaaatggccgccacgaaagatggtttcgtagtagtgcatctaacaatcaaggagacaaagattatactagtttaggctcctcgtaaggtaatagctctaatccagtttatatgagattgatatggaaaaccacatagtacaaagggaacagatgaattcggcgtttctggcgagatccttgtcgagatgattcgacaagatctctcggcgggtaggcttcacgtcctcccgcttcgtaaactatggtgggtgtgttggtactatgattcgatgatctgaacaattcagggggtgtgctttttataccgtgagttgccttagtctccaagtagaactcggagacaacgaatcctgtatgatatagaataaacccaatcctcttcgagtaggactctgatagtcacttgcccgtgaggatattttccataatatcttgtagattttcttatcgcatatggaaacacatcatatacatgaaggtatacccagattacaatgaatccgggtgtacatacttatgcccatcaacacatgtttcctaaagataaaagtaaagatataagtcctgatcggacactaaataaacacttcctaaagataaaaaggaatttactaaatcctgcctaattaatagatagaattaagccaacatgccatagtcttcacgatttattcttgagctcggtctcttctggataagtttccatcggctgattgtgctatttccttaaccgaatccactaaaaattttttaccaaaatttgatgttaacacaacaccagcgaagcctccaggcatcaaccctcccgttgttctgctccctctccttcccctgctcgccaccagcacgccaacgtgccagtgccaccattgatgacgagttggatctccctgccacgcgacgcccttaaaatcaattggaggggatgaagaagattgtggaggagggagaagggagccagcagggaggagggaggatcttttggcggaagtggtggctttgcatcgaggggggggggggaggggttgttgttgcttgtgtgggaccatcgaggtgaggataagggacactcgcgtccaagtcactactacagataagggctatagtagcacaaccttgtaaagcatgaagaaagatgttgctgagaaatattgcagtagcactaaatatgtgttacacactaaggttgtaacacattctaaagcaagtcagagacagtgttacaggaaagacaatagtagcatataacatgtgttacgatgggtggttatcagcttcctgcatggaactgcgagtatctttacatttgtgacaatggtttgtactaaaaagtacagttatctaaatttactacttcaatgcgaaacttgatggaacatgctatgcacgaaacacaaaaattgaggttttgttgacggagttatacagagaaatcaggagaacccaaaattaataccagagctgttgggccatcaaaactattgaggttatgctgaatgtgagctaaaattggttcatgaagcataagaatcttccatgagagcaaggttgcctaaaagtgatgatatcatcaaacaattgaagcaagtggtgcttttgaaacattttcatgtatacaaaagctgtggctaacatacatgaaaaaatagtagaaagagagacagcagccagagaagatgttttacagtccagtttgtttaaaaattaaccatcttgagcaatacaagggaaaatcttctatacgccgatctgaaggatttcttgtgcacattcacagttgacatctgcataagatcaaagagggaagacataaaactaaatgaagaaatgtatttgtgtaaaggaaaataaaattctataaatggataaacccaaacttttgttctaattgagttcagaacttgaaacataacaatgggaaatttttacaacaaacacagcatgcacatttttgaaatgcccacaacaaaaaaaattaagtgcatagaactagaaaccagacaatgaaaagagaagtacagttaacattgccttgctacattaggaacaaatatcagttatgagcagtattcatctaagaaaaacacatcagtgcaaaaagaaagaaatagatgcatattactatcatgaattatgtacactgttttgtgcatagacaaaaaatcatgacttgagttttcacattgaagtatggcatccagctttatttcattgcactattctgaaacactgtcaagagtcaagactattgaagacaaagttcatacactaattctcatccccatcattaaaagtttagccagttatgtaacttttttaactggacttcaaactctgaactctgtaccagtaatctgtaacttttgaagttatagcttcagttctcccttaattcctacaaatattcacatttttcccagtatgtacatgctaaaataaatcaaaggcatcaaacatgttaatacatgcacttattcacatttattccaatatgtatttgctaaaacaaataaagaaaacgcttgtcataacatgctccggcattaagattcatggcattggctcattgatgcaaagaatagtttttgtgagcatacctactgacactagtcactaatgtactttcagaccagcaatatacttcaatcagaactatgcacaagaagaatgactgcatcaagctgcatctgccaattaaatgaaatttcatctccgcactgaagcagaacagagataaaaccatccatgggtgcaagaacagatcaagcctgttcactccagattatgggagaagcaaatatgttcctttcgataagatgagaagcgaaagagctaccggtgagaggggcaccaatgcaggaaccggaggtggaggaggtctgcaacgtggctcagcccaatgttgaataaaccccggcgcgttctagttaggatagttagttgagtttccttgttttcagctgagcccgagttttgggcttgtcttgtacagaggctcgacgtgtgcacgttcacgcgggagtctggtagtcgtgagcgagtctcgcggcacgctcgagctgtgggatggcgcagttcgtgaagagcgtggcgtgcggtgcgcgcgtcatggccggcatggccatatgtctttttctcctataaatagcaagagctacagaaaacgcggtgattctgttatggccgcactaattccctgtccacgttcgtgtgtgttctgtgttgtgttgcagctcccactccggcgagcgctccgacaccggcgagggtcggaacagttggtatcagagcggaagatcgtctggcggccattctccgctccgtcccatcggagatgcttcccacgctccgtggcaagcgctcggcgcgagctgcgtgggacgtgatcaagacgatccgcgtcggcgtcgagcgcgtgcgcgagagcaaggcgcagcagctccggcgtgagttcgcggcgctgacctggaaggagggggagaccgccgaggacttctccgtgcgcatcaccggcctcgccaacaacctccgcacgctcggcgacaacatctccgatgccgacgtcgtccgcaagatgcttgacgtcgtccccgagcacctggaacagatcgccatcgcggtcgagacgctccttgacctgaacaccgtttcggtcgaggaggtgaccgggcggcttcgcgctgttgagcaacggcgtcacaggtcggggcccgtcgtcgacaactaggggcggctcctcctaacgcaggaggagtggatggcgaagctcaagaaccccggagcgtccggagagaaggggacccccagcgggtccggcggctccggcggaggcggcaacaagcgtaccgggggatcgcgcgggcacgaccgcggcaaaggcggcactcgccaggctgccgggcctggagacggctcgaaccagcccaagaagacggacaagtgctactgcggcaagaagggccattgggctaaggaatgccggtcacggttgcgggacgaggcccatctggcccaaggcgaagaagaggaggagcccatgctgatggttgccacggcgcaagtcaacgccatctcgtcttcttccccgcgccgctccacatcgctgccggcgcttgaacagatccacctcgacgagagtaagctcttcgttcagctgggcggtgagcacgaaggagaagccaccagatggatcctcgacatgggcgccatcaaccacatgacggggacgcgatcagccttctccgagctggacaccggcatccgtggcacggtcaagttcggggacggctccgtcgtcggcattgaagggcgtggccccgtcctcttcaagtgcaaggatggggaacatcaggcgctggagggagtgtaccacattccgcgcctcaccgccaacatcgtcagcctggggcagctcgacgaggagaagttcaagtggagctgtgaagatggagtcctcaagatctgggacaagcagcgtcgactactcgccaaggtggtgcgctcgccgacccgcctctacgtcgtcaagctcaacatcggaaggccggtctgcctgcggcacaagggagcgacatcgcctggcattggcacgcaagattcggccacctcaacttccgcgcgctcgaaaagcttggtcgcgacgtcagggtgcgcgggcttcccctgatcaaccaggttgatcaagtctgtgacagctgcctggccgggaagcagcggcgcctgcccttctcgtccaaggccaagtaccgcgcgaaagaaaaactcgagctggtgcatggggacatctgctggccggtgacgccggcgatgccaagcgggaacaagctgttccttctcctcgtcgataacccattggcatcccactgtcatcaatcattacgcctccaccagtcaacctaacccattggcatcggaacagagggaccttgagaggaccatagtcaagttcccatatgtcctcgatggcaccgtaatacgtgccagttgttccatcgtgtcctatggcatcgatacgaacagcgctgttttggttcgtgctcttcatgtcttgggctctcgtgtagaatgtgtacccattgatctcatatccctggaatgtcgcgatcgacccagattgtcccctcgccaggaaagccagttgttggttgatcgtctcgttacccatgagaggttgtcataaccacgcggggaaagtatcaatgtgatgccgtgtaatccatgcatcggacttaccgatgtttctggcgcgaactagagccaagtgctcctcgatgtaaggagctaccaatgaagattgttgcagaaccgtgaaatgggctttacggaataaattgttgtctaccgtcattattgctttccttccgagagttccctttccccatagtctcccttcatggcgtgattcaggtaccccgattgggcgaaggtcttcaataaattctacgcaaaattcgatgacctcctctgttccataccccttggcgatgcttgcctctagacgagcacggttacgaacatacttcttcagaatgcccatgtacctctcgaaaggaaacatgttgtgtaggtacacaggcccgagaatactgatctctttgacaaggtgacaaagcagatgcgtcattatattgaaaaatgaaggtggaaatatcaactcaaaactgacaagacattgcaccacatcattctgaagggcttctaatctatccggatcaatgaccttctgcgaaattgcgttcatgaaagcacatagctttgttattgttgcccggacattgtctggaaggataccccttattacaactggtagcagttgtgtcatcaacacatgacagtcatgagactttaggtttgtgaacttcttctccttcgtgcttattattcgcttgatattcgtggagtatccagacggtacctttatgctatccaagcattcaaacatactttccttctctgccttgctaagagtgtagctggctggactcaagtaatggcttcctttctcctttggttctgggtgaaggtcgccacgttgttccatatgcttcaaatcattacgtgcttccagtgtatctttcgactttccatatacacctaggaagccaagaaggtttacgcaaaggttcttagtgaggtgcatcacgtcgattgcatggcggacgtccaagaattcccaatagggtaactcccaaaatatagagttctttttccacatcgccgcgtgaccatcttcgctctctataggctggcctccaggcccctttccgaacactactttaagatctttaaccatagcaaacactgttttcccgctgcgatgtttaggcttcgtacggtggtccgccttatgttcaaagtgcttgcctttcttccgtaccgggtgatttgctgcaaggaatcgacgatgacccatgtacacaaccttcctacagtgcttaagatacgtactttctgtttcatccattcagtgagtgcaagtcttgtaccccttgttggactgaccggaaaggctgctaagtgcaggccaatcgttgatggttacgaacagcagcgcttgtaggttaaactcctcctgtttgtcctcgtcccacacggggacaccttcctttttccacaacagtttaagatcttcgaccagtggtcttaggtacacatcgatgtcgttaccaagttgcttggggccttgaataataatcggcatcattatgtacttcctcttcatgcatagccaggagggaggttgtagatacacatcgtaacgggccaagtgcagtgctatggctgctgctcatctcttcaaaaggattcatgccatccatacttaaaccaaaccgtatgtttcgtgcgtcctttccaaagtctttaaattttctgtcgatgtttcgccactgcgaaccatcggcggggtgtctcaacatcccgtcctgttgacgctcttcagcgtgccatcgcatcattctagcattccccttattcctgaacaaatgccttagccgtggtattatagggaaataccacatcaccttagcaggaattctcttctttgttagctacccgtcaacttctcctggatcgtctcgtctaatcttgtatcgtagtgctttgcaaacaggacatgcttctaggttctcgtactcctcaccgcgatataggatacaatcattcggacatgcgtgaatcttctgaacttccagtcctagagggcagactatcttcttagcctcgtacgttgtctcaggcaatttgtttccctccggaagaatgttgttgacgagtttcaataaatcgccaaatgccttgtcactaacaccattttttgccttccattgcaagaactccagagtggtatccaactttttgtgcccctgctcgcaacctgggtacaacgacgttctgtggtcctctaacatcttgtccaatttatgggcccccttttcactttcgcagtcctccttggtgtcctgcaacatctgaccaagatcatccgcaacgtcgttaccatcagcatccctttcctcctcgcccgtttgatttccttcaaatccaacgtactgagcaaagtctggaatattatcgtcttccacttcatcttcttccatttcaacaccttgctctccgtgggatgtccaacaattatagcttggcatgaaccccgactcaaacaagtggaaatgaatagtcctggatgcagaatactccttctgattcttacacttattgtatggacaacaaataaaacccttatgcctgttagcttcggccactctcaaaaaataatgcatgcctttaataaactctttggaccgccggtcagcgtacatccatcgccgatccatctacatgacatgaaaaaaaatcatacacaaataattattcttacaataatgacagtcatacaataattataaaataattacaaactctttcaacaatcatacaataatgacatatcattattcatacaaaaattataaaatattacaccaaattattcttatttactatttctaaagttttaaactaatattaatgtgttttacttcttttaattttcattttagtttgttttctattatttaagattaactttcactattttatccttctcaacaattttataaaaccttctttagcaaataaactaaatttctatatattctttcttccccacacaaattttctctctcatcaacttacaactaaattttagagacaaaaaagtgtgcaaaacatagctccaaatgtaatacgaaaaaaaaacattggaggatgaagttgctaaccttttaggcacctccgatttgtatataatcaccaaaataaattcactagaaattttggcatgacctcccctcttttttgaagaaattttaaagcttgctcgggcagctggaggaggaagaagacatatatatataggggtgggactttagtcccggttggtgttaccaaccgggactaaagttacgatccaatcgggactaaagatcaaatatgcccgttaccccttttaaccgagactaaagatcatctttagccccggtttttattgcaaccgggactattgtggaattcagccgaccgacgaaagatggtttctccaccagtggctccaaccctcttcgctgcttccccactaccatcaacgtcttccacccgcaagcttcgttgtgctgcccccatcgttctccctcgctgttgtgcatccagtgcgggggcccggtcgggttccgaggacccgccgggggcgggggtgggggagattttgccccgaactcctggtcggggtcggggcggggcgaagaatgcggggccggggccgggggcgttctacctccacccacccccgacccgccccgttgccatccctagttgagccccttcatccattttttttctttttcctttaccagatgagtgggcatcttttttttccctaaaaggggccgaatgtgagtggtggagcaccacacatacatgggccttaaaagtccacatgcatgatttttttaatataaattatttttctaataaattttaaatttgtatgtataaactttatacatacaaagtttgtacgtgtacaaattttatatgtataaagtgttaaatatgtgatccgaatttcaggcccacaatatattcgaattagttatctaataggattagttatccaataggactctactttatagaattagttttctattaggactcctagatttctcctatatatatatcccttgtaagccgtacggggagggtgcgacaactcaatgtatcccgtatcgaactccacaatagtgatcattgccggtccgcgcccgttgttttttcccgcaagggttttccacgtaaaaattcgtgtctccgttttgcatctattttcataacaagtggtatcagagcattggagatctgttccgcaattcacccgctgccgtgtttcacatctacgtcgtttcgccggttcggcgatatcgatcttccccacgctgttgtcaggagttttcggcgaaaacgactctgcgtagtcgaatcgatctgtctcgccgagatcgatcttctgccgccgcatggatttgttggctcatcaagtccgacgcggagtcggtgtttttgtgcgaggataaaaaggcgatgcagcagccgtcgtccacgcctacgcagccgcacgcgtcgaggaagcagcagccggccggtgtcatcctcgagcacacacaggtggagaaaaatcagaagccaccgagagccattgcttctgttctgatcacgtgaattaattttcacggttggaaatttgtggcacacggagtttaccaggaattaaagttctgtgcattgcttggttctgtcgaggtgaatccaaattcactttcaaaatggctatatttgcaagccaagtttactaagaggttctgcacggggatcaaaatactttgttttatgcagctagagtgtttcgcgtttctgctagggttttacaaattataccagcagattcaggattttattctcaaggcgagtttgaagtttgatctaccgctcttggattgagatgcaatattctcattatggtaagtgaagttttattatggcaagtgaagttttgcagcggggtatttacctaggaggagaagtatgctgaaaaaaaaaagagaagcacattcaagtcgtcgagagggagcctcgctcctgtctagatcacatggtgatcaaattgtccggtgaattttgctaccattgtacccaacataccaggatgttatcggggatataagtacttcgttttgtgcacaacaatttttcgcgtttctgtttggattccagatattaacgccaacagattcatgattttattcccatggcgagtttgaagtttgtgcatcagtttcacgtctctgctgggttccacaatatcataccagcagattcaggatttcttcccaatgacgagtttgaagtatggtctaacttttctggatcgagggtgttatagtatagtcatgcagactatttggcgcacattgattttatcatcatgaggttcttcggagattgaagatttttatgctacaagagaaattcgtctcaaggtggagattgttaaatatgtgatccgaattatgggcccacaatatattcggattagttattcaataggactctactttataggattagtttcctattatgactcatagatttctcttatatatttcccttgtaagccgcacggggaaggtgcgacaacccaatttatcccctacgtttgtatcgaactctacaatagtgatcattgccggtccacgcccgtggttttttcccgcaagggttttccacgtaaaaattcgtgtctccgttttgtatctattttcataacataaagttgtatggctttatacatatgtattgacttattttaattaaatataaagtgaatatatactttgttttgcttatgccaatgttaatgtacaatttatcgggctcaaggctcaatgggaagagaaacctactcggaagcgatcactactgtaggcgcccaaatacgcgtggcccatccaatcatgcggattataaaggaaaccctttctcctcgacgggcaagtctaatgggcgggtgatctctcccctcttcctcctccccttcttctcttcttactacagtataccaaaaaaaaattttaaaaaaaagttaaaaaaatttatgtatagaaatactatatataaaaaatttgaatttaaattcaaatttgaatactttttacttataaactttgggtctataaactttaggtgtctaaactttagatgtatagaaatactatatatagaaaatatttgaattcaaattcaaatttgaatcagatataattcaaattgaaatttgaatcgggcatgtaaacttttgacttataaattttggatctataaactttaggtatataaactttagatgtatagaaatactatatatagaaaatatataattcaaattcaaatttgaatcgggtatataaactttagttctataaactttagttctataaactttaggtgtataaactttagatgtatataaatactatatatgaaaaatatttgaattcaaattcaaatttgaatcagatatttgaattcaaatttaaatttgaattagatataattcaaattcaaatttgaatcggatatataaacttttggtctctaaactttagatgtgtaaacttgaggtgtataaactttaggtgcataaatttactaaaatagaaaagtaatacggtgccaaaaaaggaaacttggtggagggagggagggggaggaggggggggggggaatctgattgctctgggcgtcgcccactagcatttccgctcctcgacatcggactccgatgtcttctattatcatgaaaacaatttccttcctgacttgtgtttccttccacacattttattcccatatttgaatatatcttcaatctaatatcaggtatgcggtatttctatgtattattatgaatccatgtataaaatatatgctttatctgtaacactgacactcaaatgtacgagtaattattcttttgatggtaggtgacgtacatatgtcgatccaaaattatttaccgatgttcattaatgagaaaatccaaaaaaatgtcattaacaagcgtctaattggaagaaatgtcattgagaaatgcgagttccatgaaatgtcatcatacaagtgattttgttctagaaatgccatcaccattaggatttcgtcggatgcaggtctagtaaacgcggagaacactgtttgaacagtgatatgtgtcttgtgctacaatgctacagtagcaacagtgctcaaatagtaatccaatttactggtggatgattttttactgtagcgtgatactgtagcagctgatatgtgccgttcgatagagatccaatggctcaaaatatgagccaatgcaacttatgtactgtagatcctctgcattttactcttcaatgcagaggatctcaatccggtttcgtccatcccacgccgttaaatatacccaccttaccactgaacaattaataaatggttatctttagtctttttacacgagaagactaggcgtcgggtgctcgatggggtgtggaaaaatctggcgcccacgtcatgctgatctcagcaagatgcatgcgtacaaaaccactttaaactattttttctcttaaattatttatctaaatcatgatccgattgcatcgttaaattcgttacaattaaatctttaaaacaagaccacacacgaatatattccgatgaaaaaaatatttagcttattattgaattatttttaaatgttgcacattgttgcaccaagtatatcggaatcgtttcactaagtagatcgaaaatgtttcaatcgtttaaatcgggcgttatttcaccttatataaaaacaatgtttcagcaaatagtaaaagaatgtttcaagtcactgcaacatttgatccatacatagtgaaacattacaagtacactaagtgaaatatttttggtggaagaaatcatgaaacaaattctcttaatagagggtttccataatatatgggtgatttgttgcaaaagaatgtcccaattcactgcaacattagatctatgcatagtgaaacattgtgagtacactaggtgaaacatttttggtggaataaaaaatgaaacgaattctcttaatatagggtttccaaaatatgtgggtaatttgttgcaacggagtatgtggtggggacacgtggcagatgtttacaggggcacacatggtgcgtggtgggctggcacggcatgcgcgcgtcgtgcggcgggggagcgcccgattttttgctcccccgccagttgaccgatccctgacgtttcccctttttatacctctcattggtcttaaaaactccataaatttatagttgtatactagtatattttaaaaggaatagagtaaacaaaagtggtacaattattccgtaaaagtacataaccattctatcatactagtaatcatgcacgtgcaagacacgttatgttcaatatataaattaaacccaatatattataacccaataatctgaaagaagaataggtaaataggaaatagatcataagaaagaggatctgcttcaatcacacttgaagctctaactattccccgctgacttatgcacaaactgcacaattttcataaagtgcatgcatatatgcattctgattttcatattagatacaagaatttgctcaaaaataaatatgatcttcagccaatgtgcagaggtatgcataagccaatgtgcagaggtaatgtctgagaaaacaatggaagaacattagattgatatctcaaaggaagaagatacatagcacaataaattattgaaatggaagtggccactaacactaattatatttcataacagcaaacactacatagcataaaccaaaatccatagtttatcccttgttgccagtgcgctccttttttggcaatggctcaatcaccacttcatcatcttcaactatcaccacttctggttctcctggagcattattttgttctgccggttgcagcagctcttggttcctaaagttcacaccaatcttaatggcgtcatgcaggactggttctttgaacagggagtttctcacctctgcatccattagaacaaagattacaaacaaaatatgctagaacaacaaaaataacagtgtcctaatcaatattagttttagaattgcactcaaaaataaattggaattgacttacttggaatccatcaaagcgacctttctaacactgtttggaaaatttgcataatggtctataggaccgacatcagacacaatggcagcaacatctgtacaaatgtaaacatgtttcagagttagtttcagcaagaaaagaacaaacacaatatacacttgtggttcgatataccataccaacaattgcgccattaggcagactgaaaacttcagcaaaagtcatagctgattcttagaagagagaccttactaatgatctatggaagaggaaagatgagaagaaatgcagtggtgatgtactgtaccgaagtagtgggattggggctagctttataggggggacagattgggagtaaacagcgccttgcgtccgcggcgctccagtgatccgttggccagaaacgatgctttcctgttttacagtgttgataacaaaccttccactgatgaacacttcttgaaatacacaattagattgaaccccaaaaaacgcaaagagtaatttgatattacaaattgattccacgggatattaccaggtgtggaggaagacataggtgtggaggatggcacaggctgaaatgatggctgacaatttacagtttggcttccttcatgcaaactctgattcaaaactacaattcaattgaatgtgcccaggttttagcattgtttgccataaaataagcttgaccataataagcatcgaatgaatatatcatcacctgtgcccgatgtagatgcagaattcttcctctccctgttttcagggttcctttgaaccagcgcacccttctcctcaacgctgagtgccgtgtaccgctctcgggctcgctgactttttaattcattcgcagttagtttagaaaggccgtccatcgcaaggatgtacaaccttgaagaacacaccatgagcatataaaagcagttttaatatgcaacaggttttcgttaatattgatgacagtccgctcgctataacaaaatcccaaatccacattttctaagcatcaattagaacctacatgttacagaataacaggacctactgaagacttttcattttctaagaatcaatttgaaccacgttaatcagaacaaccggaaataactttttcagcttcaaactggaacaaaaatatttaccaaggtagtataatggtccataattcacatttcttgtagaatagaatcatcgacagtattgtacctgaaaacaatatttgctcgaagggagtgtgtgagttgctcccaagtcccaataatcaagcaacttattaagttaaatgagataagtacctgaaaacaatatttgctcgaagggagtgtgagagctgctaccaactaaatcccttgtgtgaaattgtg

SEQ ID NO: 26398 - DNA, 1261 bp, Oryza sativa
catcgccttccgatggccgacattgttctatcgcccttagttgtttttcatagtgtcatcggttgtggcttgccgatgtataattgccgatattggtatatcgcccttagttgtttttcatggtgtaatcggttgtggtttgccgatgtacaatgaccgatattgttatatcgcccttagttgttttataattttatcaatgctcttgacattgtaaaactaggggggcacatatatatcaaaatgcagtgcaaaatttttgagcaaattttgaagtcatattaattggcacaaaggattgttaagacaataaagtatcagaatgtcttagccgattacaaaaattctaagtcctattacacaaagattattaagattagtatcgctggatggccgatatagccttctgtctaatctgttctacttcttctatggcttgggcatcctgagcatcggttccagggacaactttcagagacttggtcagttcaccaacatgcttgatagcggatttgagtcttgctttctgttcttcaatagactttgggagatcggctagttttttgtgttccatgtccagctcagcgttgcattcttcaagttgtgctaagagttcaatcttgcgagcctcgagccgatcaatattagacttgaatgggccttcagatagttgatcgagcttggatttttcttcatacacaagttgtcggttggcttggatagtggcctcaatgtccttacgctctcgccattccgccagtcttaacttggctttctccaatttgaattggtgttgctcaaggtaaacggctggggtaaggatatcggctagctcatgtgggattagagcctgaatctcatgtagccgagccctgattgagccacaatcaaccaccaagctatctagcgatgatgcttctagccgacccaagatacttcctagagttttcttcacatcatcagataaaggggctaaggctttgcttgtggtatcttcttctccttcatcaagatagtctctgatgtcaaaagagaaaagatcggctaatacctgcagtgacaatttagaagcagttagaaacagtcatagccgatctgaatgcttgttgagacaaaaagaaacttactgggatagcaggagcagctggttgttcttctttctcgacgtgatgacaccccacaatcggctaagacattctggtcacttgacgattgttgtacaggaggagggtaaggctgaaaggaaactagtgtcagacag

SEQ ID NO: 26399 - DNA, 1686 bp, Oryza sativa
tcccggtgaatcccaatgagttctcgctgatgtcttcgctcgcggaactggccacggcgatggaggagatgtcacgcccgaaatttctatccaaaattccaaacgcttacatgtgtgtgaaccctcgtccaggaatcagccgaggcacacaataacaaattgataatagagtacaattattactctaattaataagtgaataaaatgtcattacagaggtagatagttcctctcaatcaataaagatctaagcagcggaaaataagataaacggcgcagacggctccactccacaggcagcttgaccagggctacacctaatcctccacaccatcagcatcattgtagaactcttcctctgatgaatgattgcaaggtgagtatatgacatactcagcaagccacgcagcaaatatgcaagtgcacaggataccaaaggatggcatagtagggtttcatttgcataaacagcatttaataaacatttcagaatttaataaaacggttaagtaataattaaacaatattaatccaacgctatacaacataccctattgtataggccctaccattctgaacaaccatacccggctgtacagatctatctccaaaccaggaatataccattccaaaccaggagctaatcaaattattaccagttatacatcttttatcatgatgagaggtgtgagactaatcacgaaagacattgttaggcgtgcccataaccgcgggcatggctattcgaatagttttactatggccagaggtgtaccactgtacccacaagacacagccccacaacatgtcaccatgtgcctcaataccaccacggtacctcggaaaggagttgtgacaataccccttgcacaacacaatccaccacagcgcacctttcctggatcataatcacccccttataaacaaggcatggactccccagcgacccccgtgggcttatctccgccacttctcagtctggtgctccgcaatgaaccaagctatacaaaaggtaaagccgttgcccacgctggcttgtggttggcacggttaatgtttcacaaccgaaactcgtgaaccggtccttaattgtcatgagcacgactctcaaaaccatgtgctcacaacccaccattatcaagttttagttggcaagtaattaattgtcgcgaccgagaaaattgcattttcccgaacgctagtgtattaatccccgtcccaggaaaagccgaggtacaccatacaaacatgatataaaagacacatctttattatatcgataatatttacattattacaaaggcacttaaggcctgacaatcaaaaataaacagcagcggactagcgggcctacggctccatcttcacaggcgctcaactggggtgtaagccaagactccacctaagacatcttctccaaagcttctcttactgaaggggggagaaagatagagcaagaatgagtacaaccacagtactcagcaagccacaccggcggatgcacgattaatgcaaggggtacaaggggtaatgatataggggttaagttttgcagaaaacagcatttaaaagtcacttagttgcccaaagccattttaaaaagacgatcctagagctacacagtattattaatcaaggtcgttaacccgcacgaacttgccttaacccaaggcctacgatgattca

SEQ ID NO: 26400 - DNA, 918 bp, Oryza sativa
ttgtaagagcttggtaaggtgctccatttggctgagttgttgaggggcaccactacaccgcgtagcagattattagggataaccttcattatttgttgttgtttttgtgttggcaatgacagatatgagtggcgctcaaaatcagcgataccaacaaggtgcacgtgatgacagtactttggtgcaacgagtgctaagttctcaaatggaaaaagcggagcaatggcagtatcacgaattatttgaaacaaagtttgtggttaaggatagagcatatcgtactataatcgataatgagagttgcaataacttggtgagttcagatttggttgagaaacttgagttgcctacacaaccgcatcatcatccatattacatcaaatggttcaactcttgtggtaagttcaaggtaaatagaattgtgagaataaacttttcgattgaaaattaccatgatactgccagttttgatcttgtccctatgcaagcatattctttgttgtttggtcaaccatgggtatatgataataatggtttgcataattttgttgctaatacatacacatttagacataacggttgaaaaatgaaattggaaccaatgagtttttctgaaattttcgaagataatcttgaaaggatgaagaatggaatcaaagaaattttcaaagatagtattgaaaggacgaagaatagaatcgatgagattttcagagataccaggaataatactaatattgtgatgccttcaactaagtctgagttgttacaaaatgaacgtaatgttgtgcctattgttttggatactaatattttgtaggcatctgagaacaaccaagttagtaaggaggaagagaagaaagatggagaggaaaaagatctatctatagctacatgcatgcgggaagaatgttcaat

SEQ ID NO: 26401 - DNA, 2250 bp, Oryza sativa
agtggaaccgattgttgaaatacctttgtcacaaaacaatttgcttgatgtttcttgtgataaagaaaagttgtgcgatgcttcacttatatccatgcaacaactagtgaatgaacatgttagttctatagtagagccactatgtgttgagtttaaacatgttattcacattgctagcgagaatgaagagcctaaattgcaatcttctttaaatacttggggttatattcaatttgatgatctttgtccactcaactgcttagagaagaaattatttgatagagttgaattgccatgcccttctgatgtgatttttcatattattggtaattatgatagtaaaggagaatataatgtgcatcgagtatatatttgttcgaatttgactatacctcattttcatgataaaatgtattgtcgagaggaccgcgtgcatacaagtaattctctatctagttcctctagttgtttaaatgagttaagggttggtttgcaaaaaggggagtgttgtggtttttcgactacaaagattttaggatccaatcatatggccatcaagaaatgttccgcacaggatgttatgatagacaaagataagtacaatacactccatgacaaggtgaaaccgaggacggtttccaatcaagaagggaaggatgatgaggacataactagctctgatataaccatgactaccttatgtattaatcaaataaaggtgcatatgttctacattagatttacttgttatatatttgaacaaacgttgctacacaatgagtttcgtgtgttttcatttgcagaggtagttgcttgggcgaaagaaaagagaccgagcgtaactaataaatggatgattgaagaagttgattagggaccaaaccaagacctctccaagtctacttctacctcaccacgtcacttttggtccatagaagacaagagataaagttctacatattttggattcgaattcgggcctcctgatagcatcaacttcaaatggacctagccgctgatctagaaggaatttcgggacccatgagtacttgttggaaagcttatggagtctaccttcagatggttttggtcccacatcaaaattcctaccgagctgccgggaatctgcaaaacaagccacgtatctcatccagtccgaatctgactcgggttttgggccttttaattgtatcgtgggcttagcccaagggggtgtgcgccctagggaaaccctaggacgtccctaatcatattaattcagtagccgtcatcgtttagagttgggttttgcttagattattctgtcaagaacagtttcgctgctagatcggtttgtggaaccccaaattcgagtgcttaatcattcatatgcaatttggttgcaatctatcttgttcttgcttgtgttcttcgattcgcatgcagggattagccttctcggcgaggtcaaccgggtttcggcacgattgataaccagaggagacgtggtgctgcgattgcggggctcagtagcgtgtttgttcagaagccggatcgagttgtgtcgcgactccgcccaaatcgttgtttatcaatacctatcggaagatcgggacctaatatccctcatcagttggtatcagagcgtggttgcccgttaggtaatttatcttcccataaccagaaaattgccacacaaaaatatttattctttacctagacaatttgagccgttgcattgttctattagattttactttgttgaattctaggttgcatcgtcgtgtcgagtgctggtttagttttagatttaatttttagttttgagtattgcatctgttcatcacttaggtctagggtacatcactcaagtgtgtgagttgtacgtcagttttgggtccagtttttcatctcgtcagttgttgccgggaccttgaaaaattgaatcatctcgtcgtcgggtttccgtttttgtattttggagaaatttttatccaacggtttgggagttactcgatttctagagctcctatgttgcattgtgcgcgcgcgtgaggggagtactctgtgcgtctaaggagagactccggatcagatcagatctatctgtgactatccgtattttcctttatagaattgttaagtagcggatttgagatatttgtataaaaatggaacctacatgatatgagcaatccatttttgagatgatccaattttagttttgcactttgcgtttgagtccctatatattcatatttacatttgagt

SEQ ID NO: 26402 - DNA, 1103 bp, Oryza sativa
attcaatatgttcaaagatgatgtgacttgccttgctcgctttcccaaacgccggcttcaacttccacgaagagcggatcctccgaagctgcagcgtctgcacgaccaacggaaaagaaaaggcttttactctaataaactccatataacaagcagaaacaaagcacaaaaatgggttcttgacttcttaaggaaaaattagagacttgaacggtccaattccgagttcaaatggccaagttatggccatttgaagtttatatgctctttaaatgaatatttgcgaatttcttcatttaaattttaatttaaaatggatttattgcgtcagccgaggggaggggcgcgcggaccgggtccacgggggtggggcccacgcggcagccccacagtccacggtggaccgggcgcacccgggctcacaccggccggcgccgtgggtcccacgcgtcagccgcacccgagggcgcgggcggctgacggccgggccccacatggcagccgcggggcgcgcccgaaggcggccacgccggcacggccgacgggaggcggcgcacccgcgccccgatggtcgcggcccgcgaccaacagcgcggcggagcggcgcccgatacagaatagggaaggggcaagcgaaaggagcggtccacggctcaccccgggtcaacgaggacggcggaaacgacgaccgaagcggaggaaggcgtcggcgcggttcggatcgacgaggacggcggcgctccgacagtcggcgggctaaacgaaggggtggccgaggtcgacggggacgcggcgaagccgaaggaggtgacgccgagtcgggaggaggtccagagcgactacggcggcgaaccggagctcggcggcgacggcggagagagaggaagacggcgcgggcacgaatccgacggggaggagaggcggcgagtggcggaaacggtggaggagagcacgggggtggcttaaatagggttgggagtgagggaaggcggccggaggagatggaaaccggcgcggaggatccggccgccattgatggcgccggcgaggtttgcgggagtgaatccggacgaatccgagggagagagagagggaaaaacggg

SEQ ID NO: 26403 - DNA, 1353 bp, Oryza sativa
  unsure (1)..(1353): unsure at all n locations
aataggttaattccacccaatgacattcgaaaataaatgcaatagttgaatagaaacagtagctttaaacgggatcaacatgctcaaagggttgtttgggatctgtgtgacttgccttgctggccttggaactcttcaaaatcttctcctgcgaaaacagactctccggaaacgtcggaatctaaacagaaaggagcaaaatcaccaaaacagcacataaacaagcatgaacagtacatgtggatatttttaacatgtagatcttaattttagaaaaatttagagacttgaaccaactaaatccgagctaagatgaattagttacgaatttttaaagattaattcggattaaaacacttatatgaattttaattatgacgcaataatgaattatttttgaaaaggaaaagggaattattgcgtcagcggctagggtttgcggtggaccgggcgcacggcagcggttcacggaaacggacggccgagatcgatcttatccaaaacgaacggccgagatcgaccggtccacggccggaccacgagagacgacgacgatgacgtcagcggtgacgtcaccaccggcggcggctcgggcttgcaaactcgccggcgaacgacggcgcgacgacgcgaacggagggcaccagcacgtagagggtgacgcggcgaactcaccggtgaccaaaacggcggcggaagatcaacggacggcgacggcgtcaaggaagaagcggcggcgaccttcggcttgacgacggcggcggtgttccggcggtcgacagcaacggcgaaggggcggacgaggacggcgacgcaacggcgaccacgatggcgacctccccgagcgacggcgatgactggagcgatggcggagcacggctggagcacggtgacgacggcgtcgcgaggctacacggggctagagcgctaccgacggcgagagacgaaagcaaaggtggcgacgggtagcggagacaccgggggtccttttataggggttggagggcggcggcgaaggcccacggcgaccggcgacgcgaaggaaaggttagggttcggaggaaagaggccgatccgaatcgaactcgaatccacgaatttccaaagcgatttagacgatgtttccaaaaaggaaaaggtagaggagatctcgggaaacatttcccctcaatggatttcaccagagaaggaaaggggcggccgaatttggaaggaaacggcggcacggctcagctagggttcgggcggcggcggcggcggcgcgaggttgacnacgaccctgacaggtggggcccacctgtcagcgggagagagagagaagagcagcggctcggttgcggactgggccggctt

SEQ ID NO: 26404 - DNA, 903 bp, Oryza sativa
agcagccagttaccaacaggcccttcgccgatatcacgagaagcgcatcagagcacgcacactttcgattagtgactacgtcctctgacgggttcaaagccaggcagggcgtaacaagctctcacccaaatgggaaggaccgtacacaatcacgcaagtcttgcggccgggtgcatttaagattgcagacggtgatggccgcgagttagcaaattcttaggaacattgatcaattacgtaaattctatgtataaatcaatagtatccatacttgtaagacatcttatagcttcaataagatttatttttaggtaaagattacaatcaaagtgttccttcccgacgatccctcaccacgataacacctagcattgaaacctaacctcatgtccctttacgccgtcttgacaaggcctccgaggaacctaagggaacttcggctggggacactcagagccgataaggccttgtcggatcatgaagggacaaaagaccatgtaagatcaggtcgtgtaagagttcttgccgcgcgtattaaccaagccgtgtaatcggaaattgggttttccaacttcactgctgggggctaggatcagtgcttgttcaaccaaggcaggtcaaaggttcaagagccttatcttcctagaaaaattctccgatgataaggctgggggctagggagagtgtatgactcaagtgactgatcgaagtcacgaagtgagaaaacactcatacacaacgcatctagagtaagaaaacttagttagatagatttcttttctatttcacaactacttcttacagttcgtaaatattccaaaatatattacatgtctccctgagatatttgtcacaggatataaagactaccaggaaggccaacgccagtccatggactggaag

SEQ ID NO: 26405 - DNA, 1860 bp, Oryza sativa
gacgccgccgtcgtccgttcatcttccgccgttgtttggtcaccggtgagttcgccgcgccgcgctcaacgtcctggtgccctccgtttgtgccgtagcgccgtcgttcaccggcgagcttgcgctcccgagccgccgccggagatgacgttgccgctgacgtcatcgggaccgtccgtcgtggcccggccgttgatcggttgatctcggtcgtccgttttggataggatcgatctcggccgtccgtttccgtgaaccgctgccgtgcgcccggtccaccgcaaaccctagccgctgacgcaataattcccttttccttttcaaaaataattcattattgcgtcataattcaattaaaattcatataagtgttttaatccgatttaatctttaaaaattcgtaactaattcatcttagctcggatttagttggttcaagtctctaaatttttctaaaattaagatctacatgttaaaaatatccacatgtactgttcatgcttgtttatgtgctgttttggtgattttgctcctttctgtttagattccgacgtttccggagagtctgttttcacaggagaagattttgaagagttccaaggccagcaaggcaagtcacacagatcccaaacaaccctttgagcatgttgatcccgtttaaagctactgtttctattcaactattgcatttattttcgaatgtcattgggtggaattaacctattgtttgttatagccctttttgttcttgattactttattccttgataccttgggttattataatttgactagttgggctatatatattggttcagctagatattagatgtgattgcttagccatgcttagaaacattagcacactattgggataacttatgactcactattatttaatgatggcttaatgatagttcacgatggtcaatcgtgattggttaattaattacttgccaactaaaacttgataatggtgggttgtgagcacatggttttgagagtcgtgctcatgacaattaaggaccggttcacgagtttcggttgtgaaacattaaccgtgccaaccacaagccagcgtgggcaacggctttaccttttgtatagcatggttcattgcggagcaccagactgagaagtggcggagataagcccacgggggtcgctggggagtccatgccttgtttataagggggtgattatgatccaggaaaggtgcgctgtggtggattgtgttgtgcaaggggtattgtcacagctcctttccgaggtaccgtggtggtattgaggcacatggtgacatgttgtgggactgtgtcttgtgggtacagtggtacacctctggccaaagtaaaactattcgaatagccgtgcccgcggttatgggcgggttgagcaatatttttcatgattagtctcacacctctcacaataattatggatgttatacctggtaataatttgcttagctcctggtttagagttagatctgtacagccgggtatggttgttcaggatggttgggcctgtgcagcatgggtgtgttgttcagtgttgattaaaatttctgattaattactccactggtttatttctcttaaatgttttgctaaatgctgcttttgcaaatgagcctatattatgccatcctttggtatccttgggcacttgcatatttgctgggtggcttgttgagtatgtcatatgctcattcttgcaataatcaatcaacctcagttgaagaaaaagatctaggaggagaagacgtttggcttataccccagttgagctgcctgtgggagtggagccggagcttcactagattttattttccgctgcagttttcttcatggtgaggac

SEQ ID NO: 26406 - DNA, 773 bp, Oryza sativa
ctgcgattgcggggataagtagcgtgttcgtttagaacccggatcgagttgtgtcgtgactccacccaaatcgattgtttatcaatacctatcggaagatcgggacctaccatcccccatcagaagggaacaatcactgttcaagggaacgcaaagctgtcagtgcaatgcgacaagcagagcctcgacatggtcgagcacacgcccagcccacccgccacagatgagccacccaggaaagtgagcaaaacgaacaagacgccgaaaccagacggcgcaatcaagatcgttccgctctccagtgccaaccccgacaaggccgtcaagatcggggcatcactgggcgagaaataggaactcgcgctcatcaccttcctccgtgacagtgcatatgtgttcacttggcagccgtccgacatgccgggggtccctagggaggtgattgagcacaaactcatggtgcgacccgatgccaagccagtaaaacaaaaactgcagagatttgcaccagatcgaaaacaggccatacgagaagagctcgacaagcttctcaaagctactccatccagagtggctagccaacctagtcatggtgcagaaggccaataggaagtggaggatgtgcgtcgacttcaccgacttcaacaaggcgtgtcccaaggatcacttccctcttcctcgaatagaccaactggtcgactcaacagctggttgtgagttgttaagttttcttgacgcttactccggttaccaccaaatcagcatggcgaaag

SEQ ID NO: 26407 - DNA, 868 bp, Oryza sativa
aggtttacaatcttgcatacaactcggcgcagaatgtcattggcatactttgcctgagttaaaattattccactgatcacttttgctcacttctattccaagaaagtaatgtaaatcacccaagtcctttaaagaaaaagctttggtaagatcctgccgaaaagcagaagttgccctagccatagaactagcaacatttatctcatctacatagattagcacaaacatggtgacatttcccttattatagagaaacagtgaagcatctgccttggatgatttaaaacctagctcatgaaattttgtactcaaccttgaataccaagcccttggtgcctgtttcagaccatataatgctttatcaagtttgcacacataatttggtaccttttcactttcgtacccaggtggttgtctcatataaacctcctcttcaagaactccatgcaagagggcattctgtacatctagctatcgaagactccatcctctagatacagcaatagacaaaattgttctaatagtagcagctttaacaataggactaaaggtgtcctcgtagtctatgccatacctttgcttgaaacctttagctacaagtctggccttgtatctatctaggctcccatctgctttcctctttatcttgtatacccacttgcagtcgatcacgcttcttcccttttctagtggtaccaagtgccatgtctcatttttcatgagtgcatcatactctgcatccatagcatctttccaatttttattagtaaaagcttcatgtaaattttgtggctcacctgaggcagtgaagcaacccccatttgattttgccatcagtctatactttctccttgcatatttcgctctg

SEQ ID NO: 26408 - DNA, 1374 bp, Oryza sativa
aagcaaaaatgcttcagttcggactctagccaagagtgcaacttcagtagcttccactggatgtacccgtgatattacatgtcataggtgacatggcattggatacattgcccgcgactgtccaaatcggcgagctctatttgtgaatggtgatggtgagtatacttctgctagtgattgtgatgatgaatatgctttagctgccattgaccatgcaggaggacaagataacgataacatcgaggaagtccatttgcatccagagtcgctagatcagtatcctagcctaattgtcaagctagcacttagtgctaaagagaagtgtgaagagcaaaaccaacatcacaatttgttccaaagcaaagttcttgtgaaaggccatactgtcaaagtgattattgatagcgggagctgcaacaatttagcaagtgaatagatggtcaagaagcttggcttgactacccatccacatccacatccgtatcatattcaatggtttaatacatatggtaagatgaaggtaacccgtttggttaaaatacctttttctatgggctcctatcatgatcaaattgaatgtgatgttgtgcatatgcaagcttgttcctattcttttgggccgaccatggcaatatgatagagaagttgttttcaatggtaggaccaatatatatatatatttatattcgatggtaaaagaattgttttgcattgtatgactcctgccgctgtcgacggggaatacccgtagaccggatatagagggtattggggtacgctggtatgaggatttacgtagtacgacatcaagcaaacaaaagacagggattataccggttcaggcctcttaataggtaatagccctaatccagttgatatgggattatatgacggaaatcacagattacaaagggaatagtggaactcgataataccgacgagatcgtagttgagttggttcgactagatcacccggtgactcggctcctgtaggctctggcttcgtaagctgtgatggatgtgttggcggtaagattcgatgccttaagtcctcccggggggttgttaacaaccaatttggtaacatcagcgttgggaaagaagattaggtcaaagcaaagtcggaagcggagatcgagtttgaaaacagagcaggaatcggctggagtccagatcggctacgataagatcggctgggtctgagtcgggctaggtaagctgatgtagccgataccgacaatatgacttgtacgcgatatcgggttcaagttaatgtacttcaagatgattgccgcgcacggatagagtcctgggaaggcaattgtatctattaattaggatatcttatgtaaattccttatagataaatgtggg

SEQ ID NO: 26409 - DNA, 776 bp, Oryza sativa
aaccacaagaacaaatcccaatttttccaggaacaaatccaattgcaaagaacatatgcaatgaaaaggattcagagggctcttaggtttttccatttggcttgtcctacagtcaaggtcggctctgataccaacttgtcacgcccagaaattcccgaatagaattccaagcagaatgtgcattaaaatccccgtccaggaccatccggggtacacaaacgacaaagttgacatacagatccacgtcttacaaacattataaaagtcttacaaaaatgcagcggaaaacttaaaggataactggagctaagccttgacttggacttgcagcgggaacaccactccacaggcatcctcgacggcacgggcgaagcctactcctcggaaagaccaccatctgacgcatactcaaattctggggtttggggaaaatagagcaagactgagtactacccactgtactcagcaagtcataccggaataggggtatgatgcagggaattatcaagggatagctataatggttcatttgcataaagcgagcatttataaacagaagttgaaagcagtaaaacagctgtaataattaatcaatattaaccatccactgttcaacgctacaccacgttgcaacaggcccaaccatccacctgaactaatcagttccaacagactacactagggtgaagctaatcatggtgaatctggttgaccgcccataaccgcgggcacggctattcgaatagttttactctgatcagaggtgtacaactgta

SEQ ID NO: 26410 - DNA, 644 bp, Oryza sativa
tcacgctacatacttgcccaccaaaatctttccttgagatccagggacatcttggtcctaccagggtgaatggagtatagagtatcatgggcctcgttcagaactacatcttttaaatctttgttgtggaggatgcagattctttcgcccaaccagtcagtcacgtgctcatcttccaagaaacagacagctcttcctcttctcatattcttcttggtttcttgaatatcaggatcattaatttgggcttctctaacttgatcaataagagtgggcttcgcttctaaggctgcaacgaaacatctactgacaattcccaaatttaatctttcaaagtccttacataattccaatggcaactgtcgtcctttcgtagcattgcaatagcctttcgtgctaagagcgtctgctacagcattagcctttcccgggtgataatgaattcccatgtcataatccttaattaattccaaccatctccgttgtctcatgttcaggtccggctgagtaaaaatatactttaaactcttgtgatcggtgtacacctctgtacgagtaccgaaaagataatgacgtcaaattttcaacgcatgaaccactgcagctaactcaagatcatgagtagggtagttcttctcatgcgg

SEQ ID NO: 26411 - DNA, 523 bp, Oryza sativa
agaaagttaaagctgccagtagtgaatttacctcctttgcatctctatggtggaatgatatatgtggtagaggacttagacctagagcatgggatgatatgaaacgtacaatgaggtctagatttgttccttcttactatgctcatgacatgttaaatcaactgcaacttttaagacaaggttgctttgtcaagagatgatgattgctttgtcacgatgtgatttgcaagaaactgaggatgctagaatttctaggttctatggaggtcttaatagagagattcgggatattattgaatataaagaatacaataccatgaatagattattccattttgcttgcaaagctaaaagagaagtgcagggatgcaacaagcataggagttcttttacaggtgctacttccacacgacagtcaacaccacgtcaatctactactggcattcatccacctacctccacgccatcccatgttcaagaaacaagcaaaaatgcttcagttcggactctagccaagagtgca

SEQ ID NO: 26412 - DNA, 2188 bp, Oryza sativa
gagatgcggccatgaacttcgcgagagcagttcttccgatgatagcattgtatgctgtatcaaattcagcaacatcaaaggtgatctgctctgttcggaagttatttgcttggccgaaagtcacaggcaacataatcttgcccaatggcttggacgatgattgaggagtaattgcatggaagggttgattaatgggcgtcaactcgcttcgtgggattcccatagtgtccaaggtgcaggcgaagagaaggttgatggagctgcccccatcgataagaacccgtgcgaccttggtattctaaatagtgggctcgaccacaatcggatatcgtcctggcgtgacagcagtcttggggtggtcttcatctgagaactcgatcttctgttctaaccacttcatcttggtcgcagccctctgccatgtcgaacaaacttcacgctccattttcttgtactctctctttgaggagtaccccatggaacctccgaagatttgcgagacatggagatcggaatcaggttatgctgagtccaagtcctgagtagctgcctcagcggccttctcgactacacgtactcgtttgcccttctccaatgccagttgctttgcgagcgactttttgaagacgaagcaatcttccaaagagtgtctgtctgacttgtgtatggggcaccatattttcttcgtgtcgttgccttgtgggtcagggtgcttgggagggtccacgtactctgccgcgaggacttccgtttgagctttcgttttcccactcttgtgactcttcttcttgcttgattcaggtgcgtctttggtggtttcttctctcctcccgtcttcggctttgttgttcttgcgtcttagtgcgtcgtccgcgtgagcgcatcaatcgacaatctcgaatagttttcgagcagtcctgatcctccttgtcgccaactcttgggtggtatagcgatctctgaccccagtcttgaaagcgtagatcacggaagcattggtgatctcggggatagtatttctgcactcattaaagcgtcgaacgtagtccctcaatgatttgcccggattctgtgtcaacgcgtgtaggtcgtcttcgatcgcatggcgcttgtaagttccttggaagttagcaacgaactgctgccacagatctgcccatgaagaaatcgagtatggccggaggtgaacaagccatgaacgtgcagatcctttcaacgccactggcaaataattcgctaacgcgttgtcgtccgctccggcagtgtagagtactctggaatagacctgaaggaattcttctaggtcggtgctccaatcatacttctctattgctcccggtcggaatctctcaggccaccggacatcacgtagagcacggttgaaagctttacatctgccgctgggggtggtgggttgtcgatgatcgtatgtcctccgtggatttctgtctgacaatgaggatgatgaggatgatgacgatgacgatgagtcacttggttccggtgtacgattacgaggatgacgtccgggttctcgagaatcctgtcgtcgcctcccgttgatgtcccggcgacgatctccatcgtcatcatcgttatggcggcgtcctcgaccagtatcgcctggcatccgctgttcgcgatcatcatgttcgtggcggctgtggcggttatcacggtctcggttttcgcttgggtgtcctcctcgctcctcgttctcgcgacgtcgtgatgagacgcgatgtcaggaatggttttcattgtctcgcgcgtgtcgtacttctcggcggccattaagatggtcacaaagatcgccggtgccgcgaggtggaggggtgtcttgtcgaggtgatgtccgctgctcaggtggttcaccatttgcaccgctagctggcggttgttctggtttgctccggcagtggcctcctcgaacgcattactgagattggccactgattcccgtagtcattctgtccaccgtgtgaggtcatcgttcagaatgggatcataaggggtttccctcagtattgcgttgatggccccgatgtgctgggccggtgtaaccacttgattctccacttccgcgtcagcacgcgcagacgtgctggtcccgccgatagcaaacacatcgcgtggtgtgcttgtcgacgatgagccctgctgtcacaccctgaagttctttcccaag

SEQ ID NO: 26413 - DNA, 1472 bp, Oryza sativa
tcatggtaccactagtatgattttaggtagatgcttcgctggttaattaggtaacattaggtggttttacaactctagaccttgggatattcatatcacctggacactatggaattgttggattattgtggaattggattcacacctccccctctattcaaaatccccaaaatggttttaggctgggctcggggtgcatggttttgatagtagcacctcggccatataaggaccggtcttcgggcctctgttgcaaagcactaccgtacttccacatgtctagtgggtaaggcttagtttgtggctcagtctggttataaacaaaagtacacggatggagatggacgaagtcgggggtcgatggacatctctaggacaattgaaggctacacgagctgcggcccagtagtcgagatgtcatggcacagggccggtgtcctgctgctaggggctcaatcctgcctacctgtcccggaggttccggccgtaggtggggttgggtcggtactcttgtctatggctaggatgggttggaaactatgtcacgtcttccgtccgtataccgtggtggtatgtggcacgtggttacacgtgaggaagatgtgtcttgtgggtaaagatgtacacctctgatcagagtagaatctattcgaatagccgcgccctcggttatgggcaagccgagcaatgtacccaagttagtgttttaattcttaaaacctgcttaacaactaaaatatggaatggttggcctgggttggcttgggacgagctgggacccagggtcgggttgccagttcggtctgaatcatcgtaggccttgggttaaggcaggttcgtgtgggttcacggccttgattaataatattgtatagctctagaatcgtgtttacaaaatagcttcgagcaactaagtgtcttttaatgctatttactgcaaaccctaaccctttatattataacccccttgtacttccctgcatttattctgcacttgtgggtgtgtcttgttgagtacggtggttgtactcagtcttgctcaatttttcccaaacccagaagaggagtccctagaagatgaaggctttggtgtctagctcgtgcctgccgtcaagcgcctgtggtcgtcgccctagtcttccgctgtttcccgtttgtctttgtgtgtgctgggccttcgccgcccatgtaataaattaactatttacgcttccgcttgttgaactctgaactgtatcaactcttggtgtaccttgcctcctgggacaaggaataatgcacgcacgtaaggaacgcccgttgggttatttccggtcgtgacatccatgctatagaaaaacatcgggtcttctgcttgcaattcttggaagtacttgatggtttcagccatgtcaccattgcatgtagtccggttcctcattgatgtccttatgttactaacatctttcttcgtgaacggtatgttgcgaatg

SEQ ID NO: 26414 - DNA, 1867 bp, Oryza sativa
catgcatgcgcaataaagtaggagatcaatctttgacttaaacaggaaactcggatactttttttttcttttctcaaaccaatctacaaactctaccgggatgaccgcaacaaaactaaccgatgagacaaccagatgcatacccaaaccaagatgaaactagggctaagaccagatcttgacacgacagtagaccaaaactcaataaagcaaaattgaatgaaaattgcaaggttcaaaactaatgtttggtgaaggaaaaagtgatgcagcaatttgtagataatgggtagggaaaataaatctataaaactaaaatcctcaccaggcaaccgatgctctgataccaactgatgacgctctctctcgtggcccgatgttctggtgaggggataactctcactttgatcgagtgcgacgtttgcgacgtggctaccaaccagaacaagtccaggacgccgtgcaatcgctacaccacaaaagatgtcgcgcgcggttgatgatccctacaatgcaaacgagagaacactgcaagaacaagataagatgcaatctaaatattgcgaataggtaattaagcacaaagaaatagttgcgattgaagtggtagatctaatcgacccggcaaataacacaccaactattggggcctctgaatctatagtcgccaactaatcgagcgaggactagagacaaggtgaatggcagttggcaaaattcaactaaacaaaacccaattgtttttgagaatgtacaaagctatttatagaggaaaataaagctagggttaagtgctaattcgtggaggtggagggagacacttccgagatgggtctagtctattacaaggcccaaggcccaagttcggtttcagcaatagcactatcttattttggcgattcccgttgactcgagatgaatttgaacatgagaccggatgcgtttgtaagatagcgagataagctttccacgaagtccaagatcacccaaatcggagttggcataaaggcgttaggtctgtttgaactcagtgctatctccggaggccgaactggacttggacttggaattatcattggaacgtgtgaagttatgtgcgtatccgacgaagtgatgtcctcatcagcctctatcctcttgctcccgccgtctccaaggaagctctcagtgtcatgccatcctttgcaagatggcacaatcgtctcggtcatccatctacctccattgttgcaagaataattagccacaataagttaccttgtcattccgagtctagaaatgagtcggtttgtgatgcttgacaaaaagctaaaagtcatcaattaccctattcaaggtcatctagtgtgtctagtcatcctttggaactagtcttttctgatgtttggggtcctgcccctgattttgttggtaataagaagtattacgttagctttattgatgactacagcaaatttacttcggtttattttcttaagcacaagtcagaagtatttcagaagtttcatgaatatcaagctcttgttgaacgactcactggtcaaaaaatcattgctatgcaaaccaactggggtggagaatatgaaaaactccatccattatttgaaaaaattggcatatcttatcatgtgtcttgtccccatacacatcaacaaaatggatcaacagagcgtaagcatcaccatgtaatagaagttgggcttgcactcctagccaatgcttatatgcctcttaagttttgggataaagcattcctcactgccgcttatctcataaataggacacctagcaaggcgatcaaccttgaaatgccactagagctcctatttcaccaaacacccaattatcaattccttcgaatttttgg

SEQ ID NO: 26415 - DNA, 568 bp, Oryza sativa
  unsure (1)..(568): unsure at all n locations
atatgtagatctttattttatacaacttttgcaatttgaaccacattaaactgagttacaatgaattagttatgaattttcaaagattaaatcggattaaaacacttgtgtggattttaattgaattatgacgcaataaagaattatttttgaaaaggaaaagggaattattgcgtcatcaaagcggtnccaggtgcacggggcggtctaagaaaacgaacggccgtgatcgattctatccaaacggggcggccgagatcactttgatctaccgcggttcacggacaagccgacgatgacgtcagcggtgacgtcagcgatgacgtcatcaccggcgacggctcggcctcgcgcgctcgccagcgaacgacggcgcaacgacgcaaacggaggacaccaacgggtagaggacaacacggcgaactcaccggtgaccaaaaccacggcggaagagcaacggacggcgccggcgacgaggaagaagcggcgacggtcttcgggtcgacggtgacggcggtgctccggcggtcttctgcggcggcgaagaggtggacggggacggtgacga

SEQ ID NO: 26416 - DNA, 632 bp, Oryza sativa
ttatcataccgatcatatcaattccccaacctctgaacggccacggcttaataataggattcatagccgacgccggtgcttgctgaatagctgcgacaatggagttgcagttctgatggttcagttggtagcttattttgggtggatggagcctccaaagaagcctacaaaaaatttggtgattgtatcgtcttcgacacaacatactgcaccaataggtataaccttccttttgctccaatcattggtgtaagcaaccatggccaaactgtgttgtttgggtgtgtattcttaaaagatgaaaaagttcagacttttgaatgggtgttcgaaaccttcttgagagtaatggatggaaaagtgccacaatgcatcatgactgatcaggacaaagcaatggagactgcaattgcaaaaatactaccaaataccgttcataggcgctgtatgtggcacttgcacaggaatgctagctcaaaccttggtgtgctattgaaccagaaagaggggtttgaatttgatttgaagtcatgtattgagacctcgttgaatgaacaagaatttgatgaaagttgggatgctatgatcaatagatatgagttgcaggggaacaaatacatgcagcacctata

SEQ ID NO: 26417 - DNA, 1174 bp, Oryza sativa
  unsure (1)..(1174): unsure at all n locations
cttcgccgcttgcgccctaactccttgtttcctgtgccctaccttcgccacacgcgctcgctctcaaacatctcttcctccggcgtcatggcacggggctccgctttgctcgatggtagcgtgctgccgccttcccgcatcgtgagcgagaggcaggccgggctgccgcgccgcttcatgccggaatctgccaccggccgggagatagtcacgctgggcgagggacgcccggcgccacactacccggggcggtccgtcttcttcctcccttttgcaatggcagggctggttccgccattttcttctttcttcatggatgttcaggagttttacgatctccaggtggcgcacctcacccccaacgcagtaatgacattggccatcttcgcgcacctgtgcgagatgttcatcggggtgcgcccatcccttcggctgttccgatggttcttcaccgtacagtcggtgtcgccgccgtcggtggttggtggctgttacttccagccgcggnggccggtgctgaaccgctacattccctgcgtcctccgcaagaagtgggatgactggaagagcgactggttctacacccccctcgccgacgaagcgcgcctncgacttncgagccagcccccggcgcaggcctncagctgggcggcgccgtagatctgggagatggctatgacgccgtnctcgaccgctggcgggcctgcgatcccaggggctcacaggggccatggtgtacggcgactaccttcgtcgccggattgcgccgctccagcggcgcgcccggggcgcctgggagtacaccgggtccgaagactatatgaggacccatcagggagtcagatgggactgggctcctgaggatttcaagatagtggtccaacgggtgctgaatctcagctccgtggaggcatccctcattccccaaggagtcctccccctctgcagcgatccagatcgcgcctccatcctgaccatcatgcaggcggtcggggcgtcgaagaagcgggctcctcgaagccacgatggcgcgggcggaagccgcaggggggaacaatctaccccgggagggggtcgtgcttctgggccccgcgacgggggcccggggagcagccgccctgccgacgcccgggggaagagaaagcaggaaggaacccctcccccatctcctccc

SEQ ID NO: 26418 - DNA, 732 bp, Oryza sativa
cacttagtgatttcaaaatgatttcaaacaaaagatttgcaaaacaaccttgcctctcttccaagcttgcattaaacacctaaattcccgtgacttgctgagtacgaaagtactcacccttgctctatataaatatatatatatagttcctccgccctgaagagaagataaagtgaagtgaagattagggtttcgtcctggttcccagccgtcgcctgtggtgttgggtgttagaccgttggttccgctgctgctgctgctgctgttggtgtttcctcatccgcgtcgtcggttgtattctcgggctgtctgagctgcaacctaagttaaggtaaataagtcctctatttattttaaggattgctatgattcatatttgtcaccgtgggtaccagcactatgtcctgggactggtaccgagatcgcggtttcgtaggaagcggttcgcgccattttccctacgacacgctcctgtcaggtgccgttgtacggcggtatcagattggggtgtgacagtacctgattaagaatgataaaattaccctttaacataagtaaatcgcaagaagaaatctgagaagaaaaccaaaataattaaaagtagtatatgtgtattacacagaccatatacagaggaacatatcacggataaaaaaaaacatttcgttaatctggatatcaacactgcacggacctaaaattaagttgctactcctctttttcacgaatgta

SEQ ID NO: 26419 - DNA, 717 bp, Oryza sativa
tcgaccgcatcattgagagctgtcggccaatagaaaccctgacgaaaggctttgccaaccaaggtgcgcgaggcggagtgggctccgcattcgccttcatggatatcggcaagaagctcgacgccttgttcccgaggaatgcacttcaggaggattccgttagccgcgcgccgatagagggtccccttctaccagcacgtagcatttggagatgcgctggacgcgttcactcccttcgcggtcctcgggtagagtcttatctgtgaggtatacttggatctcagcgatccaagcaatcaatctaagggagctgggagcgctcccctcgggtcccgaggcctggactccgacgggcctcgggggccggtcaggcgcgtccgtctcccctaaggggtcgggtcgcgccgacggctgggcaagcctttcttcaaagggccacgccccggggcacggctcggttctgggccccttttggcgattttagccgacccgagcccccgagggcaggattgagcacgagtgacctatttcaagtcaagattcttcaaaaagaaataacagcacagacacagcctttaggaaattgaaaatgcttttattaaaatacagatataagagaaataagaatatgcatgtgtggtagcccccggccaaccctgcacgcccgaggggggtgcggggttggcccgagcccgaaacctgacacccgatccccct

SEQ ID NO: 26420 - DNA, 543 bp, Oryza sativa
tctgctttccggcttgtgcaggttcgggcttggttgccatgaagccttccagatgtgtcgccgcgggatcctgtgccgatcctccaatgatggcccctcttgtggagccagctggagcagccgccggtgctgcttggctggaggccaccagcgccgacgtcccgacctgagacgtaccgagcccgccaccgttggccggtgcagccacctgggccttctggcttttgctgacctgctggaagagcacagccccagcctccctggtctggttgccagccgcagccggctgggtaggctgctggccagccagaggtgcctggaagggcgcctgggcgggctgttggtcagccagccccgctgtctggaagccagccggctggaactgaccagcagcggcctgctgctgcagttggccgaccaccgcctggccaccggcttggtgtccaggaacgccacctccggcgtggaactgaccggccgcgtggccagcagccggcgcgaagcggcgcccaccctgccaaccgcggcggttccggttgcctc

SEQ ID NO: 26421 - DNA, 537 bp, Oryza sativa
gcacgagcaccaacgaagatgatgaaggctcgtgtgcagatcatccatgctcttgttctcactccaactgctgcgctcggtggtctttcatgggtgccttgtcactagtccttccttgcttgctttgctaccttccagctactggctgtgtcaaactctcccagaaatgctatgaccaagccagcaggcccgggtgccggtgcaaaaacacaaacagtgtcatgtgcaaagcgccagatgccgtcaacagaccagagaagccattctgattggccgaccataaggttgcgaactgtgttacaaggatgcatccaacactctgcaggaaattcatgcaaaaaataaaataaatgactgtaggcggataccatcacctaaggctttaatatagcattccttacttaattagggggatccagcaagacctggtgtcacactgaaggaaagaagtaaatgccttatgtgtgtagtagctgtgaactgtttctaacttctgtattttaagtgtcagagaagagtcatgttttagcacagtgg

SEQ ID NO: 26422 - DNA, 3649 bp, Oryza sativa
atccccttgagctataaaaggaggaccctgcccactgagacagggggataacgcccagaaaacctgaactccagaagagaggaagtgagcgcgctttctagagtgaagaaacctttgtaaaactcatccataatcccaaacacaggagtagggtgttacgctccatagcggcccgaacctgtataatccaactgcgtgcaagcttgccggtaatcttagggacgagcaagtgatttccgagagacgagcctccgcccccggccgaactcacaaatggggggtctcacgattccccgctattgaggatcttccctcgacaatatcaccatataaaattcatgtaacaccacaataattatatatggaagtaattttgttgattccatgattattaatctataagcaaaaagggaaaataaaatgaaagaaaaagtgtggaactttgcttgaaccaaacatggcattgccaccaccaacctattattgtcaaatgcgttcgccgcggcggtcaactccacacccccgcactttcctcactccacactccccgcaccatgcaaaccaaccatgcaatcccccactccccctccccctctttaaagcaagctcccaccaccccatgcaccccacagcccattgacccccacctctcgccatgccatcgtcatcgtcatcctcggtcgccgctgccccttctggcagcaatggcacccgccgcgacggtgggagcgggagcgtcacgggctgcctcccggctgaccaggcatgcttcgcgctttcgtcgtcggccagctcgccaggctacctgcacgcctcggccacaacgacgcgtcgcgatgcttctgccaccgtggcgcgcgcgtgctgcaccaccgcgtcgtacgtcgtcgtcctcgggatcagcttcggctccctcctcgccatcctgctcatcctctgcatcatccggtggtacctcgtgtggaggtcggcgcgaccacggcgggacgacggcgccgcggatgaggcggttgggtcagccaagaagcggtcggctgggctggatgacgacgccatcgcggcgctgccggtgttcgcgtacaagcaaagggaggagggcggcggcggcgcggtgggggcagcagaggaggagaaagaggaacgggagtgcgcggtgtgcctccccgtgatggccgacgggaaggcggcgcggcggctgcccagatgcatgcatgtcttccaccggggctgcgtcgatgtgtggctcagggagcactcgacgtgccccgtctgccgcgccaaggtggttgttaggccggccggtgcggcgcgcgttgagaagttgccgaagagcagcgcgtcgcgggcattgacatcgccggtgccggcaccggcgccgaggccgacggggacagtggtggacgacggcagggagagggacctcgaggcgcagcagtagattattctgtagtagtatatgacatgagtgtagatttattagaaattaattattgttgtgtttttttcatgaattgcttactctctcttttttattattgtttttcttcaattatttatgggggtaagttgtagctttagggatgtgagaaatatgagtctagatcaagacgcttacgcaactatttatagggttgtactatgtgacaataaatagaacgcagataatgtctgacaatatcgcggtatcttaatggtgagatctctgaactttcaatcgcttaaagatttgtgttgtggtgggacatcatatttcatagtcagctgcatgtcttcaatggtggcaacacgcttggtctttcctctagataattttttcgtcttctctccgtgattgtgaatcttatatatagtgctttcctgactatctttcctcggtggtttctctcataagtatgtgattgtgttatgcgctttgtgtccatggcgttgttgcatgagtggaaaaatgacattctttggatggcgcccgtccagctctctctttctttttgcttcacgggtggtccatccgacagtggtggagggcttgtcagggttgtgtgcatgtcaatgaatggcggtgcaaaagtagatctagtttaggattggggcatggcctagctgatgttttttcagcggttttatggattccatcattggagcggtcgagctattgcggtctttaaaactactgtgcaattagcgctatctagattttgcttggttttcttgtttgtcctcacttccactaatgattggatgaatggggatatgaaccaacataaagtgatcatagttacgactgaatgcggtggaggggaaagctttatcaaatttaattataatttttatggttttttctatactgattcttgtttttcataatataaatcagatataaggtgtccctaggacgtcgttgttaaaaatgaaaacatgttaggtctttgccaggctataaccaaaagcagtgagagtgggcattctaccttaactattatctcttcatttaagaaacaccctgccttatttataagaaaataataagctattgaaaaaaaatcttgatatagtaaaactaagctttatgcaacattttgatcccataagcatggtattatattgcttcaaattctatctcgtacctataaaaccgggtaccattggtctctatatacatcaagtatgcatttgtactgctacacgtactaattattttttacaaaattcttacaaacaatgatctcaactgtttgatttaagtagatggaagttataagaaacctaaatgtacttataatgtgacacatagtaagaatttagtaatataaatacttgtcgttttgtacaagcctattatcaaacttttaaagatttgattataaataacatctacaatatttatcttagaaatatgatgaccatatatatatatatagattggtcttaaaaagtatttgataaattaatatccaccgttgatttctaaaggataatttagaaatctatacctaattaaaaatacataaggattccggtggattttcgtccatcttcacctaatattttcgtccgcaacgtccgatatgcgagtccaagacaaaaaaaaatcatccagagtccgcatcaacaaccaaatgcccgagcgatccagcgaaaattcatcacaagcataaatacaaaatccaataggacaatccagcgaaagagaaaaaaattaataaaaacatcaccggaagcctctgacgccgtcattgccaccggatctacatgcgggtagccactggatccaccgcaggaagccgccgctgtcgtcgccgtcggatccgctgccatatcggcccacgagccggatctgcacgcaggtagccgctggcgccgtcggtgctgctggatccaccccgggaagcagccgccgctgttgttgccgtcagatccaccgcaggaagccgccgtcggtggcggatcagcccgcgagctgggtctgcacgcgggtagccgttggcaccgtcggtgccgccgaatctgccgtgggaagccgtcgctgtcggatccaccgtgggaagagatcgggccgcgggaagccgtcgcgctccacccctatctctccttatccactcgcgaatggagtcgtgccctcgtcgtcttcgtgctttgccagtgagacagg

SEQ ID NO: 26423 - DNA, 2840 bp, Oryza sativa
caatactcaaatagtaatatgctcatgtcgcacggccgcagggcagtacaggtggcgactaggcgagcactgtccccacccctttcccctcctcccctctaccccgccactgagcggccaccggaggggctcttttcctcctctcatggtcatgtcggcctaaggctctgccactattgaagaaataatctttgctgggtcgactaattttcacaatagtctcggttctaataagaaccgggaataaagattgtttttagtctcggataaaaaatttgtcagaggcttgtcaggggccgagaatctttagtcctggttaataactaccaaccgggactaaagatcaccacttttttcctggttgatagtaccaacccgaagtaaagattatttagatctttaatcccgattggtaacaccaactgggagtaaatatttctctcccatatctgatcggttaagtatcagacaagactttcctcctcaccgagatatttagataagatcggatcattcccctctcctcctacccctcaggtccccttactcctcctcctcctcctccccttcctccccttcatcctcctcccctcccctctcctccccctcctcccctcccatccggcagccgacggggtcgcgcgcggtggcaggcagtggggcaacacccggcggggccgtgcacggggccgcaggcggcaggcgctggccgtggcaagcggtggccgtggcgggtggcaacgcgccagcctttctttttttttgataatttatgattcaccgagatgtataatctctttgtttagaatttgtgatttattgcatggatctgagatgtataatctgtgatgtatttgatttttgtgtaattttttaggatttgtgatgtatttgatttgtgtgtaaaagtaacttaggatttgtgatgtgaattatttaggatgttacaatgatttgaggatttggggtttgatttggggatatacatgacactcgatttgggagaaaatacagggattaactctggcaagtagcaaagaaacaatcaaaaaaaaaagaaaagtggaccaaccggaactgccgctaccctctcgttattcccggttggtaacatcaactgggactaaagatacaactttactcccgattatttcacccggaactaaagatgggcatctttagtcccagattcgtagccccggttggaaaaccgggactacaggggttcccaaccgggattacaaacggtttctccagtggtggctaagaccgaaggaagacctttaagtttcagtcatcggtggctagatttggcatcattggggctagacctagtcccctcactgccagatcgttctggtgccccagccgacaagtttaagcggcggtgaggaggagagtagaaaccagggctgcactgcgataaggggtggcgtggcaacatgaaagacaacatgatggcggtggcgcagcgtgcgagggcgtggcctgggctgcgacgcctatgggtggccagcgcaacaagcaagcaaggagtaggctaatggtgtgcgaggtggaggccggcggtgcgtgatgctagtggcacgcacaccgacggcgcgcgaggccatgactaggaggctacagagtgaggcggtcgctgatgccacgaggagctggacggtggggctagcagggcacaaccgaaggtgccgaaggtggttgaccgacgcaagatagctgacgcagcaagactgcgtgctatcggagaccgcttgggtggctttgtgttaggttgttgatgatatgttgaatagagtgaactgtaggcgaacgccttgcttggagttctctaggctggcagtgtcggcatctagcagcgtttcacccctttggggcgctgtcaagctgacaccctcttcctccttggaagattctccggaagaaaacctagtcctttgacggatgacggtggtgtcttgagcatcatacctcctggacggatgacggtggcgtcttgagcatcatgctccttgaaggcatcgtctttgagatctcatcttcccgccgtcacaggcttctctcaatttggtttttggcgttttgtcagttgtcgtcaccaggttggcgtgagggacaagtgggtgttcttctctcttgtcctctccctccccaagctttctccgtgaggatgaccgggagcccgttgacgatcttctgttttggagctagtgttcgccagggcgtttgcaagactagcggcattcagtcacggatagtggcggctggcttggtgctagttcttttgtctaggggtatgtttggaattgctaacatgtggtggtggtggtatgtttttcccctgattacaacctcttagggaggttgtggctgcggtggcggctggcgcgaatccacgaccacaactgtggactgcggtggcactctaaggtggtcctttggtggctggggagacgatgctcgtgggtggaactttggcagcctcctccgcggatgccatcctctctttcccggtggcggcaagcaacagattggtgagggagagaggagagttccacgagagagagatgaatgataagctttttatttcatatggccaggccttaatcataaggatagctcatccaaaagactcctataaggaccactagcttgtacaatgtataaagactacttgggaggtttaagaccctctgtatttccatattgtggacgccataagagacaaaaaattccatattgtggacgccataagagacaaaaaaaaactagcggtgcatccttgatctcactataaacacacctgtgtgcataatattcgtgggcaccaataaaat

SEQ ID NO: 26424 - DNA, 1875 bp, Oryza sativa
acattgcctgtgtgggatggaagtgaaacaatggtcgatacaaagaggatcggtagttagtcgatctagtgtaaatcatactgaattgcaggaagtggcagtatgctgtgctgccagagcagcagctatatagtgcatgttgcaggtcaaattctgttatagtattgagttgatatgagatatttgtaatattttagcttttgagccccagtcttaatatgctgaatggtttatgtgtactgcatctgcatgcctcagattgttcagagaaacagaaagtgtgaagcattagcgaatgagtcaatcacagaagtcatgtgattttttttaccttgttcttagcatgtgttagatagtgctaataaaagtagaaaccaatatgatgatcgatggattttgattcattcagagacaataattcaataaagagataatgaaaatatgcttgctagttcatttgatctctgtttgccattttatcgcttgtttgtgtattgctgatatgccaatgccatatcacatttctagtcccaaggcgttatataactgacttgtgagaatataagtttacgtgcatggccaactgcgaatgtcttggttttcaactaataacaaccaaaagttcttgcatactttggtgcttcatctggttattgctgttttcttgacaaataatactctaaataactactcaaacacatgtgtccatccaagttcatctaaattaccttttttagtcacctgagcttggtacaacttgtcatctcttccccaagaacaggtgctctttcactctagtaaagtcaggccacttacctgtttcttacactaaattattatggttgctatctgatataagctgtgtgagtttttggaaccctgcctttgtgcatcaaatttccctttgtaatatcaagtaatctataactgtagtcccatgctcagaccccaccgttttctgtccttagaggagagatttccaattaacatctcactcttatattaaaatactgataaaactatttgctctatatggctttaattgagtaattattgatttccaagataacacattctttgacacattcaatagaaatgcaaactatccagaactcatagtacagtcattttgtagaacggactccatgtaactcctgtaatcggcattctttcggataaagctttattcaagcctgtcttgaatgaatctgaagtggcagacatctttgatgcacctctagagatgttcctgaaggtattactgttatttatcgatgttactcttctccttttatattcatcatcaacttcttgttgtcgacaagggcattgttgcatctagctctcatttctaccatacctttaggatgatacccggaaaacacaagaatcgaattggatgggcatgaatattccagtccagtcttttgagtaccagtcagaggacaaaacgtttgtgatttggggcttaacggcacacattctgactcgtgctgcagcagtcgttttaccgagagaaccatcatttgttgaatttcgaccaagatatgtgaactcaccctctggagatacgaatgaaacaaaacgctgatgcaataccataatcatcaatatgtaattctagcatttatcccctccattcagaggcagctgcttgtgcctgtctatagaaaatcagcttactgtactttttgtatgtacacgatagtccatagaatgttgcatcatcagcatgttggaaaatttgtcaatttgatcatcggactcagatagtgaacactcttttgttgcactttccacagaatgttgtaaacttgtaatacttgaaacttgctcgatatttgaatgcactctctgaacaggaaacaaaagtag

SEQ ID NO: 26425 - DNA, 4306 bp, Oryza sativa
cacctaatcctccacaccatcagcatcattgtagaactcttcctctgatgaatgattgcaaggcgagtatatgacatactcagcaagccacacagcaaatatgcaagtgcacaggataacaaaggatggcataatagggttccatttgcacaaacagcctttaataaacatttcagaatttaataaaacagttaagtaataattaatcaatattaatccaacgctatacaacataccctgttgcataggcccaaccattctgaacaaccatcccggctgcacagttctatctccaaaccaggaatatatcattccaaaccaggagctaatcaaattattaccaattaaagcaccttttattatgatgagaagtgtgagactaatcacgaaagacattgttagacccgcccataaccgcgggcacggctattcgaatagttttactctgatcagaggtgtaccactgtacccacaagacacagccccacatcatgtcaccatgtgcctcaataccaccatggtacctcggaaaggagctgtgacattacctctcgcacaacacaatccactacagcgcacctttcctggatcataatcacccccttataaacaaggcatggactccccagcgacccctgtgggcttatctccgccacttctcagtctggtgctccgcaatgaaccatgctatacaaaagataaagccgttgcccacgctggcttgtggttggcacggttaatgtttcacaactgaaactcgtgaaccggtccttaattgtcatgagcacgactctcaaaaccatgtgctcacaacccaccattatcaggttttagttggcatgtaattaattaaccaatcacgattgaccatcgtgaactatcattaagccatcattaaataatagtgagtcaaaagttatcccaatagtgtgctaatgtttctaagcatggctaagcagtcatatctaatatctagctaaaccaatatatatagcccaactagtcaagttataataacccaaggtatcaaggaataaagtaatcaagaacaaaagggctataacaaacaataggttaattccacccaatgacattcgaaaatagatgcaatagttgaatagaaacaatagctttaaataggatcaacatgctcaaagggttgtttgggatctgtgtgacttgccttgctggccttggaactcttcaaattcttctcctgcaaaaacggactctccggaaacgtcggaatctaaacagaaaagagcaaaaacaccaaaacagcacataaacaagcatgaacagtacatgtggatatttttaacatgtagatctcaattttagaaaaaattagagacttgaaccaactaaatccgagttaagatgaattagttatgaatttttgaagatttaatcggattaaaacacttatattgattttaattgaattatgacgcaataatgaattgtttttgaaaaggaaaaagggatttattgcgtcagcggctagggtttgcggtggaccgggtgcactgcggcggttcactggaacggacggccgagatcgatccatccaaaatggacggccgagatcgaacggtccacgaccggctcacggcaaacggccacgatgacgtcagcggtgacgtcaccaccggcggcggctcgggcggcgcaagctcgccggcgaacgacggcgcgacgacgagaacagagggcaccaggacgtagagcgcgacgcggcgaactcaccggtgaccaaaggagcggcggaagaccaacggacgacgacggcggcgaggaggaaacggcggagaagatcgggtcgatggcggcgacggtgcttcggcggtcttcggcgacggcgaaagggcggacgaggacggcaacgcgacggcgaccacgacggcggtctttccgagcgatggcgacagctggaacagcggcggcgcacggctggagcgacggcggcgacggcggctcgagggcacacggcgctagggcactacggacgacgagaggcgaaggcgaaggtggcgacgggtagagaagagctccggggtccttttaaaggggctaagaggcgacggtgaaggcccacggcggccggcgacgagaaggaaacttcggggttagaaggaaagaggccgatccgaatcgaactcgattccacgaacttccaaaacgaattagccgatgtttccaaaggagaaaaggtagaggagatcccaaagattgtttcccctcaatcaatttcaccggaaacggaaaggaacggccggatttggaagggaacggcgtcggcgcgaaactagggtttcgggcggcggcggccggaggttgacgacgaccctgacaggtgggccccacctgtcagcgggcgaacgcgcgcgcgcacggcgacagactgggccggctaggccgaagagagagagaagggttttgggccgactttcggcccaaagccaaaagagactttttaaaacctttttcaatttaaattatttcttaaatgcaattccatttattaaaaatacttccttagctcaaataaatcccagaaaaatctaggaattataaaattaagcaaagtatttaatgaaattttatctggccccattttatattggaatttattaattaacattagatcttctcttcaaggcttttaaaaatcatttctaaaaattccaattaaacaacaatttatatattttgaatttttagggtgtgacatctttgatcgtaacatgtgggttttctaaaattagaattatcatccactctagaagataagcttgaaatcccatgcccctgtttggcaacgcttcctggtcaccgatactcttataaaaaccgatgcaactggagggaggctagtgtgtgtgtgagtgcgagctaagcaagcacgcatgcagctcatggatcatttaactctctaccttatcctctcctactccaaccatccacacccttgcgcagccctttgccctttctaacctaactcgatgacacttgttttcctcgccggtaacaccatccactcttgactgcgataggaagcaccactactatcgcccgtctcactttcaccatcaccactactaagtgccacctactattggtgggcctattatctggcaatcgctctaagcctagacctctttgggacatccctctccctcccaccatccctacccctaccttgaaaccttaatccacgagggcttagacaataatgacggtatcggagcgctactgcgtgccccgacaaaccgatttgttcgaacccatgcgcgggtaacgaacgctcgcgaattagcattcctacactgtgtaggaccctgttcagtaacctgcctcatctgccgctgatttctccatgtccatcaacgaagaaagcgatgggaaacgcctcccactcgcacgcgctggcacggcaccatgtgattgactacatatgtaggtcaataattaggccacaaccacaacaaccgccacaaaatacaatgcaaaacctggcattcataattcatacaaaaattattaaaacaagatcgatcgatcgatcgatcaagagttgcatcccaaaataaataatccaccgcaaaagctacaggcgccagcctccaggtagcttcgctatagcccatcaaacaagcaagaaagggggagagaagggaaggagaggtcgtcgtcgccgtcgacgacgattcaccggccatgtgctgctgctgcggcggcggcggcgacggcgacggcgacggctgcaagtgccggccgctggggtggctgctgggtctgcctttcgcgctgctcgccgtcctcgtctccatcgtcggcgccatcatctggatcatcgggtatgtactttgtactcctcactcttgtgagaaatcaagttgcaagaagccaagaactcgattcatcttcttgtgagaaatcacaattcacagcgattgattgatggatttcgtgtgtgtaggctgccgatctcgtgcatctgcccgtgctgcctgtgcgtgacgctggtgctggaggcggcggtggagctcatcaaggcgccgctccatgtcatgacctggttcacctccaagataccatgctagctatagcttcttgatttgttctaccatttgatcagatataaacagaatgatcagtaactgatcagtaagtataccgattatttattatttatttatgcatatgtactctggcttggagatatgattaatttgtcattccaatcgagattcattcggtgaaaaaatatactctgtggtgctggttcatctttgatcccctt

SEQ ID NO: 26426 - DNA, 1046 bp, Oryza sativa
cctctttagattctaactttttttctttaaacttttaactttttcgtcatatcaaactttcctacacacataaacttttctacacacgtaaatttttaatttttccatcacatcgttccaattttttaaaacttttaattttaacgtgaaactaaacacagccatagtgcaatgaatcatgctcattaattcggtgggcaagatatcactacagtgcagtgtatcctacgcagacaggtaactgtcacgagtagaacccagagcccagagcccgtcgccccgtcccactcactaaatcatgcacatacctatttaaaaattgaactctttaaatatctaactaataaataatttattataaactaaattttaattgataaaaataatatcatcggttgttatttacattcagttttactcctatatgattattttgtttgtcaaaaatattatactatgtgagaaatttaaactcgaatattaattttaaaataatactaagtttataacaagttacagtacgttttactgaatacctcttatgttccaaaatagacaaatctcgtccgaagaaggagcgaggatacacatcatcaacgtatcatcatcgtcatcctcatacacccccatgcctatatatgccgacgccaccccgttcgtctacctccccacctcacctcctccattcttcacttccttcgattcctctgcttttaatcggcgctctcctctgctttctacctagctagctactagcattctagttgtcgctcactcatggtggttttggcgaagggggagttggagcagatcgccctgccggcggcggtgcagaaggcggcgccgccgctggccgacgtgccggaggtggacctgggctgcggcgcctgcagggcggacgcggcgcgcgcggtggtggcggcgtgcgagggacacgggttcttcaaggcgacgggccacggcgtgccggcggggctcctggcgcgcgtggaggccgcggcggcggcgttcttctcgatggcgcagccggagaaggaggcggcggc

SEQ ID NO: 26427 - DNA, 4761 bp, Oryza sativa
gtctgtcatttgtaccggtcactgccagtgggccccgttgaagcagtggctttttaaaatatttctggaattaaaatcgaccggaaatggtgtgcttatgttgtttttttttggtagcaaattgtgtgcttttcttttcgtttacctgtatatttttttaaaaaaaaccttaaaaaattctgtgaaagaaacgtgtgcaaaaccataggagcggcaggttgatcagcacacggttttataaagtttccaatagctgagtaggaaaaagcgatcaacttttagctaaataattttattttatttttcattatagagaattcttcaatgttaatttctgaagattaattcaagtaatgaaactaccaacctattttttcattcgacaatctttattcatggttgtatatgtggtggtggtcggactctaatttggtaatgacattttagtcatgcaagttttacaatcttatcttatctcatatagtgaaagcaacaaacctttttttacgaggatgtgccacattatcaaaaatatattagtcatcggataaatagttcggataataatagtcattagatcaaaagagtgtatgtattaaaaaaatatattgtcctagccaagtatggatactttgtgaacaaattaacttatatcaaaaccttattaagagctaaagtaaactaataggccatatataaaagttcttaaacagtataaaaagttgtgcagagtgcgactaacggaaaaaaactaagatcaattttgtttagccatgtgatgcatatgcgtaagtaatattcgtggttagatcagatgaggccataaccatgggttacagtgggcagaaaagatgagatacaaatagcacgtgatgaattttgaagcaagagtagagaatctatgaaatttcgctaaactcaccccaccacatggacccttctaccatttttcccatctctctacagatatactagattctgccctagattattgccatctttctctttctttctttctttctttctttctttctttctttctttctttcttttcttctttttttttttgaggttagtttgcctatctgtttctcactattgatgaaactgagcccatgtatgagtagatttcagcttttgaaagcactgatataatgcattttgattctctcatgcaagcatgcatgcccctcatcacatgaccacacatcagcaggttccctctgcttcctgcagcaaccctacgtgtcacctggcatcacttttgcacaatgcttgcttagtcactgttttctgaaaagagcaagttctgatactgaggagacacttactatcaataattattgaaagagaagaaaaatagtgagaaaacctgggttgcttagtcactgttctcaccccattcctcaatttctcttttagatctatttgagaagcttaaagattttaacaagcacttataagtagatagctagcgaaaatttagaaaagcttgttttcttagcttatactatatactcttggaatataaatgagaatctagaccgtttaggggagcgacaatttgagcctcctttttattggaaaaagaacttataaaaacatttttaacataaaagtttgagctggccgaccagtttgcttactcatgttttcagagctcaaaattgtgtcatgtgtggtttgtgcccataaaagagtaattttttagttggtgcacgtgtggttaccgctgtggtaatatggcctacttcaagctggcctcaattaatgccttcccttttcctttgtgatgtcttcgtcgcatcaagtccctttccagaaactctcctgctcagcatgccagcatggcaaataaaattggacccacagtgacatctcatgccactggtttgatttcatcacccccccaattattgtgagcccaaaaaagtgatgcataaagtaatatatcgattttcatagtattatgattttgaaaccatattactattatttttcataaatgttatatttgagtactcccaacgtcaagaaagagtataattttaggagtatataacgttgttcggtaaattgagacaataatatctatatataccatgaagcaactttgatgtttaaatgttaaaaatcattttttttgcccattgtgtgcattgcagcgatatcttaaatgagtacgttgtggcggtgagagcgatgatgtgggaggtgctaaagttaatggcggaagggctaggcctgaaggagaaagatgcgttggttaggctggtctcacacgaggagagtgactccgtgctgagggtgaaccactacccaccacaccctgagttgaagcagcaaggccatggtaggttaaccgggtttggagagcacaccgaccctcagatcatctcggtgctccgatccaacgacacctctggccttgagatctctttgcgtgatggtagctgggcttctgtgcctccggatcgaaagtcgttcttcgttaatgttggagatgtcttacaggtagttactgctccctctgttttaaatacatgatttttagacattaattttgagcattcgtcttatctaaaatttttgtataatatgtttgaaaatataagttatgcttaaagtatatttaatcatggatcaagttaaaaataaatattatataacctttttaataagaggaatggttaaatgtcacgtcgaaaaattaatagcttcatatatattgcggaaattaaattaacacgctgaacttaacaaggcctagcacctattaattagttttttttcactgaaaataagttcactcgtatatcaaacttttccttttccttttcttttttctgaaaatggtttaggctaattagctgtaaggctcaggagacggcgatgttgaatctgacgtgtgatcataaaaacgaaagaagaaaaatcgtgtggatgtcaaagtccatcccaatcagccaaccttttggggaaccaagctgccagtcggtgtgttgtcaaacaggcaaaaccatcagtcattattcagaatcatttcataataaaagtccaatgtaaagcacacggctatatatacagtgatctgaaaacacggtagtacaatgatcaattgatcatggcaaccgtgcaatgcggtcccttagattagattcaatggttaggtccacgctttgccgacttcctctgtagccaggtggtagaattaaattagaggaactgcaaggttttcttcatgccgtgtcgctccgctccagggcaacacgggaggcgacccgaagccgccccgccgccggccttctctccctcgcctcccccacctcgccgccgcctgagcagccgccggcaaagccggacggcggcaaggacggcggcggcggggccttctaccccctccaacaccctgcggttggggccccgacgggaaacaggcggaggggcggcgacgcgtcgaggcggctccggcgacgccgacggccagaggcagcagagccagcgtcgctgttagcggatctggccccctcgcagccagatcgggacgaagtggcgccggccgcgctgcatcaggacgaggcgctggctggggcagtcgtggcgccggcggagaaggccgctggatggggcagtcgcggcgcgggcggaggcgacgtcgctgccggcggggacgaggcagcgagcctgggcgccgctggatctggctctcccaggccggatccaacgcccgcagctgggccacgaaggaggccggctccggggcggcggcggcggcgatgacgacgagacggcggaggcggcgctgacggcgggagaggcatgggcctggctacgcacagcgcctccggctatggctccccctatttcgacaccggctcccccagtccggatttggcctctctggcgagggaggccggatcccctccggtggctcctcagctgtggacgacgcgacaagggcagcggtcagagggcagcaggaggcgtgggtgtccgcggcaggagggcgagtgctgcggctggtctggcgatctgccagagctgtgggtgatggcctaggactgattgctaaagggacgatgcagccgaccggcgacgatcattcttgcgcgaattgggtgtgtgggtttggacgggaaatcgctggcgaaagcctcgccgtgccattggccggctgacgacggcggcgcctttggcgtcgttcccctccttggaggcgtcgttctggcgttgatccctctcctttccctaccgttctccgagtgaaaacctggctccggcttccggacgagcggtgacggagatccacgtcgtgtcctccttggaggcaccgctttggagaaacattttcgtgcaaggatgtagttaatggtctatgcattggcttcgaagcttttcagtacttggttttgatgaggccttcgctgtctagtcccactttttgttttgcggcgggcaatcttcgctccttgcttgtgtttgctaggtgaagtcggagctgcttcgtagggtgacgaagctgggcaacgatgacacgttgcattctctttctaggggttttgtttgttggccgtgaataggatgtggcgtttagacggctttggctgaagttcttcgtgggaagttgaagccacttgaccattgacagcgagttaggtatggatgatgcaaccgatttgaagtcggagctgctgtgtcgctaggcggcaagctcggcaacaatgacacggttgcaaggtcggaacccctttgccgtcttgg

SEQ ID NO: 26428 - DNA, 1307 bp, Oryza sativa
agaagcaatgaaaggggtcaagcatcttcttgttcgaaaaactattccaaatgggctggtcttcgttggggagctcccctatggacgaaatagtggttttagccctaaaatggatcacctggtatgcaactacttggaactctctctatttcttttataactaaaaataataattcgataatccttcaaatcttttctttttcccgggcattttttgaccccttttgtgatgtgcaccactttgtcttcattctgtaggtgtgttttcttcctggtacccttgctctgggtgcaacgaagggtataaccaagaaaaaagctcttgaaaatcatttattgactgcggaagacatagacaatctgcagcttgctgaagatttggccaaaacttgtgttgaaatgtactttgtgacatctactggacttgctcctgaaattgcttattttcacattgaggtaagtggttcagcattttatggagtattacaatgtactcctgaattaaatctccattacttgttatttttcatatatattgatgtccattttgattttgaagaaaatattggcatgtgcattttacagggtaattctgagggaggacctgatggtgggaacaaaagttctcaatatgttaatgatatcataatcaaacctctggatcgtcacaatcttttacgcccagagactgtagaatcactatttgttttatatagaatcacagaggatccgaagtaagatataacactactttattatctttaggtcacctgccactcaattttgaataatgttatgggttagggttcatagggggtaaacaccgccgggaggatagccaggcaataatgccaccactgactatccttttattatctccttttcttttacacaggtatagggaatggggttggcagatttttcaggcttttgagaagtatacaagagttgattctggtggctatacttcattggatgatgtcacaagcttgcccccacctaggagagacaaaatggaaactttcttccttggagaaacactgaaatacttgtatttgctgtttggtgaaagcaatattcttccattagataagtatgtattcaacacagaggcccatccacttccaatcattcagtctgcacaacagatctctcattcggtatagtttccaagtgttttagtgggtgtagttcctctactatcatgtgaaaagtgtactaccatgagaaaattttaccaaacagataaagtgagaaaatagttacgcagacaaaattattggacaatgagagaaacatactagcct

SEQ ID NO: 26429 - DNA, 2535 bp, Oryza sativa
aggtgactatgattggcaaatttcctcatgacattagagactaatattgcacgatgataatagtaataaatatcatgctatgatgatatcaaatgaagaaaatattagttgatcggttgatgcgctgtctttgttgttttgtggaataaatttcctgcagattgtcatgcaatcagacatgctcattcttgaatattgaagctacttagtttctatttccgtttgtcgtgctccagatttatgaataaaatatgccgaatgccgtattgttactcgtgatttggaagaaattatctgattctgtttatgaagccatctttgtccaaacatctttttttctgtcgcgggaacagtgaaactagccttagagcataagcaatgggtgtcttggagccgttcccctagctcacggcgtcgccgtaccgtttgcttttcggcctgagccgtccccccgcgtaggcgcgcgtttgctcgcggggggatgcgttcctcagtcgcttttggctgagccacggcgccaggctacgcgttggacgcgcggtggctagacgtgtgtctcgtggacacagctccgcaccacaaatttcctcttccaccctcaacagcgacgacgacaaccctgcgacggagacgaccccgcgacgacggcgaccatggccgacagcggcggatctcgctccgccgcgtcctcctcgctccgcgcgccgtcgatgccgccaccgctgttgtgtttgccgtcgtcgcccttgccgtgcgttgtggaggtcgcgatgacctcgagcactccagatctggcctcgagctcgactgggcggcgtcctcgatgcggccaccgccggcgctgccaccttctcctcctcgatgcggcatgggaggagggacgccaccgtgcgccactcgggggcgcagccgtcctcagcgtcggtgtgggagacggcgacggcccggagctcctactcccccgcggtggccgcgttgacgacgaggaactcgaggttgacgccagcggaggagacgggaagaggagaggaagagacggcggcttgaggcggtggccggggatgacgaggaggaggaggagcagctctgctcgacggcatggaggctgggcgtgccgtgcgcgtcctccccggatgtagcggcatggcgaggaggaggagcagctctgctcgggcatgaacggcattgtttatctcaaggtgaaaagagagagagcgagcaagctagctctatttctctgtgtgtgtgagagagagagctactagactagtacgatgaataaattccccctgtactagtttgtgtgagctactagtggttcttttgagaagagttattggttttggtttctagggccaaaccaaagaataaatgcccccaaactaaaagctacacaaacacaatgaaaatatggagcctcttgaataaaacttcatgtcaacgagggcgtcggtggtgggctagggagggaatttgtcacctgggactacttgagaccgggatacccattgtgaactggagtatcctcaccgagtagctttggattttgaagaacccacctacctgtggcctctattgcgagatgagttttcctagaagtgccctcgcttagtgagggcactctaggagtggcttacattgctgatgcccttacatttcttacatgctttcaaatcatgaccgaccatcatgtattctgtcggtgcttctaaattatttaatttgtctccatggaaaattgtaaacttctctttgacttcgaaatgaactgcctttggaggtatttctatttccagtttttagtgccacccagggcttcccaggctaccatgcttttgcattaccacctaaggtggtccaagactcccaacacgcagcaagctggatccaggtgatgcaggatgggcgaccaacaatgtggctgggctgattatgcctacatttcgtgctgcaagatttttgttgtgctttttttccctcatactagtaatttactacttcctccatttcacaataagtcattctatcatttttcatattcatattgatgctaatgaatctagataaatatatgtctagataaatatatatgtctagattcattagcatcaatatgaatgtgaaaaatgctagaattacttacattattcaactttggctacgcgttcttcgtctcagcgggcccacaggtgggacccacaccgccgctagatgagagaggggagaggggagagggacgaggcagccgagcggcaggggaggatggcgctgaccgacgccgacgcctgccgacgcgcagccactcctcgccggatcctgccgcctaccaaggtcgcgccgatttccttgagcgcgcgaaggctgaaggaggaagggggcggcgcggaggccggacgccgcttgccgcttgggaggatgccgtgccgaccgagctcccgcgccgccgccggctctccgtgccctcgatgctcatcgtcggctgggagatgaggggccccggagagggacgggaaggggagcgccggcgtggatttg

SEQ ID NO: 26430 - DNA, 1814 bp, Oryza sativa
aatgatactgttcagcactcacctcctgttttgcagccacaagatgaacctattgcacatcgcagaacaaagaggagttgtggagctccagtccgccttattgaggaatgtgatatggtttattatgcttttatttgtgctgaacaggtggagaatactcttgagctagccacatacactgaagttgttgtttctggagaccgtgagaagtggatctcagctatgcaggaggagatgcagtctcttgagaagaatgacacatgggagcttgtgcacttgccaaaacagaagaagcctgttcattgtaaatagatcttcaagagaaaggagggtttatctcctagcgaccctccgaggtttaaggcaagtttagtagcaaaaggttttagtcaaattgctggtgttgattataatgatgtgttctctctagttgtaaagcatagttcaattcgcacattcttcagtattgttgctatgcatgatcttgagcttgagcagttagatgtgaagacagcatttttacatggagagcttgaggaggagatatacatggaccagccagaagggttcatagtgcctggtaaggaggattatgtttgcaagttgaaaagatctttgtatggtttgaaacagtctcctcgtcaatggtataaaaggtttgattcatttatgttgtcacatggcttcaagagatctgaatttgatagctgtgtgtatattaaatttgttaatgtgtcacctatatacttgctgttatatgttgatgatatgctgattgctgccaagagcaaggaacaaatcactacattgaagaaacagttgagtagtgagtttgatatgaaggatcttgatgctgctaagaaaattctaggtatggaaatcactagagacagaaattccggttggttatttcttagtcagcaaagctacattaagaaggttcttcagcgttttaacatgcatgatacaaagcctgttagtactcatattgcacctcattttaaattatcagctttacaatgtgctagtactgatgaggatgtagaatacatgtctagagttccatattctagtgttgttggttctttgatgtatgccatggtttgctcccgtctagatttatctcatgctatgagtttggttagtagatacatggctaatcctggtaaagaacactggaaagctattcagtggattttcaggtacctcagagacacagctaatgcttgcttgaagtttggcaggactaataaggggcttattggatatgtggattctgattttgctgcagatttagataagagaaggtcactcacaggttatgtgtttaccattggtagttgtgctgtgagttggaaggcaacattgcggcatgttgttgcccagtctaccactgaagcagaatacatggctattgctgaagcatgtaaagaatcagtttggttgaaaggattgtttgctgagctttgtggagtttattcttgcattaacttgttttgtgacagtcaaagtgctatatgccttactaaagatcagatgtttcatgagaggacaaagcacattgatatcaagtaccattatgttcgcgatgtagtcgcgcaaggtaagctgaaggtatgcaagataagtactcatgataatcctgttgatatgatgacaaagcatgttcctgttgctaagtttgagctttgctcaagcttagttggtatagtggtttagcccaagaggctatttggcgccgaaagtgtttttgtctttgttgtgttcagggtaaaggatggatcgtgcacctggggacgcccgggggggtgccg

SEQ ID NO: 26431 - DNA, 4325 bp, Oryza sativa
tttttctctcctgttaacggaggggtttccacgttaaatctcgtgtcttctgtgattgatctattgttctttatcgcttgttcgcttatcgtttcctaacaactagaaggagaaacaaacctggcaatccatgaatatgacatcatagggcaatggcacattatgctctcctgaaacacttactctctcaatagcatctttgaatatatccacagccttagctccatcccctgccaattcaattgttgctcctagttggttcaacacttttctctgaatagtgtgcgctccgcctggcggagtgcgcacttctgcttgacgaggttggcgtcgagcgccgcctcccacgccaccgccagccgcagcgcccgcgtcagccaccgccagcgtcccagccgccgccgctgccgccgccaccgtggagcacaccaagatgattgtggtgacgccgcctgcctctcgccggagcacgtccgccatggcgctcttgtgaaaaccggcgggaatttatggtgtcaactccaccagctagctggtccaattcacggccgtcggccgctgccggtgacggcggcgatatagaggagcgtatactgtttgaaacttagaaggtaacatggtggagtggagagagggggaatgaattacagagtgattgatgggcttagcttaacaagtaaaatgggaaggaaaaggtatactttgactcgctcaagtatcgcccgagtaagattcatatcctccaaccacaaaaccgggttcatcgactcctccaactatcaaaactggtgcaaacaatgtccctcgatggttttggaggtggttttggctgaggtggcagtcttgaccaagtctttgtcctacgtggcgcttacgtgtcaatagaatgaaaacaaaaataaaaaaatatgtgagacccatatgttattcacacaaaaaaaagtattgtgggaaagtatactttttcccaaaccctactcggtcggggaagccaccaatgaccagcccaccactcgccttggcgcaccgtcgcctccgcagcagcagccagagatggagatggaggacatcgaggatgtgctggggccatctaggctcaccggcggcggggcgcctccgggactccgtctcccactcaccgttgtcgccatgaagcccaagcatctgagatcatctagggtcacgcagacccggccgcagcccgaggcctggatcctcaggatgcaggtgaaaccgccgccatagctcgagctccgatgagggcagcgcaggagaggaggcggacgaggaggcagttggcgcggagggagtggggggtcgatgacgacagcgacgagaaggcgacccagtagaagaaggtggctcacgttcctggcgacgagctccaaggaggaggccgtggcgaggccaaagaggtttccgccaccgccaccgctgctatcgccgccgcgccgcgcaagcacgcagccgctccccgctgccgccaccgccgctccccaccgccgtcgccgcgccgcgcgagcacacggccgctccccgtcgctgccaccgccactccccaccggagcacgctccacctcaacccctttgtcgccgatttgtgagctaccctgttgtcgcccccatcactgccatgttgcctctcctcaacctccgcgcaccggccaccctgctgcatccctgccatcaccctactgccaataagaggagttatgttggagagaaaggaaggagagggtatgatacatgggccccactctatttctatgattaatagattgtcacgtcaaatatcacctagtcattttgtgtcggtttcaatagttagaggaatcattataccttgttttatgattgaattgaaggatacgaataagatccaacctaatgttttgaaggagtcaaagtgaactttctcctccattctgtttccatgactcttttagcatgggctatttcctagcccatgccagaaatggactaccagtaataatttattagttaacttagccttctccataacgttaaattttagaccgaactagttatatgcccgtaggttgtaatgggattgggtgataaaaatattgttttagtttatttctatgccggtttttttacggttgtttggttctatgcggttttcttagagaaagatgggaggcagtggctttgttaggaggaaggagggatttactatagattcaggaaattttgaaaaagaaaactaacaatagtgttatagtggctcctttcgaccaaattctttttagcatttctggctctactactacaaaagggttacaaaatttggcccgtaaagttccgactagaggggccggaattgcagttgcaaggccacgcaaacgaaagcccctcaggacctcattgagagccagcccataacaacttgtgaaactaaaatggaaaagcccttgtttgagcttcattattcacttggatcagtttgattcgatccccaactaaatacatcatcaggcttaaaatcaccctctccaaatcacaaccaaactctaattaagtaaaccccatgaacaaatattaattaacccacacacaaatacaaacacacacttcggcctaattaagcaaacagtgcacaattaattgggtcacatctcatctctctgcagatattatacatgtaggattaataaatcagtggaggatgggagggttgcagtaggggcccttgagccagccatcggcgatggagcggtaggcggcctcggtaaggtggatgccgtcccagatgaggtagttggccgggtcggcgcaggcgctggacccggacatgccgcaccgcgctttgttgttgtagttgtacgtcccctgccctcccgccccgcagcacaccttcagcccgtatttcagccctgccatattatattaacaaggtgagcaaccaatatcactctccaaataaatatattgatcggtggataccggagatgtaaacaatttttcacttatcttagaaattgatgtcatatatacgtgtttcggatgtttcactagaaatagttttacaatggcagaaatatgtagtgtcagatttttgcattatttatttggctgtgtatatctagtttagatgtagaggctcggttttaaatctatctttgataaaataatatttctatgtttcaaatagtgccgttgttttttttttttgtcgttttttcggtttgctttgtaatgtgtgctctgttcttttgcagtggtgcaagcagagcaaggctgagagggtttgaactttcaagatcatgcaaagatatgaacatgttcctttgttttgttttaatttgtggccatgagcttttggccaaagggtatctttgttttcaattggacgatgtcgcatgcaaagaagagctagctagctgtgatacatgcatgcatgctttagcactagtattacataaatcatgccagttgttattatttcataatactccctccatttcaaaatatttgacaccgttgactttttaatacgtgtttaaccattcgtcttatttaaataattatttattcttttcatatcatttgattcattgttaaatatactttcatgtacacatatagttttacatatttcacaaatttttttaataagacgaacggtcaaacacgtgctaaaaagtcaacggtgtcaaacattttaaaacggagggagtatttgatatagtatgatagatgccattccaattggattacaaggtatcaattcctaaattatactgtactagctagtatatggacagaggtcatgaatggtccacacagggaaggcacaaatcatttgccacactaacaggacaagtgagctaagaatccaacaagtaattggactatttggagatgtaaagcttgttgttatgcacgtacagtgtattaatttatacttatctctaacaacctttggatatatcctttacctagatctgacgtgtgggccatgtacccctagctaacctacactaaacatgccgtgaccactgaaaacttcaactctgtcacggcaactggattctgggacgcttttgatttttagcacataaaagggtgatgtgtgctaccggacaacgatggtgccttgcagctctgggcagtaatgttcagggctgatctgtaactactatacaaaatacaatttataggctgatctaaatattatgcttcctagttgctacgaaatacctcgtaaaattttataaaacgggtatctcctatcaaccataacaaggctggattaaattccattttgccaaaaaaaaaaaaatcaagcctaacagaaaaaa

SEQ ID NO: 26432 - DNA, 1655 bp, Oryza sativa
gtgagttgatcaggtggagagcgtgaaatgatcaggttagttggttagttacctcgaggccacggatgatcttgctgacgacctgtggcacgtagtccctgacctccgtcatggcgcggccggcgaagagcggcgcgttgtagtcgttgccgccgaactcgcccaccacgaacagcgacttggacaggtagctcctgcaatctacacacacccgtgatccgatcgatccatcaattcgtccgttaattaattaattaattaattactccacatgcacatatatactggtagttgttggtgagacgactaatcaatgaattggatcattaattacagtggtagttactgtggtaaataataagatgttgaataattagttagttaccgttgccgcagacgaaggggaggagctgacggaaccactggatctgggtgtcgagggggccattgttccaaatcttgtcgctgaggccgatggacttgaagaaggcggcgtccatggaggtggcgccgatgatcgccatgttcgcccccttcttgaagtcgccgccgcccttcgacgccggcggcagcggcagcccaaagtgctcagctgcatatatgcatgaaattcacatgtcattttctccactactagctcgatcgatcgatcgatcaggacgtcgtcctaccgaggaagtcgacgacgacgcggccgtcggagcagcggccggtggggcggccgaagaaggtcttgccgtaggggggctggccggtggtgagccacgacgggcagccgccgacgcagaggttgccggtgtcggagatggagtcgccgaagctgtagatagcattgtaccgctgcgccgccgccgcgtgcgcgaacaccaccaccaccatcgccgccgccagcagcagcagcgccgccattatcacgaacgtgtaaagctagcgtcgtcgcgaagaccgggagagggagactacgtgagatagctaggacgatggataggtagctcgtgtgggttgatgcgattttataggcttagcgctagttcgtctcgtctcggcagccgtcggttggtgggtcgctgtcgcggcgggctactgcgtttccatattcttctttgcttcactgatcaccactgcaaccacgacgtcgtcctctgcacactcacgtaagcgtgattctttatcgtcataaagctacggcagtaacatacagctttttctgttgagttttcggtgtttgtttattttctgttccttttgttttggatgtgatggatactgttattgttgttttcttttctgttccttttgttttcgatatgatgcatgggtgctgctgctttgcaaattacaatgcattcatcattgctaaaaacctatatatagactctagctatattttcactccagacttcgctcctagagtaaatttaagagttagaaccctatcccatacatgtccgtagtcacagatgttagtgatatgccctagaggcaatcatagagatgattatatcacacactatgtttacatatttatccgactttgctccttaaaatagataaactaattattggttaatgaatgtgtgattcttttataagactctttatgttatgtgttgctatttctaaaggatccctgatcaaatatcatatgtgcaaca

SEQ ID NO: 26433 - DNA, 558 bp, Oryza sativa
agctcaatagcagactattgacatacaaaatgcacgtacatactactgacgtacaaaatcatccgcactagctaccttggttattgggccaagaggctaagaatggacgggtaagcgtagacgccgttgagccagccgccggcgacgtacttgtatgcggcctcggtgagatggatgccgtcccagttgacgtaagccgacgggtcgccgcaggttgacgcgcccggtgagccgcatgccgctccagggttgtagttgtacggcccgcccccgccgcagcaagctttcagtggttgctgcgtgaaacctgcaagggcaagtcagataagttacctttttcttttttctaagataatgggatttttttttcaaaaaaaaaaaaataatacaagagcacttaagactagtattattagatatgaagtgtaatgacatattacattgttacgttgctatacatatggagtgtattgacatgggacgagagatatgtaaattttatatcgtcggacaaaaaaattttggcaagtatgtttgaaacaagttagtccctccgat

SEQ ID NO: 26434 - DNA, 1494 bp, Oryza sativa
ggttcattagtggacataattagtaccaccttgtaagtagtaaaccatgtgccctactatataacaatcccctaagcagcactgcttttagttgtcccctcctcatttgcttcttcttcttcttcctcctctttgtttcacacttgtggtttgtggttgccaactttgtgagcgaccatggagatgaggagggtggcggtgctggggttggtgtggctggcggcggcggcgacggtggccatggcggatccgctgccgtcgtactacaacgcgatattcagcttcggcgactccttctccgacacgggcaacttcgtcatcatcaactccggcaagctccccaacatgcccaagttccctccgccgtacgcccgctgctccaacggccgcctcgtcatcgacttcctcggtacgtcgccggtttaccggccatgatcatcatcatcatcatcatctcctcgatcgaatgcgagtggtttgattcggttggatttgcagctgaggcgttcgggctgccgctgctgccgccgtcggcgaacaagggcaccaacttcagccagggcgccaacttcgccgtcatgggcgccaccgccctcgacctcaaatacttcaaggacaacaatgtctggagcatacctcctttcaacacctccatgaacgtccagctccagtggttcgacgaggtcaagcaaaccatttgttcctcccctaaaggtccgtccatttcaaattttccgaatggcattggcatcggcgccggcgatctaattgaattcaagaacatgtaaataaatacagagagcagggagttcttctccaaggcgctgttcgtgttcggcgagttcggaggcaacgactacagcttcgcgtggaaggcggagtggagcctggagaaggtgaagacgatggtgcccagcgtggtggcctccatggcggggggcatcgagcgggtgctcgacgagggcgcgcgccacgtcgtcgtgccggggaacctccccgccggctgcatcccgatcacgctcaccatgtacgccaccgaggaccgcagcgagtacgacccccgcaccggctgcctcaagaagtacaacagcgtcgcgctctaccacaacgccatgctccgcatcgccctcgaccagctccagcgccgccaccccgactcccgcatcgtctatgccgactactacaccccctacatccagtttgcccgcacccctcacctctacggtaagtctatcttaacttctggctatgtatctggacatatctacgttcttttttttttcttttgccgtgcaactctgctttcctctgcaatgcgatgttcaagacagaaatggtagtttgagggttggtcagtatggggccgggggaccatgccaggcagcattgcaatacagcaagagctagcactggatgatggttgggggtactgtgtgtgcagggcggccagccactgacactaacctgacggttacatctcacaaaaccgtaccc

SEQ ID NO: 26435 - DNA, 9081 bp, Oryza sativa
gagagagagagagagagagagagagctaacgtgcattccatttgttgttggtgtatattggcataagtaaatcgattagatttttaaatttcttttttgttttattttgttttttaaaaaattgggcggttttggtgccatgtaatactgcctactacttggtcataaattaatggtggatggatgaactgtttggtgtaaagcttggcagattggagtagtttattgtcagaaaagggaaaaaaaacagaattgcttgtgatgatcatgatcatgttttataccttacgtttgagtgggagtagcatccaaactccaaaagagaagaaatcatcaccgatcagctcgaaaggcactacacgcatcacatatttggcttgtttataactgaacataggtaggacggtgagggccggagagataggaaaataataaacatggaaactcaggttacccgctttattgattacacttgacactttcctctcatgagcttagtgacaaagcacacacacatgctttggtagtttgattgcaattacctcaactaaagatcatatgcaattatgtattgcacaattttcttttttgccacaaattgacgagcaaaagcaataagcaaacccatatgtggttagaggagaggaccagagtgctgtagttgcagaaaaccaacaagctggctggcagaggccgcaaaagcacttttggcgaaaggcctaatgacttcttccactgcaagctacccagcatcattgtcgccttttggcatcgaatgcgatgaatcgtgcataagaaaaccgatcgatccccaacgggatccatcctccatgactcgtttctcttccaagcggtacatcttccctgttgtcaccaatgagggcttttgttttgcgccctgttttccaaagtttttttttctaacttccaacttttccatcacatcaaaactttcctacacacaatcttccaacttttccatcacatcgttccaatttcaaccaaacttccaattttaggtgaaataaacacagccttggtcaaaccaaaccaaaaaaaaaaaatcctactcatggccggtttcgatgtgttgattgatgatagctaaaattgaatttatggcagttgttaatgggcataaacgaataaattgaccatttgaaaattgaacaaaaatgttaacaaaagttatttccagaaaatgttgataaaataagattatgtagaaatcacatcatttgaaagattgaaaatcatgtccatgataatctatcatcttaagtactccctccgtttcaggttataagacgttttgactttggtcaaactgatttaagtttgaccacgtttatagacaaaagtaataacatttttaacccaagacaagtttattatgaaaatatattcaattattaatttatctagtaaggtagcccgcgcatacgcgcgggcatgttgtttaatcttgtgtgaacttttattacaaatgtttatgtgtgcatgatatttttgaaatattttttgactctattttaaacgtatgctcgttaatacctggtttcggcgtattacttgaaattgtatatcttcaaatttattagaaaaaaatatgtcaccataacgaagttagttcatatctatttgtattatgtgtgattcttttttaaaaatttttggagtttccaaactttatataacattttttattttatacgccatagactactttaagtagcattttaattttattatatattactgaaatatattgtctattaaaaatatagctagtgatactacttcatctaattaaagatgacttatattacttatattccctctgtcacataaatcgaaggagttgaattttatcccaaaacaatagaaaaatttatatgtaaccgggacaaagtgattttttttaaaataacaccacattaatctccaaagtaacgtatcatattttggcaaatatctataatatctatagtgtagtgcatgttagttcagtgtccagattggcttcaacacctattgtttctaatcatatgagacgccattggtaatttggagaatacatatgtacatttaaatcagcgttgtgtattcctcaagtgttctttacacctaaaatatgatgtgaaattattatcataacattaattattacatgtcggctccatatttgtgatgtattttgggctatagatatttagtagtttatttatttaaaggaatacaaccggatcacaaattggatatataattttaaaataatttaaaagataaaacgcttaaaagcattgattgggtatttcatatttacatttgcgtaaatttgaagattataatattttatccttaaattgtagaaaattcttttttaaggactgccattttttggctttatcataagtatattttctgttcttccagcaaatgatatgtaagcaatattgttcttttcaatcatatctatatacggagtactttttctggtcaacagttacatatttctcatgtatccgtatataggagaaatgtattattttttaaacaataaatctaatctaatggtgtaaaatgaaacaactaaattgtgttgttttcatttatgcaaatgtagatttaaattagcgttgtgtattcgtcgagacactctagaatatgatgtaaaataaaaaattatcatagcattaaatattatatatatcagcctcgtatgttaagatagaacgaataaaaatcattgatgggatatttcatatttataatataaatttagtttaactacgtatatttatgcaaatttgtagagtaatatatttatctttaaatagtagataatactattcataagaccatcgatcctttccgaatgatacacatttttttgttttattgtttgtataggaaggattttgaaaatagtatttcaatagaccaccgtgcatagatttttctttgttccgatggacagtaggtaagcttcatttctttttttcaagtcgtatgtacgtacggactacttatgtattttttagcttaacagttatataggtctcccgtatacctacatggggtattagtttttaaaataaaatacatctaatataatggtctaaaatattagattcaccaatttaaatgaaaatcgatggtgacatttacttaaatttatattgaggaatagattttatctttaaatagtagaaaggataatcaattttttaatggtcctacgtatgttttgttcgctttattgttttttatagtactaagtctgtgcgtaatttttttctttcgataaacagtaggtaagattcattgttttttagtcttacgaatgaacatacttgtgtttttgttttctttttccggtgaacaataagataaacggtaataagattcattgttttttaagtctcacgtacgtacatacctacggagtacttgtgtgtttttttttctttttccggtgaacaggaaggtattagtttcctcttaaataaaatacatctaatctaatctaatgggctaaattatcaggtccaccgatttaagtgaaaattgacggtgagattaggtattgccacgtggcggtatatgagcgtttgcagaagtgtcatgtggtggcttgagagcgtttataggaagtttaatagacttttagtatataatagatagatagatgacactaatttagtattataaatattaatatttttatctataaatttagtcaaacttaaaacagtttgactttgatcaaaatcaaaacaccgtctcaatccatatttatggatacataggccccattctttttttattaatttacagatttcacctcggtttctgtttacacgttttccaaacaaccgttgaatggtatatttcgttcgaaaactgctgatacagaagatgttttaaaatatcagataaattcatttttaggtttgaagtaattaaaacttttgatacagaggtggctaatagcttttcctattttgtgtgtacgtactaaatctttgtgtcatcggcaggtccaaacggggccatattcttgcttacgaaagcaagcaagcagcgtgcggttttccggccgagcggcaaggggatagccatgaaaaagaagaggagattgagttgagttggagctaggcgcccgagcttttagctatctgcctagctttgtttgtgctttgcttgattgccgcgcgcaggaggaggtagaggtagtagaagccgccagcgcgcgcgcgcgcgggggcgcatgtgcgcgcgtcgcgtcgcgtcgcgcgtcgctcggggacaaatcacgtggacggggtggggcgggcggctgcgacgtcgtgcgcggcgcggcgtggcgtggcgcggaggcttcgcgccgttcgttcgcggtctctgagttaaatgtgcgggtcgcggcacatcagatgctgcctgctctgctcgccgccgcccacacacaccggccgtcacggtgttgtccctcccagctcccagatgtggcctgaaatctgaacgtttgaatgtcttaatcgctcgaaacgagtaaataataaatgcgtgaacattcaattgtgggattttctaagggtagagattttctaagggagtatggcatggtttagttcccaactttttcttcaaactttcaactttttcatcacatcgaaactttcctgcatacaaatttctaacttttctgttatatcgtttcaatttcaatcaaactttcaattttgacatgaaattaaacacaccctatgtgtgtcctatgtgtggagaggtgtgtgtatttgtctttccatccaatcgtaacaaagaaacaaaacaatagggtcttttttttttgtctaagtaaaaagactagtgcaaacaaaacaaccacggatcaaaatgtacatttgtggcgtaaggttcattcttctatgctttttcaaagtagtgtgttgttgaaacttttcttttgcagtagtgttactttcagtgctttattttcttctctctcttaggatgaaaacaatcggaaacggtatttatttttctattattacagaaacggtactgatacggtcggagctctctatttttacaactttaatacgacacaaacaaaaattagaaaaaccaaattttactatcatagacacttagaaagaatatttttcattatcttttatgaaaacggtatatatacggtgagaaaatttatgtaccgttttttcatcccttctctctctccttttgcacagataataaaaagtaaattcctggcaaccactggttgtttgggctaatcggtgctttgttggtcaatgtaagatcaccattgctcttgctccaatttcgtcctgtagtgggctttttcaacgagcccaacccatagaacccggcctggatcacgaaagaatctaggcccatctaagcactagcaaactgcaaacagctgccagcgatcactcgagagcgctcatggcaggttgacgttcgctgcatcggcgacaaattaagcagctacccgacatgccgacacgaactaatctgcaattggaattttggaagaatactggcaccactgatggactcaaccaatgtagtttgtaaatcttcaattcttttttcgtaatttttagaaagatttacaatggattaagaagacaaacctagtgctcaagccctaattacctagactcgtctctgccctgactaccaccgcgtaaactaatcacaaagaatcagagctcgaaaagatgcagagaattgaagtccatgcaagagatgaaaggagaggacaccttctctattctcacgatatgaattcacattatttcccaatcatattcatgtacatcgcatacagattaggcactcttatgaaatttggagtacaactcagaacaaaagaatcgaccaaaacacagctaaaaacacaagagcaattgctactgaaaggctactgatcacagtgtctcttccatgacccaaaaacatactgaaaggcgctactgatcgcctcatctcatggcctcaaaactagggagtaatatattgctccagctctctccctctccagcttcgtcagcagccgcagcgacttgccggcgacggtcggtctcgggccgccgtcgttgctcttcgacttggtgggatgcggcggcggcggcggcgcggcagcgtttgtgacggcggcggtgggcgtgatcaccttaacttggtccctggatacgcgcacggggcggaagggatcgtggggcgggaacccgacgttgtagacgacgtcgaggaagccgtcgtcctcgtcggcgtcggacacgacgacggcgccgagccggagcacgaggtggcggttgagccccgcgccgatcttgccgacccgggtgcgcacgctcaccggcgtgcccttcttgatgatcggctcgtcgacgccggcggcgccggccaggaatggtgaggatgcccgtgaaaacttcttggcgacacgcccagtgatcggcgcgaggtgatccggcggcgtcctcctgctctcgatgtcgcggagaagcctcttcatgccggccgattgcaccgtcatggatggcatggtgctggaattgtttgatcgagcgagagaaaatcaggtgagatgggatgagagtcgagacgagaaggcggcaaaattatataggcggttgttgaatatgaaacggagtctacacgcgcagtcggagtcggagatcgacgcgttcacaggcgcagtcggagtcggagatcgacgtgttttcatttcccgccatctttcaaaattttgtattcgtaatgttggacgtgtgtggcggaaattgggctgggcgggttgaggagaagaggcccaggctgacatttgtacagcagggtaactgggcttggtttgaaagaggaataagttcatccgaggtcccttaacttatcaacgaaccgattttcgtccttcaaccgaaaaaccagatacaacgggtccctcagctgtcaaaactaatgcacatgaggtccctcggcagttttggctgatgtggcacctatgttattaatttgacttagtcttcatctgatatggcatggacgtgacgcttatgtggcaatgtgacccgaaaaaataaaacctcatgggacccacatgttagtttcacacataaactaatcaaaaatggtggggcccacatggccccacatgtcattctcagccccctcttcctcctttatcccgatctccctctcttttctcttcactctctctgccctctcatctcccaatgcttgatgcctcactgtcgtcgccgtccatatgctcccgcaggccgtagctcattggcgtccggcccaaagagatgagagagcaaaatagacttatttctaaccatataagacatggcccaaagagttgagggactcaaaataaacttattccaaggacgagcacgatgcaatgatcgtgccttcggatcgacacggcatgacccgagtcttattgagtcatgtctgggccgtaggcgcagtggctgcacaaagcaccatatggcatgtcgactgggcgtgccttgatgtaatgccccgctttcagcgagacgttaaaaactagtttaataaaatcctaattgcgaaaattccgttctttgagtgagagtctaagtcgtgccatggatctcaattcatatcccttgttccctctcgtcgacatcaaaatcctccaccccaagatttcaattccgattcaacttccgaagtcaaataccgaattcaatcgcatcctttgaatcctcaccaaatacttgtccctgttttcgcaaatatcaaattctcattttgaatctctctcttgacatctccttgactccaccttgtgttcctagaccaaatatcaaagttaaatccaattccaaacttcttttccttccaaaccagttctcacagcagaagttcaaaatccgtccctctacttttgtgggccgaattccctccctcggcccatctcctctctcagcccgtttccccctccccttcccacgtgcgccgcacgtgagccgctcgggagagctccctccctccctctctctctttgttctctctccctctctttgatcttccggctgccgcgattcgattttcgccgccgcccgtggtatcccgcgcgctcccctgccgtggccgaccggaaggacatcggtgtcactccctctggtcatcgcctgcgccgacgaccgtcctgtccccgctccactccacactgcccaccgtcgtcaccatggggttgctggcgtcacctcggcttccatgtcccgggctgcccgcgtgcgtccaaggccgaaagcccgagagaatgcgcctctctcacgcgctctcccttctccctctgctcgcccaaatcggcaaggagcaaagctcctttccttccccttttcgcttttcccctgaccacagccgccaccatcacctgccacccctttggccgctagcgccggaaccagccaccgctccttgaccgccctcgatgtcggttccctctcccaaaccgcctctcctcgtgcctataaagctcgagccatccttctctatctctcccattttcgctccccaccgccaccgcgccattgccacctcagcgtcaagtttgccgccgggtgccgccgctcgacaaacgcactccgtctccttgtcctccgtcgaccgaacaacggtcgtcgccgcctcatcgcgaccctgtccgtgccgccccggtgccgtgatcatgacccacgcccccgtgcgccaccgactcccactcaccaccggatcaccggagcgaaattcgtggccgttggtgaaccctcgtccccttccccttatcgcgttaaacgttgtcaccaccctcgctttctctcttctccatcgtcctaccaccctcgatgctgcgtgtaccatgcgtcgtcatcggcctttctctctctaaccaactcgtcgtaaccctcccggagttccttgcgccatctctttgcttccccaacagtgccatctcggtgctgtgccggcccgccgtcgcgactgccatgaccacaactccatccccatcgacgccgttcc

SEQ ID NO: 26436 - DNA, 5333 bp, Oryza sativa
  unsure (1)..(5333): unsure at all n locations
ccgccagtcgcccctcttgctcccgcgccgtgccgccctttctgcccccgcgggagcatccccgaagaccattgggccccgtgccacttttaatcgcgtcgcaatcgtgtaatggttcgtctaagcccgatcccgcactctcttttccctccttgcgctcggccacatcacccatttggcgagcctcgccgtcgtcgccggccgccgtcacacctctcctctcaaatccaagccgtggaatgagttccccttgacctcctctagctgccggtgatagacgcccttcccggctcgccgccgttcgccggcgcccttcggttgccgtgcgccgtccgatctgggcaagcccgggctccctctctcttgcgcttgcatggcagtccacatgggctcgaccaagtcggcgcatgccccgtcagcttctttctctccctccctcgcccgtgggctcggcccaccagccggcctcctcctcggcctatcaatacaatcaaagtccaattttactccctcctccaagtccagtgaccccaatcatgagctaaagtccataattgttccctccaaattgctcctccctcaccctttgattggccccacatgtcaatgagcgataaaagaatattcttttccatagaattcaataaatcatttctcctattccagaaattccatttaagcttccaaaattcatatctattgatccgtagctccgattgactccgttccacttccaataattccgtaaatttgagatctatataatggcactattaattagtctaaatagggtctttcttttggtcttgagcaaggcaagtcaccctttgaccaattgctcccttaattccaaaataattattattttgtttgcaacctgcattattagaaatacttaactcgcttggcctcggtctgcgtgccaaaccgatggacctacccagtagtcgcactaattcctgtaggccgttctaccctgattccttgtcgctccacctttgtggtacttcggtatccgtgctctctgagcgcgtataccaactattccacatacaccgttgtttgtcgataattgaggaaatgggttcgagaagccttgaaaacccgacatgtggtgtcagtgtgtttgaaaataaaataaattgtgaaaactcgcgatacaggggttgtgcctgtgtggcgttgtcccgtatttgcatataaggaccaattcatgtgggaaattcatccgagcatataacaagtgcgaccacacgggtagaatgagacgctcttggttgagtaaatagcaaaccagggaagccttgatgccaagagacaagtggattcaccggggtggtgtcgaggagaaccactgggcttcctggcacggtatggtctaggacctaacctgttgttggtttgggacccctctcgttggcatatggcgactctgtatcggttttcgaaatgccttgtcatgaaagccttaaggtctcccgacgtggctgatctccacgggctgggtgatccgagttagtaatgttgtgtgggtaaagtgtaccccatctgcagaggttaactaactgttcgagcagccgtgcccacggtcatgtgctgatttgaggtgtttcccgttgcgtagttttgtttgcatgtgctttctgaaaagttgttgtggatgggaatcgttaccagaatcaacctatgtggcagatggatgacctgaatggtcagaaacggatctatatgattcagatgtctacgggcattatagactaggcttcccgagtggaagcagattgttgtgctgctgggcaacatgactctgggagtccgagaaaatgaaaaggctctaggagccgattaataagagaaatggctctgggagccaagaagtaatgatacgacccgggaggtcagtacattaccatttgagttgttgaaaagcatctcttaagtcgaatcgagacgcaagtctcttttcgacccaaacctgaaaagaaataaatcacctaatgatttcaaataaaaaatttgcataacaaccttgcctctcttccaagctgaagttgaagaagaagtaaagtgaagattagggttacgtcttggttcccagccatcgcctgtggtgttgggtgttagtccattggttccactgctgctactgttgttggtgtttgcctcgtatgtcgtcggttctattctcgggctgtcctgagctataatctaagttaaggaaaataagtcctctatttattttaagaattacaattattcatatttgtcaccgtgggtaccagcgctattgtcgtgggattgctattgagatcgcggtttcgtaggaagcggttcgcgccgtttttcctacggcatgctcctgttaggtgccgttgtacggcggtgccggatcgggatgtgacacttgattgtacccggacggggtccatttggtcatctatacctcaatgttcagaccgcaagcaaattacccactcccattttgcttcagttacctcatgaatccgctgctgacggccgccgccgccgtcgtcttgtgcttcctcctccatggcgcggccgcctccggcgacccgttccctccacggttcaactccatcttcagcttcgggagctcctactccgacaccggcaacttcgtcctccagtccgccggcctcccgtccatccccttcaaccactccccctacggcgacaccttcttccgccgccccaccggccgcccctccgacggccgccttcccatcgacttcatcggtacgtgttctacgcagttgccgtcgccgtcgccgccgttgttgattaatttctcgttgctgtgtgattgatgctgttttggcaatggcgcgcggcagcggaggcgctagggctcccactcgtgccgccgttcctggcgaaggaggcgaacgacttcggcggcggcggcggcgccaacttcgccatcgtcggcggcacggcgctggacgtcgggttcttcatccggcgcaacaacgcgagcgtgccgccgttccagagctccctccgcgtgcagatcgggtggctccggagcctcctgaggcgcgccggcaacgccaccgcgacggagcgcctcgcgacggcgctgttcgtcgtcggcgagttcggaggcagcgactacaggtacctcctctccggcggcaagagcctcgagcaggccaagtccttcgtgccggaggtcgtgcgagccatctgccgaggcgtcgaggtaactaaaacagtaaaaacacaaacaccattgcccaatgtccattgcatttgctcgcatttgtcgccgccggcgccgactaagactacgagtgtgtctgtgtgtgtgcagaggctagtggaggaaggagcgaggtacgtggtggtgacagggacgccgccggcggggtgcatgccngatggagctgaccaagtacgcggcagccaacgcgtcgtcggcggcggcggcgtatgatcgtcggacggggtgcctccggcggctcaacgggctggctcagtaccacaactggctgctccgggaggctgtggagcgcatgcgcggcaagtatccgacgacaaagctcgtctacgccgacttctacaagccggtggcgagcctcgtccggcgaccggcaaagttcggtaagtcgccgcgccgagattttttttcctgctttaattacccagtttcatattgtaagtcgtttgactttttttctagtcaaacttctttaaatttgatcaaatttatagaaaaatatactaacatttttaatacaaaacaaacatattatcaaaatatattcaatattaaatttattaaacctaatttaatgttgtaaatattgctattttttctataaacttggtaaaatctaaataattttcactaagaaaaaagtcaaacaacttatagtatgaaacggatggagtattttctactagaaggaaaaacaaaaaggaaaattgtaattatttgtttcgagtacaaatcggatgcactgacatggttacacccacacacatggacatatcctagctagcacaaatctaaagagactgaaggcctaacataaagacgcgaatattagagaatgaccttatattagataattagaaggggtgagacttcgaatccaggtcgtctagtctaccatcttgtggaagtggccgaaagacccctgtacgtttctcattgaaggcctaacatcgtgtagcgggtacatactttgtcaagcccaaaataatttgaacctttaacaaaatttgaacaaatttgaccaaatcagaaaaaaaatatataatacttccctcgaaataatttcaaaattttcggtcaggaattttaaaccatggtcagccgtaccacctgaaacttgaattgggtcgttagattgcaccacaggtaatctgattagctgagctcggaaaacaaatcctaataggctcaaattttgatgaattgtaatttgatttatcttttatagatcgacatcgatcagccatcgtcgtagctatagctcataaatgcgagtgtgcgacagtagccatgtacacacgtaaagagatataagagcaggtacaatagcaggctataaactagctgcaaacatattttaaggagataaataaggagagagaagagtagcgggctacaaatttatagccagctgtagcacggactccaagacacagtgtgtatatgacaagtgggaccatatattaatggtgtagtatgtaactattgtatgaataagctattagattggctatagataaattggagctagtagttggctatactattaaacttgctctaatgcctgattagtgaagtcaaattggttgatgaaacctaaagcgatagaacaattaactgcgctagcttgagtacttgagcacttccaagagctttgcaacttacgaaattttagaatctttaggtacgttaagccatgaactatgtcgggaaggcaaagccgaagaagttacaagattattgtggcttgtggatcgagaaactagctataaagtctacaatcacagtatctttttatgaaaacaatctggcatgcagctgtaattttgttgggtgtcacacaaaataatctaccagccagcttgggtcaactctgctagcatataaaattacaaaacacttgtagaaacccaatgaaccctgttaggtttgttgacataagggctggtttggttttaggcctaaattagacttatcaatatttggcaaatttaatagtgtttagtatctatttggtttgaagccaaattttgacatgcctaagaaaataggccatttcaatagtgaacttaggctattttagcttcaatcc

SEQ ID NO: 26437 - DNA, 694 bp, Oryza sativa
tcaatctactatctcatctccctttctctgcttttcccatcttctctgctcgtcgccaccacggggcgacggccgacttggcagccgcgtcctcgccctcccacgttccactcgtatcccattagatcacttcccggagctcgtgacaacttggtatcagagactatggttcaaggcgactcttccgccgtcgccaaactccaggacaccatgtctgatgttctatccgggctctcgctcttggcttccaaaagcgatctcgtggacctacgtcgctcggtggccgtcgtcacttcacgcctaacatccctggaacaacaccatggattgtcagctccaccgaacaattcatcggcgccacgcctcggtggcaccggcatcctgccgaacccatctcagttgccgtccggcgctgacaccgcgacagaacacagctccgacagtggcaacaatggtggtggcgttccacgctactacaagctggagttcccaaagttcgacagcaaggaagatcctctgaattggctcaatcactgtgagcaattctttcatggccaacgcacggatgctggcgatcgcgtgtggctcgcgacataccacctcaccggcaatgcgcaagaatggtacttccaccatgaacaacacaaggggccaccagattgggacaccttcaatgatctctgctacgcccagt

SEQ ID NO: 26438 - DNA, 1583 bp, Oryza sativa
ggaggaggtcgccgggtgagcgttggtcgaggaagcggcgaggagcgccatggcggtgccggctggccggtggccttttgtgagctcgtcgaggaggagctgtgcatgggccttggcgaaaggtggggaacgggacttgcagcggcaggagggagggaaggttgtcgaacttgtcgttgaggctgccaatgagcatgaggacgagggagcggtccttgatggactcgccgacgtcggcaaggttgtcagtgaggaccttgagccggcggcagtagtcacctatggagagatcaccttgctggagatgatggacctcagcggtgaggttgacagcgcgccgctcgccattgtcgaggaagtgcagctcgagatcacgccaaactgagcgggtggtcgtggtgggagagatgacttcctgcatgagagtggcagagattgaaccgtaaagccatccgagaacgacgcaatccatctgcgtccagtcggcttggttgaggcgaggaacatcggagaagacatgctcggtgagagcaaacttgccgagcgccacaacgaagagaccacgcctatgggagcagttgtcggtgtcgaggttgagggtgacggggacgagcgccttcacgttgaggacggcgatggcttgattgtgaagcgtggcgatggcgtcggtgtcgatagtcagcggtggcacgacggcgtcctatgacggggcggccagcgtgatgttgaaggcaaggcgagcaagggccgccagaacttcagggggaaggagcgccacgggcgtcgtcgggggcgcgaacgtcagcggaggcgcggtcctcgtcggcggaggtgcggttgtcactggagccagcggaggaaccgtggaggagacggcgtcgttggtggctggggtgtcgtaggctcttcggaccttccattataattgagagatgaaatgaataattcaagtcattaaacaagcataatgaaatatcctacgcctcgagagaggaatattggagacattactggtcctttagcctgccagtcaacttcagcctgagatgtgcccgtcaaaccactcgaaggcggtgaccagatgtgttacacattcaggagacttgacaaaaatggctaaagatctacaacatctcaaatattcttaactcatactcatgtgaatctagttcccaggatgtgcactagattcacactttcatctcaagcatgattatacatagcaaacacaataagatgaaagcgattataaactacatctactttagttacattggccgaccggccaaataaataatagaacagcggaagcttgtctacccaatccacaagcacaccgactaggggtttacaccattaagttcaagtcctacaagaagcagtcgattacctgcatcactcaaagactaagtctaaatcctgcaagcaaaagttaattcaacagcaagagtcagtatattattagaaataatgtactggcaagcaccaagacaagcctaacaccctacttgcaaggcatataatcaaggaaggcatagtatggttctttttagcataagcaagttttatttgcataaacacat

SEQ ID NO: 26439 - DNA, 2135 bp, Oryza sativa
  unsure (1)..(2135): unsure at all n locations
tagcttccgcatttccccctctaggcgacatcaaggtcctttgaataagaatcaaaacctaaaccacgattgtgtgtgctaacgttagattgatcaagaatcatgtgaggctctttttaccatcagaaaatctttgcaaagaacttttaaataacaaacctgctgagtaagaatagcacaatttttacaagcatccaaaagacctttttgttttctacaagttgagcatgaaaacacctcatcttgtttaataatttcttccatgtgtttaacacgctctaaagcatctttcaacttcaactcattcaaaacacactttgagcaatcttgagaaatcaaaacaccattgttttgttttgccttatttgcacatgtagcattgaccaaagaatntgacaaaaagcatctttgtattttttcaaaacgttctttgtcaaaatctactcatcaacaacacgagcatgtaaagcaaatccaagagcaaaagaagactccaactttttagatttttcaatctcaaattctaatttcttggaattaacagaattgacatctcgcaaagcattaatttcagaaaataaaacttcacaagattgacaattatcatcattaggaatcaaagattttaatctagcaatttcagcattaagaatctcaatagtatgatccttctcatcaagcacaatagaacatgtttgaagtttcttagcaaatttataagcagcatattctaattgatcataactaagcttttcttcattatcatcattagattcatcaacatcagaacttgcattacgagcaataaaagctagatcaacttgcttacctttgctctcatcttcatcttccgattcatcaaaagcttttataatttcttggattaaccactgaatacaatgcttcttcttctccttctccttcatgttcttcttcttattcacgtcatcatctttgactctaccatcatcttccttctttcctctcccaagcttaggacaatgcgagcgaagatgatcaagtgctccacactcaaaacaacgattcggttctcctcttttcctgttcctaacatttttcatagctcgagaaaatttgttagataacaaaaccaagtcctcctcctcgaactgtttgagttgatcatcggacatggcattaaataaagcaagaacagaagacttcgatgaagaagcaccaacatccaaagaagttgaagaaaaaaccaaagcactagacttagaatcaactttacgagtaagaatattcatctcatgagttttcaattttgtgtaaagcgaatccaaggtcaaagtagacatgttaacagactcctgaatagatgtaactttcatctcccaaatagacatgtcaagaccattcaaaaagtgacgagaaatctcagattgtggataattagcatcataagaagaatcaacagatctaagatcactcaaaattttattaaaccgagaaagatagtcatccaaagcttctctaggtttcatctcaaatttaatatactcctttttgaaaagatcacgacgaagttcgttaatattatttgttccttgatgaaaattactcaaagcaatccaaatctcatgagcagtttgaagatgagcaacacgatcataattcgaacgagaaatcccactcaaaagaatattgcgagctttgctattttgttcaaaagcagttttttcaacagcagtattaatagcttcaggactcacataaggatgagaaacttttttccaaatatcataatcttcagccataatataagattgcatcctactacaccaatgagaaaaatcggttccattgaaaacatgaggcttagttgaaaacctagcgggagtagccatggcaaaaactctagatcgataaaaatccaaaaaagaaaacaaggctctgataccacttgtaggatcgaatcacaagaactaagccaaccagaggggggtgaatggttgatatacccaaaaaccaaaacttatagcggaaataaaagttaccctcaaattcgatggattgcggtctaaccgaaggtgttgcgctggtcgaaccgcctgatgaacgtcggtctgaccgagatcgaactccggtcgaaccgacgagatgcctgctgc

SEQ ID NO: 26440 - DNA, 1455 bp, Oryza sativa
ggggagagctccggcttttcttttccatctcgaccatgccgccggccgtggagatgacggccgtcgccatcgccattgtaccgtggtcgtcttctctcttctaccgttccatactctcctcatcatgccgatcatcttctattttgacaccacgtcatttcatccactgcagccacgggaacgcagagctcgccgacgatgctctggagcgcgcactggacgccgtcgtcgggttctcgtcgtcgttccgaccgaaccgagccaccccaagccgaactcttgcgccaccaggatagcctcgacgtcctcttcgaaagccctcaagaaccccagccagtgccgcaacgatgagggagatcggcgtcttcttcctcaggtccggccgccgaccaccgtcgtcgattccttgatcccgggtgagcttcggcgcaattcctcactcgtgtagcatctttagatggtctttgagccgttccactatatttcttggcagcccggagtccggattgtggttgtcaccgttgccatgccgatttccgccgccgcggggatatcctctgcatcatcgtcactatccaggcctacccgtacctcgtccgagattcggtgagcaccctgcagcctatagaacatacatgcatgcatccctttgggtacatccagtctatagcacaacatgtctacccatgccaaaacatcctccgctcggactcgccgcggcgttactccgatgtcctctaaccgagaaaagtaaaggaatggaatcgcaataacatgatcttcattttgtatttttttcgcacccccaaacgagtcatcgtttgtcaccggcgagctcgagaacgagctcggccatggcttagctctgtgtcagctcaaaccaaggacctctgttgagaagaatcaaagctctaggtactagtttgtaaaacctacctcacacacagaacagtcatagaactgcgggttgatttcctgaaactctaggagcctttttgcatattggcctgaaactgacctgtggaccgaatctatttaaattctggaaaaatctaaatgaaatgcctaaagctttatattttcatcagaaaaacatgtaaatttgtaaaatccttaaaaaattggaaacaactcattttagagtaatacaaattactgttaactcatcgaatcatgaactttagtgttattgcataaaaacttgcactcacagtacaaatgtagcctctaaaatttatctaagataaatcatacataaagcatatacaaacttataaaatgcataaaaaattcatttcaactcattttatagcaaacttagtttctacagatccaccaacatgttctctaaaaataaagtaaaataaaacatataaacactttacatcaaatgcctctaaaactattgtctttaaaataactagttttgcatgaactgaactttagaagtttata

SEQ ID NO: 26441 - DNA, 19723 bp, Oryza sativa
  unsure (1)..(19723): unsure at all n locations
aagtctttgcagcagacttttgcccaaacatattctctaaaaaaattacatgaaatatcctaattaatagatataaatgccgtctcaggactcaatccgtgcatgacaatcctcatgaagctcattaactcaacccgacaatgtgtaccgcgtcacattgtcggactcggctcaatcggctaaccttgtccaactcggactctgccgatcccggtcatagcagatgcggactttagcagatccttgctctgtttccagaacgacttccatcttggattccgcctcaattttatctccatctctgatactgaaattaccaaatttggttgttaacaacgatccaaaaactgcataaataggtgatgacgatccaaaaactgcagctgttcaaccatcatgttataagcacctttacgaaaaatatatatatgtatatttgatagaatatggtatgttcggttatcagcacatgtgctctatcatcaaggttgtgttattaccgagagttagctaaaattaattatattggttccaggtgaagtgttaaaaaacttttcaagaaataaaaatagggaaagagagtaagagacaaagtgagcagtggatacactgtaggtaccttccatatgataagatcaacatagtcttgaaagtgaaaatagaacttcttcttcagatgctggactctcagtaaacaaatccatgggttcaacaaacaattaaaacaaaaaattttgctccacaacaaattaagttacaaagacggcacacagcagtaccaatgaaagacggcacacagcatagcaagttccaaaattcggcagtatttatcccctcaaaaaaaatcagcagtattttatttcactcttattgggtactccctccgtttcataatgtaagattttctagcattgcccacatacatatagatattaatgaatctaaacacatacatatatctagattcattaacatctaaatgaatatgagcaatgctagaaagtcttacattgtgaaatggaggaagtagcagttagcactattgttagcaagatggcagcaccatatcataactaaacttgaaccattaatctagccatagtaaaaatggattaataagatacattttcttgctaagaatcaggtgtgcgagagcttacagtgcaggtgagtatttgatggcactggtgcaaatcagcttcctctagatggtagcaaaaagaatatctgcagaaatgatgaggtctgatttagaaatgcaaatcctttggtcattacgaagcaccgttttatttcaaaaaatcctagaactagtggaatgcaatcatgtaatccttaaaaaatgaagtataaaacttcaggggaacatttaacccagtggcatttggcacagcaagggcataaacaatgatgatccacctcattacctctccaattttgagcatgtacttatgtatatatgtaatactaaaatacagatatacagaaaacaagaagaaatggtattttacaaagaaatggtttaggaagatgcatgtgctacctctaccaaaccataatttggggtgtacctcaactccagtagcaattgaatagaacaggtaaaataagagttctgctaccttcaaatccaagcttgaacatttctttgatatatccgtagaactcagttctatcactgtcttttccctgtcctattgtcactaagccactatttattgtaactgcctttgtcatcaccttctcatgtttatctgtccagaaacctcatttatgtcatatgtactatgtattaactcaagtgtggaatcctttagctgaaattagcactcatataaaatcatgtctgtgagactctacatgtcaaggtatagcgtatgcattaagcatgctgtgatcaacaaacataatgtagaagggcaataaaaaaatgagaaattacctgctggtagaaccacgccaagcaccattccgtacaagtttttctttatgtgttatatttggttcaccacgtctcttccactcctgacctataattctctatagaaataaaatgcatgcatgtcagcaaacggaaataaaatattgtgatgatctagaaaaaatatcccttctaaagctattttattgtgcatctctgaatgttatgcagcaacattgtgagctttttagtgaaaagaaaatttgagtatccaacaaactaagaccaatgttattagttatacaaactatagaatcccaaagcaccatgcaccatggaccatctcgtcatctataactaatgaaaaatgccatagtatttctgatgaataacatatatgcagcgattaagaatgcatgactagaaagtactgtggcgatatatagaaagctacagactgggtagctccttccggcataaaagcagatcgctaacaacaagcacctcgtgagaagcgatcttcgctaaaagtaactcagctgcaaaaagacagaaaatgtagctatgcagattgacatggcgcacagtgatgctcgctagcttactcttgtagtcttgtggccaccaaggagctggacagcgttcacaacgcgggcctggagcgcggtggtcacacggacgctcctctttgagcccggaagggacggccgccatatgctgccgccaccaagacgaccggagaagaaaaagaggggcattattggatctggagatggcggcctccccccttgccgcgctaggggatggatctggtggttttgagctcaaaaacgccggatctggtcgtccccagcttgcatcggccagatgaagggaagatgtaaggagatatggcggcggcggcgtcgctggggatagtaaggtggagaaggaggaggcggtggcacttggccggggaggaaaaggggagggacggcggtggaactgggccggggaggattggaggagagggaggtggaggcagtactccgatgcggaggggaagcatgcggcggtccagaagacgaggaggtttcgaccaactcgccgccggcagcaccgccaactgctaaagtcggagggcctggcagccgacaaagatacgaggagcacccctcggtcgacatcctcgccgaggagccggcgtccacaagctgcaggctgcagcgcggacgagcgaaggagccaaggcggcagcggcggcggcggcggcggcgcgtgggaagaggagggagaggcggagataagcctgagcgcgagtggggactggatttggcgaggtgatgggggcacggactgctttgatcgtctgagaccgacggatcggacggctcacgcgaaggaaggttactgctgccctagaaagatgggaatttgtattcccgcgcaccaccagaaattgggaatttggagggaaaattttttgtttcattaaaactttaaccaattcatttttttacttgttgtaacgtgtagcttatttattattatatcactaaaaacatatacttctgttgggcaaagaacaatttcactctaataacatttagaatggaaaattttaaacttctaataggataatatttccatcaaactattgcaaactacataattgaagaaggtgtatcatgaatgcattacaaaatttttccatacgagcgtattaagaaataaaattttaaaatttgaaactagtttatctcactcattgacggagcgtggggctcctcaccgggagaccgtgcaagccccccttcgccggttcggccgggggcgctaagtgaggttcttcgccctcgatctgaggaacgtccgcgagagaggaagagcacaagacacgggcgacgtagacaggttcgggccgctgagaagcgtaacaccctactcctatgttctggtggatctgtgcgtgaaggaatacagagagctggagagcgagcccgagttcagggtctagcacccattccccttttttctcctccctccagagtccccctcccttctttttttttctcctaggcctgggcctcctttttatctagtcaggggtcaccacaagggcctctagctgcctaagaaaggaaacatgctttttacaatgagggctagtctacagccggaagtgacctctgacaagcagagcacacgcctcctgccccgctcgcccgcttttccggtggacgcccatttcaaccttcatttaatggccagcgacttccttgccatacttgcgctgaaacctggaatggctctgaccgggactgacataccaactctaggagttagcacgccggctccggctagggacgagagccaggaagctctcatcattccgacgggacggggcgaggcgtgtgacaggccgcctgttgccacctaacccgtgatctgaccggtctgtgaccggtcacacaccgcgactggtcacggaccggataagcgtgcgctgcgccgcattaaatgcggcgtggcgcgctcgtccaacctgctataaatgtgattaggtgagccccgctgtgctcacctaacccacacacatggcgccaaaaccacagggggtcggggcgccccagccctcggggccaaaacgagggcgccccagccctcggggccgaaacgggagcggtccgacccctcggggagacagagggaggggtggccacgtcatcctcgggcccgacccccccgagggggtcgggccacgtgggtgaccgcggctacccaagcctctagtcacgatacccccggccccatgtcaccgacactcatataaactttaaattggatgattttttttctaaatgtttctaaaatcatgctctgtcatgttattgtattcttactactattattttggccatttttcttatgactttgttttataaatttaaattttgaattttaaaacttcaaataatattttgaagtagtaaataatttcagctgaaaaagtcatgaacataaaacttgtagaactcattaagacatacaacttttattttggtcatttcttcattcaataaagtgatactaacattgttcacaaaatttacatatctctcatatagttttataaactttgtgaacaatattattatcactttgtcagatgaagaaatgactaaaataaaagttgtatgtcttaatgagttatacaactttgttgttgataactttttcagttgaaatcatttagtatttgaaaatgttgtttgaagttatcatattttgaaattcaaatttaaattgttcaaacaaagtcacataaaaaaagaccaaaacaaaaggtgtagatcttgataagttatacaactttgttatcgacaatttttccatttgaaatcatttactacccaaaaaattatttgaatttcttatattttaaaatttaaattttatatagttcaatcaaacttggatgaagaaatgaccaaaagaaaattggtagatctcaatgagttctacaagtttgtttttgacaattttttcatatgaattcatttagcattataaaattcaattcgaaattcttatatttttaaattaattttttaataactattttcacatgtggtcctcttaaagagccgcatgcaaaaatctattttcacatgcggactctttaagtggtccgcatgtaaaaatatttcacatctaaacaattttttccctcctatccacttcaaaatttttcatctcttcttctctcctctctctcccatctctggtattttcccctctcactctttctcttcctcactctcaccctctctcctgtctttctcttcctctctctctcatcccgcatatgcgggcggtgcgcccgaggaagaggcgctgggagcaggtgccgccgcggtggcggcggccaggagcggcgccgccccgcgacgcggactccggcgatgatggtaggggcaggcatgggagacggcggcggccttccctcacccggatctgccggcggctatcctcccccgccccgatctgccggcggcggccctcccccgcctggatccgccggtggccaccctaccctgccccgattcgccggcggcgctctcccggcggccggcgcctcctcgttggatccgggaaaggagtacgatgtcaacggtggcggcagcggcttgagaatgacggcgacagttggaggataaggacgacggtggcagcgactggaggacgaccacaggctggcaacggttacatttttcgatttttgaaatttttatttttatcgtgatttttcattttcgcatgcgactggcttatggttgcgctgaccgcatgcgaagatcgtgatctttgcagactctctcgtgcatgcggtccggccaaccgcatgcgaaaatgcatttcgcccatttgcaaaaatggttcttttagtagtgccgaaatttaatatttttgatatgtagctaataatatggaattgttcgcatgtaaatggtatattggtggcataataaaaaaaacatctcccatatctgtgacatattgatatgcgaacaaaatctgtaatatgtactatatataagttgtgtttctcacgagtcacgacgtggctttttatggctagagttcttttccataattgttttcgtaataacttttcgcacctggaggaaacggcagcacacacagacgggaagttccaaccccttcattgacatgcgggcccctccactagtttctccgttagttagttaggattaccgggtgtcatgtttaacaaacacggtaactaaaagctggagcgttgcttttccgtttcctctgtgccatttgcgtaccaaccacaagaaaaaacgttctcacagcaacagatgagtgcgcgccaacggaaaatgatctggagatgggactttgggacccatgttccctagtgtaccaacaaaacacttagtaatatttcagtgttacctagtatcaagagaacactctgtaaagagaatagttacgtggtgtatcttgaaaacactacggaactcaccgagtgccagaaaaaacacacggtacatctctagttacacccgggagagactcacatttggatcatgatcttgttgcttgtgagtgttcaggttaagcatcaaacaaagcttgttaagcggggaagtcaagtgcgtggcgtgaagaagccctcaggactatacggaggtgaaatgtctggtattaatccaaatgtgagccgtagtgttaggttcaagggctgatggatcgaattgattacgcccaacatggaaatttttgtttgatggtaggaagtttcatggttgtaatttgccagtaacagttttgcctagagagagagagagcatgcatgcattgtctttcaattttgtaccaactagagtgtagagccctcccagtcccagggtgagttgccggaagcatgtagaggcgcctggagcacgtcgtgcagggaatcggatcggaggattcggtggcagagatggaccaattggatactatcatggtcatggcgctgtctgcagtgtccagtaggattatgggagtgcgaggcgaaattttgtcaattaatatcaatattggcacacgtcgtgggtgcgatgtttctcaccggaatgaaaaaagttcaaggagcaccaaaatatgatttttggacatagtggagtgtattgggtgcgttcgtggaaaaaaaattacttcctgattcgcgcggcgaaattttctcaattaatgccaatattggcatatattgtcacacgtatgtgcaatgtttttgaccggaatgaaaatgttcaaaaagcactaaaacataatttttttgatatattggagtgtattgggtgcgttcgtggcaaaaaaaaatcacttcgtgattcgcgcggcaaacttttatcaattaatgccaatattggcacacgtgggtgcgatgtttctcaccggaatgaaaaagttcaaaaaaacaccaaaacatgatttttggatatattggagtgtattgggtgcgttcgtggaaaaaaatcacttcgtgatttgcgcggtgaaattttgtcaattaatgccaatattggcatatattggtacacgtaggtgcaatgtttgtgaccaaaatgaaaaagtttaaaaagtacaaaaacatgatttttggacatattagagtgtattgggtgcgttcgtggtaaaatatcacttcgtgatttgcgcggcgaacttttgtcaattaatgccaatattggcacacgtgtgtgcgatgcttctcaccggaatgaaaaagttcaaaagaacacaaaaacatgatttttggacatattggagtgtattgggtgcgttcgtggcaaaaaaaaaattaacccgtgattcgcgcggtgaatatttgtcaattaatgccaacattggcacacgtgggtgcgatgttttcaccggaatgaaaaagttcagaaagcacaaaataatgatttttggacatattggagtgtattgtatgagtccgtagcaaaaaatcactctgtgattcacgctgcgaacttttgataattaatgccaatattgacatatattggcatggtgggtgcgatattttcaccagaatgaaaaagttcaaaaagcaccaaaacatgatttttgaacatattggagtgtattgtgtgcgtccggggcaaaaaaatcactccgtgatttgcgcggcgaactattgtcaattagtaccaatattggtatatattggcacagtgggtgcgatgtttttcaccggaatgaaaatgttcaaaaagcacaaaaacatgatttttggacatattggagtgtattgagtgcgttcgtggcaaaaaatcactccgtgattcacgctgcgaacttttgtcaattaatgccaatattggcacacatgggtgcgatgtttttcactggaatgaaaaagttcaaaaagcataaaaaatgatttttggacatattggagtgtattgggtgcgtcttcggcaaaaaaattactatgtgattcgcgtgacgaacttttgtaaattaattcctatattggcatatatttgccaatttcaattggtcagtctagatctctgatccttcataactattcataaattcagattggcaaatgcaccatcatgcagaacaagattcagacgaatggttgtgacggtgtgttgaataaaattgcatctcttgatagcaccaagcaaatgcatgtggatagtgtagtactcacgtccaccaagcagtgttggtgctaatgcaatctggctgaaagtgtcctctttctgttgcattccatcgaacaggtggtctgcaatagacaagggtgacaaccacatcaaccaggaaagaataaaagcttctggaagctacatggccatcatccccagcgcatagagaaaaatcagaaattgtatcttgtgagaaatcagtattgacaaataggaactaaaccatccacacctaactcagtgttgctgatggtcagttcgtgcattcccagccctggtcgaagaagacaacaggacaatagtccggcagcgacaccaccactggcagccattaggatcagttcaattgcttaattgtacacataatcttctctgattcatgttccagttggaactcagtttgtgttaagaaatccttgaaccagaaatttagcccaaatttccagaccattttgtgtattaaatccctatccagaaatctgcaagggtacacaaaataacaagtaatatacagttcccaacgtaaataaagcataaatacttagagaagaggcacttagtcctcgcatcgaaacgaaaacagcagcagcggaaaaaggcgatcctagcggggcttcagctccactccataggcaacactcaactggggtctgagcctttgtcctttaacatcgtcttcagatcagaagcactacacttttcacttttgaaaagaggaataataccaaggctgagtacaaccaccatactcaccaagccacaccaatgatgcagacatgcaagggggtaaaaggatggcttgtggctctttgcataaaggcggttgcaaagcattttattgagcaaacggtaaaaaagttgattaattaaagtaatattaaatctccccagatcaacgctacaccacgttgaacaggccatccatcccacctgagctaaccagtgcattgagtcgatttattaggggtgacactgatcacagtgaatctggtcaatcgcccataaccacgggcacggctattcgaatagttttactttggccagaggtgcacaactgtaaccacaagatacaatccaccggcatgtcaccgtgctgtcacgtaaaatgaggaaaaactctaataaaaactaagtaaacagtatataaaaagtaaacaaacacgtagagctcaattttagatgaattttgcaaagttgaacggctcaatttggtgttcgtatgaattagatatgaattttagaagttttgagccatttaaatgaatttctataattattaaccgaatttattgcgcaattatcatgatttatgacgtcaccgaggggattggtggcgccgacaagcgggccccacctgtcggtggctcaagggaggcgggtgcacagtggaccgggtccacgcggcaccggcaagcgggcgcaccacgtggtggccatggcggacggagagggcgacgtggcgccgacatggcgccacgggggcaccgatgccgggtggcacggggagggccacgtgcacagcctagatcacccagagggggatcgggcggtcatgggctagcagggcggcagcagccggctgaccgatcaggaggcggcgccgccgggcccgatggtcgtcagcggcgagcggcggcgtcgcacatgggaggtggcgggggaaggagagggggctcaccgagaggacgtgatggcgaggcgaagatgggaaggcggccgacgacaaggattagcggcggcgcttctcgggttggggtcggggacggcgctccggcgactcctgagagtggtggaggtgcggccgagggccagcgggacctggggagcaaagaggaggggttagaggagggagaggcgtcgcggcatggcgaggaacgccggccgagcatggcgtttgcagcgggactcaccggggagcgaggggagatggttacaacggctcccggcagcagtgaggtggtggccgaggatctccttgcccttgcggagccgaaggaggtgacggcgcaccgtgaggaggtcggaaacagcggccggaggtgtcagtcacgcggcggtgacctcgggttcacggttgggtggtagttgcggtggctatttggggaaaccaagcgaaggccgggtgcgcggtgaggtgtggcgatgctagtggtgcgagcggcgcggcacggggactgcgggtaggggtggaaaaaaagcttgggctcgtgagctcagctcgggcttggctcgagctcgcttagcttggctcagctcgggcagtctgcgggagcagcggtggcaggcggctgaatagcgccggtgagcggcggaagaggtcggcacggcgggagcggatttttgggctggatggggaaaatggagcagcggccggggtgctacgcggtgcggcgaatgtagtggaggcggaggcgcggcttggcagtggctagggcagtggtggcgcgtggccggagctcaccggcgagcggcggtgcacgggctcggtgtggggagagcgagagagagtgcggcgggctctggaaagatggggaaaagagagagggagtcctgaggagcattttttataagctcggggaggggagaacgtgcccggacggggcggcaacgggcggcggcgtgggactccggcaatgtgggcgactggggcggctcggcgccgattttctcggggagagtgggggatttgagtggaggtgtcgacccccgattttggaaatcggaaatcttctgtgtttatcagtaccaatccctggatcagtagttggtacacacatacatagccgaatcacaacacatcacgtatgaattcaggctaagagagttaaatacttgcattagggccaggcaggccaacaactatcagagaaacaacagcggaaaacaaaataatacaagggcccggttgacatgccacaagcagtcgactggggaacgagacctagatcgaaaccgcactccgatcatcttgttaagtacgcaagcgtactaaaacaagggcttctcttcaacactctgctaaaagatatatatagagcaacaatgagtacaaaagtactcagcaagccaccacacaaaatgcagtaatgtacaggataatacaaggagtggctatggttactttgcgtaaagctgagttttcaaatatcatttcacaaacctaagacctagcataaactgatcaggttttaactccattgttcattaaacaacgacagttctatccaccatccattgtattcccaaggatagcttcccgccactggtcgtcatggttttctggggtctaccccttctcacctctcgagaagttgatccaccagtacaaaatcatcatgcatcatctcacccatcattttaagaatttagagtctagccaagtgtaatacatgtcccggtgctcaataaccgcgagcacgggtattcgaatagatttggtttactcacactgcagtggatgtacactttacccgtactccgcgactgcccaacacatgagcctcgtcccaacacatgagacgcgtcacggcaaagcctttcaataacctcacattggcagtacccactccatgaacttacatcctcatgcactctaggcgtcataagtttctagcagtgagaggagttctggctctcccgggaagggaagactcacacatgcattaagttatagttaagtttaggtttacacatggcagtcctaccgatggcgacaccactgtaggcacccgccccacgcggtcctaccaatggctgccccaccgtaggccctgcctcacacacatcaagaaaaccactatgcagggatactgcctccgctcggctatttacaacgctaggtctatacccactcgagaagtacggttgtacggaggtcgtttcatgcttagcttcatggctcgatccttaactgaacagggacggcactagcctttaccggacaccacccaagtcctccagccgccccaatcgaaaatagttgtttagtttcatttttcctttcacaaatcatgtcaccaatgtcatggcaatgtggcgctcatgtctccacatgccgtatctcaactactttccctaaggtagttgcccaagcatatagcatatcatgcaaaaaagttttagtatagttatttaaagaatagatagaaataagattgcgtccaatagcatttgaacctataccaaaggtnnnnnnnnnnnnnnnnnnnnnnnnnnnnnnnnnnnnnnnnnnnnnnnnnnnnnnnnnnnnnnnnnnnnnnnnnnnnnnnnnnnnnnnnnnnnnnnnnnnnnctgagctcccaaccagtgggaggggaaagtgatctctgaccgcgtgcctgttgaagaatgagccggcgactcataggcagtggcttggttaagggaacggaacccaccggagccgtatatgagaatgcatgattctaaagtaccattactaagcttttgtcataattgactaaggactcatacgtaatcatgggtacaaggaaataatgaggtaaacaataatcaaaggcgtggcataataacaagtaggatattcatcattgcatgcaattttatttataaacaaaacaatttcgcaattgggaccaacatgctcaagggatggggtgatgacttgcctactcaggatagttcttattcttaatataatcttgatcaaccttcacctcctggaagctacatacgttgcctcacgactaaccgatatacaaattctataatacgcgagaaaaaccaatattcaaataacaatcaaatgtgcacaagaaaaatataatgatggtgtcgaacctagggttgctcatactattccggcttgctaatggattctaatcatgctaagggccaagattcttagtctttctattgtcatggcggcttattaggggctaatcatcatagtataaatgagatacacagtgctaatatgtggttaggatttataacaagtacctgtttactgtatgtgatggttctgttgactattcactggaggttaaccgaactatacatatactactccacatgatgacattgtaccgactaacttctaagtggtccaaatacaaccaactctgttattatttctcataaacaagttaaagattcatctataagtattaatattttagttataaaatatgaggctaaactttatgtaaataatttataagtcatgggtttaattacacaaccattaaatagtactagtagtctagtatcatcctatacattaatttgagacatcatttaaaattagtttgtgtggttggtacagtgacaagacatgttagagacaaatattcttacatctactttactgtaaaatataaattttatttgttagcacatttttaaattgactattatgcatcatcttgatattaattattttataattataaatatattttattaaataatgaattatataccattgaaaagaatatgaactttatatgaatttaggttcaagtttcactcaaatccgagtaagttacactagtttaaagattcaaataggaataattgcgaaatagcactgttcataattgattattttagttccgaatcattatccataacctaccgtgactgacaggtggggtcagggttttattattctttcagccgatttgttttaccccggataaaaattggagcgggcccggcttgtcagcgacttggccaggagtcgtcttctaccttcgtcttcttcttcctcccgaccgagcggaagcagcagggaaataaggcgcgcacggcaaggccggtcgagggcgacccgacggcggtgaggggagggtgcggcaaggctccggcgaccttcggccggcggccacagcgtaggatggtgcgggggcgagcagcgtcgcatggccgccatggccgaactcgggtagctaggggctagggtggtagggtttgtttccgaccaaactgatgagggattgagcatctatggtgtacgagttccgtttttacataaaaatagaaggaagagcccccgggatggcatgtccacgttgaactccatgggcggagctttggagctcgggcttggcactgctatggacctaatcgacgaaattgatgggggatttagttcccaggggactagtatgagtcacaggagcgaggaattaccgaggaaaggaggaacgacgaagttccatgtcgcggaacagaggcagacggcgttgatggcgcccgaaggtgttcgtcggcgttccttggcgtccaacctccccaatggcgacggcggcagcgcagctccgcctccacttcctccaacctccagctccggccagagagcctcgcaatggtgatctctagcagtggtgagagagtgatcgcaaggtgttcgatgaaatgcactcgagggaaaaaggcagagagggatggggtttttatgggggcttagcttagggtgtaaggaaaccatggggataagatcgccagcacatggcctggacgagctagagttcaatggcgatcggataagagcaatgaggtcgatgacacagataaagattgatctccttcaatactaaggttttgtgggccatcatcaccctataacctatagtctgcgagttttagccctagctggggaaggggactccgttttatccactggacacaaagaggggcgcatcgttttgtctagcgggtgcatggaggggcgacgggacgtcatggcgtttggataatggggtggatgtggcgatggcgacgcgcttatccaatcggcttcgttcctcatctcttggagcgacggctgaaggagatggcggcttgaccggggtcgagtcgcggacctgcctggcgtggcgcgggctcatgggagctggtccggttcagggttggacacggtgcggacatgatgttggtgcgagacgcgacgaagtggcgcacgagagggagtggcgcagtcagcctgggactgggagcggatggatgcggcgcgagggaagggatgcgcggcatttagcgcacgggcacgacgcggggcgcagtgcagagcgacgtacggaagaggcgcgacgcggacacaacgcggtctaggtgggaggcggctgtgttgggactcgggaggagttcggttcgggatagggctccggtcgagcacctggcggcccatgaacagtagccggctggaaaagagagagaaggaagaaaaggaaaaaggaaggaaagggaggggttaatctgcaaaatagttgggattggaattgagatgtagctccatacattttggattcaagaattcaaatattttatttgaatatttatttgcttattcattagttcccaaatgaatttgctttagattatccaaaaattttccaatataacttggagggtttgataattctaaaattaattaaaatatttaatgtgacgattacaatggtagtgatgtatttactctgtttatatatttatatgatgaattctataccatatggtacttgataaagtgttttaaatgttaatttaaatattccagcgaaacaatcatctatagatgagatcattgtaaagaagtggccattatttcatgtgagattggattcagatgaattcgatttaatcttaccgttttcatttgttacgtatgaaaccaagctatcaacatggtttgaatatttaatatttgatttataatttatagaaattaataattaacttttccttcatttagttttctgccttgtgcataatatttatgggatcgatagataacttattcttgcgatttgtacatctttaattttaatgtttcattgtgacaatttataatatccagcatgatgcaaaagttttaaaaagtttgaaattttagtgatttttattgtcgggaattttcagggtgttacaggaggaatggaggggagccgattccactcggtttgggcgcgagggcgcgagcgggagggcgccggattcggtgggacgtgggcggcaacggccggccatggtttcttcggcctgggaggccagaggtaggaggagggcctgacaggtggggttatcgggcccacctgtcggcgatggagggagagaggaggctggattagggaggtaaaatagactttggggagagagggccgagcaggccgagggaggggaagggaggccagcctggccgggaaggagggggagggaatgggccgagcccaaggaaggaaggggtaagattttctggtgtcgggacaacctgcccaatcagcgtcggaatatgcgatcaggtcgaccgtagtggaacgccgaaggtggacgacgaagtcaatggtgccgcgaacatagcacaggatgcgcttaagagcggcaagatgcggctcgtgcgggtcgtgcatgtgaagacatatctgctgcacggcataagagatgcctggcctggtgaaactcaagtactgcagggcgccaacaagactccggtagtcggtaggatcagcaacaggagcaccaacaatagctgacaacttggcatttgtatccactggggtcgagcacggcttgtagtcagtcatgcctgcatgctctagaatctcaagacagtactgccgctgactgaggtagaggccagaagactgtcgtgtgacagaaatgcctaagaagtggtgaaggctgccaagatccttcatggagaactccgactgtaacgaccgtatggtccagcgaagcagagcatcagaggaggctgtcaacataatgtcatccacatagagcagtaggtagaccgtattatcagcactgtgatggtagatgaatagagacgtatctgatttagcctcaacaaagccaagtgacaggagaaagctggcaaatcggctgtaccatgcccggggggcctgcttgacgccgtagagagacttgttgaggcgccacaccaagtcgggtttggttgggtcaacaaatcaagagacggcccagctggcgaggccggcccagtcggtgcgccgaccgaccgagcaagagaggacggcccaacaggcgaggctggctcagtcggcgcgccggccggccgagtagaggaggctgccccccaccccggagtggtaggtttgtcggactcgcaggccgccggaccagaacggggaaggcgggagcgatgtccaataggcgccggaataggagctgtaaaatcctccaaaaactccaaatcaatagcaatctcattattagtcatttcggctaacggaaaggacgtctcatcaaacaccacatgttgtgagatgataaccctgtcagtggcaaggtctaaacactgataccctttatggtggaggcgatagccgaggaacacacgcggaatggatcgtggggctagcttgtggggggcggtgacggacaggttggggtaacacttacagccaaacacgcgaaggtgggaataggatgggtgggcaccgcagagggcaaaaaagggtgtgcggtgttgtagattcttagttgggtggcggttgatgaggtgggtggcggtgtgaagggcctcaacccagtattgtgcgggaaggttggcttgaaaaagaaaggagcgcgtgatgttgttcagggaatgaagcatacgctcggccttaccgttctgtggggaggtgtgggggcaagacatccgcaaggagaccccgttggtgaggaagaaggagcgggcggaggagttgtcaaactccctaccgttgtcacactagatgctgtgaatggtcgtggcgaattgggtcttcacaaaggcaaaaaaatgagatagtgtagaaaatgtatcggatttaaagcgaagtgggaaggtccacacataatgcgagcaatcatcgagaatgacaagataatatttaaatcccgacacactaggaataggtgatgtccacaaatcacaatgcactaaatcaaagtttgccttggcccaactagtactagtggggaagggaagacacacatgacgacctaattggcaagtataacataaagaggtggtgactctgggtggtgggatgacagacgcctgtgcgaagcgaatgagagcctcatgaccaaattggccaagacgacaatgccaaaggtcaatgttggtggaggtagtgacaaaggcacgtgcagaggccgccgaagagtacgcatctgccgggagaggatagaggtcaccggaactattgcacctgacgatctcggccttggttgggtaatccttcacagagaggccaaaagggtcaagttcaacggatcaccaattatcacgagaaaaacggcatgcggaaataaggctcttaataatctcaggggaaatgagaacattgttaaggacaaaggaatgattagggtaatgtaaaaaggcacgaccaatagaggtaatagggagaagggagccattgccaacaataatatgagagggagtattgcgggtggagctttgggaggtggtgagggtaccggtgttagacatcatatcagaggaaccacctgagtccatgtaccatttggtggagggcggagtggtcaacgtcaccgtgttgtacgcgctggcgaggacccagtccactggaaaggggactgtgcttgtgctgca

SEQ ID NO: 26442 - DNA, 910 bp, Oryza sativa
atcacttgtgggtgatgagaccgtcacacactgcccacgctagtccctgggtgccgtcacggatcttgtcgcggagagcggacaggtcggtgtccatcgcgacttcctggcgcagatcggttaacacttggaaggacggcacagatatcgcactgagcgaagccgtggcgtcttcctgatcacgatgtgagagcgcgtctgccaccacgttcacccgccctggcctgaactccactgtaaaatcaaaccccattagcttgcttacccaatgatgttgcgggatggtgaagaggtgttggtcgagcaggaacttgaggctgtaggagttcgtccatacagtgaacgtgcgtccccacaaatatgcccgccaatggtgcaccgcctgcacgagaccgatgagctcgcgctcgtacacggcgagccctgcatgtcacggcgccagcggccggctgaagaacgcgagcggcccgacgccctggtgcaggatggcgccgatgccggagcccgaggtgtcgcactcgacaatgaatgccttggcgaagtccggcagctggagcacgggtgcagacgacaacgctgtcttgagtgcgacgaaagccgcgtcggccgctggtcaccagcggaatgcctcacgcttaagccgcgccatagtcacgtttgaacttgcagtagtagccggcgagaccgaggaagccacggaccgcacgcaccgagcgcggcggaggccagttttccaccgcctggatcttctgttcatccatcgccactccctcagcagacacgacatggcccaggtagtgcacggtgcgttcgccaaatcgacacttggagcgcttgagcaccagcttgttgtcgcggacgacgtgaaggacggcgcggatatgttgcagatgctccgaccacgttgagc

SEQ ID NO: 26443 - DNA, 633 bp, Oryza sativa
gtacacacatttatctatcacgcatgcatgtatacctatatatatcttgtatgtatatacctgtaactataccttgctatacggtgcacggctgcacgctcacacacatacatattgctggtacacacatattattagtacatacagtatatgataatatagctagccaatctataataactaataatctctcaacaaatctcactcacatcgatcacacaagaagccaaaggcaatgcaaaagccatgatgcatatgcataaaaatggagtatagctaaattaacccaccaccctctgtcatcacactcgcgcatcggcgcatgcatgtatgtatctatgtatgtatgtatgtatgtatgtatgtatcagtacttccagatggtagcgtccatgttgcatgccaccgacgagatgtcggcggcgttgttctggtcggcagcatcctgcggcgacaccaccagcgacgacggctcgctcaccacgaagcctccggcggccatgtccatctgctgctgctgctgctgctgctgctgctggtagtacatcgacgggttcccaacaaactgctgggcgccgccgttgatctgaagcgggaagccaggtagagtggagtaggaaggcggaggcggag

SEQ ID NO: 26444 - DNA, 1922 bp, Oryza sativa
gtccctttgatccactcctatgaataaatggcagtttttttttttcttattgttatttagttcttgacatttccttgtccctcgttttcagctgatttcagcgattgataggcactgacactgtacagagcatccaataaaattcatatcagtgaagcagccaaatgttgtcaaattcaagataaaaccaggtatttcttactagatcatcatcgttagcaattatcatctagattctgaagttcttgcttgtatcttcatataattatcaaggacattgtgtaatattacattacgaaggccacatcatatgaataaaccaaaataatggttaacatgttgtgtaacatataggcgtactatatggctgagtgtagaataagtaactttcgagtttgatctattttttgttggtcatgtaaatcaaaatatccttggtttaaacttttcaggttcagattctggtgcttctgacagcagggcaaaaagaatttcttccttcttgtttcacccatttttccctctcgcactttctattcagcagacatatatgcagccaactgttgtcaatttacatttcaggagatagaaagatattgccgttccctcaattgtatttgtaacagttatgagcggtgcacagctcagtaaaaattttgcccgcctgtagtaggatgttttatcggcaaagatcttattataggcaaaggaaaaatgtggttttaggttctccctttgattatgctggaatgtacattttgtaggaatatggctgtctgaaggcaaatgtggttcatctaaaaaaaaggaaggtaaaatagagtgaacaaaatgagcttttattttgaattcattacgctgtctttccctcctgatccccaagtctttcccaggggcctagctcaatttgtcactgtacatagatcgtccatcttgcaacatggcttgtaggggtggcaatttccctgttggggtcagggacgggcgggggagaattctcacccacgtgtgagtggggacaaggccctgcaaaatttcggggatggggcagggatcggaattaacttgctggtgacctggaggggctcttgatgtgagttacttttctaaaaagctacccattgcaataatatagacccaacaatctcattcaaaattgacatataaaaactcaacgccttagttcccctcaactgtaatctttttcgttccatcaaccaatccacactgtcgggggctattgaaattttatcatactattattcaatgtattgcaatatttttatggagcgttaactccatccaggtaatgcggggccccggtcacccgccgggtcccctgtggaggcggggatgggtgatgtttttcacccgacttccattccggggccaggggcaggggcattccaagtttccaacccaacccagccccctgttgctacccctaatggcttgaaagtgttactattaaattagttagttggtttgatgcgatcatgatcattgactcagagataaacatcagtagttgtttatctaaggggtgtggactctggattatgggcttctgcagttaaccatttatttagtccaggaaaccccagcccttgacgatagatccgtctgtgttgagtgagtacttttgttaggtgggctcaaaggagagtaattatataagacttccagggatgtgataaaggacatcgaatgagcattatgaactatcaaactatccccaaactcgtctctctactgcttcttcctctcgagtttttttcctgttcttccacccctaaactcttgatttcttctctcaagctcccaatctagcttggcgtgacaccggcatatcgtgggttcttgacacttggatagcttgatggagttggaccatctatcaattatgatgatagtagtgaacc

SEQ ID NO: 26445 - DNA, 1855 bp, Oryza sativa
cctccccttcctcttctcctcccctctccttcctcctcctcccctctactccgtcttccatcagccggccggcggccggcggcggcagcgcgtggggaggcgggcggttggcgtggggaggcgggcggctcggccgcgtgcgtggaggcgggcggcggcgcgcggggaggcgggcggcggcgtggcgcggccgcgcgtgggcaggcggccgacgtgcgccagcggcggccgcggccgggcgccggctcattttttttaataatttgtggatgtataattttttagattttttgattcattgcatcgcatggatctaagatgtataatttgtataatctgtgatgtatttaatttgtgtgtagttttttaggatttgtgatatagttgatctgtgtgtaggatttgtgatgtatttgatttgtgtgtataagtaactttaatatttgggatgttgatttggggatgtgcatcccattagattcgggagaaaatatatagattaacactagccattagcaaaatcaacaacaaaataaaataaaaaaaatctcgaggaactgtcgtgaactgtcgcttcccaacaccaaccgggactaaagatcgatctttagtccgggttatttgaaccaggactaaagataacgatctttagtcccggattcgtagttccggtaggaaaaccgggactacaaagggttctaaaccgggagtaaagaatatttctccaccggtgcccccttggatgtgaatagcaaaaatgagttactagacaatgaagacgcaccgtagcccggaggcctttgctgtggatgcttggtgcacgtctagcaacatgcacacatgcttcagagttgtcgtccttaagctagccaatgctccaatagcggcgctattaagccagccaatggcccatcaaggctttcacccgcgttttctcattcagtcccacacaactaatccacacaaggagcatgactgttaccgaccaccacactgtacatccaacgtccagcatgggttcatagggttgctcttgttcatcgccatcccttcatgtgcaagccactgcctccaccctcacactggagcttcccataatcaaatctagaagcagactggctataaaaaggtgaggagctccatgcactacaccatgtcctaaaattcccgtctgactttggttgggaaagatgcatgtataccgattaacggtcggtcggtataacttttcgacgaacggacagttgggaattctaattttattagcgaactgtcggtcggtaattatgtaactttttactgataaactgtcggttggtaataataaactttataaaaagagacagtcggtcgataaaaatataacgatatctcgtcggtcggtaataggctaatagccggtggaggaatttagggagccaaaattttcgcctctgcttggccggcacgcgcgcgcggttgcggtggaaaattttgcggcattaatttttttcggcattatttgcaccaaaccctatctatccctttgatccatcgcctgtgtcccctccgccactccatcgcgcgcggaggccaagcgcctccggcgccgccgccgcttcctcccggcggtgctgcctccaggcgccaccgacgcttcctccccacggcgctgccccaggtgccgcctcttcctccccacgctgcgccgcccttcttcgtgccaccgccgccgcctctccgcttcgcagcgccggcgccgactccacctcaatacgccatcaccagtcgccctagcccccacgtccaccttcacagccgccctagccccttcctccgccacccgcaccagccaccctagcccccagtcccccac

SEQ ID NO: 26446 - DNA, 6155 bp, Oryza sativa
ctgaacaaatgcatgcaacagttgtaccactttgtatggcaagcgagaacactgaatattttctcattggaccatggtagtgccaggtacgaaaagtagacacttatgaactcaatatccccttgaatgtcatctagcttcctacctgtggtgctgtatgcatcgatcttaggttccctgttgatcgtttccaatatcttgtatactgcagcctggcctcctgcaaactctctcatgcttggagatgcctgacctgaagctctggtgaatgcaacagtaaagtttcagcttctggaactaataagtagttactgttagtttaattgaaaagaaatatcatatacaatcatggaaaacatacaatagcacataccgactgtagtagctaattcattgactattgaaaactcatatactgaaattgtctgataaggttctttttgaaggaaaaagagatgagaagaagcaattttttaataaaagaagacgctatgaaaatacaattgacgtaaatccaaaaggcctgtgttgcattattgcctttgtcgaatgagataattcaacttttgtgacagtgaattggtattgtgttgacaccaaaatataaagtggatatgctcttagtttgttgctgctaactgaacaatcccttattagcaggatgttcacgaaaacaaaatatacgtgcacacagttggtttagcaggatgttaacgaaaacaatcccttattactgtcaagtgtcaaacagcagctaacttaccttttttttgtcctggccgaacatgtctaaatcagcacaaaatcaaaatactccaatgggtaaagaccattttatcagtcaccaaataactaactgaaaattctatgatgatattatttttttcaatcctaaaaacttttatactcataatatttcttacaaggaaaccatttgtcaatcacgagaacaatgcaactgaattgattaggaggatggccgagaaacttacagcaagccgatgagcacgacgaatatgacattcatcacttgtgctccggtgcatgtatatcccttctccaggatcagcttggcatcataagaaatccccagggagtagccacagaagaggagcactatgaccgtgcccatggccatgccggctgcgacgttctccggaacgttggagctgtacgtgctcttcatgacgcaacctgcatttgtcggaccgaatgttcagagacatggcgacatgtacacaaagttaactgaagggaagactgaatgtttactgttctgctgcgcgaaggccactgcgaagctgctcaggaatgtgacaagaagatggacaaaattaccgatcttgtcacacattctcaagacgaccgacgacctcaccggtgtcatcgtcgtcacctcccaaccggatcggaatcacaagcccatatcgtccccgtcactgccccaccgcttgccgccgtctccgcaccatctagacacaggcagagaaatccacctaggagaaagacgagagggaaagaagaggcgaggggacaaagaggagacgacaacctgtcaagcgagaaggagagatctttcttttagacaacggcagcgatttcgtggcggcgttgtggtggccggtggagtggaagaggaagaagcggcgccagcaagagaaaccgacgagaaatccgcgcggggaagacgagacggggcgcgggctcgagccgaggtcgtcgtgacttgtgtcgcatcaggtgctgctgcgtgcacgccacctcttctctcgtttccttcttcactaagccacagacccggccactccgatggcggcgtgcggcttgatccctagtcaaacagtacaagcaaaaacttaaactcccttatattctgtagcagtagctatctacaaataattaaacctctctattgcaacggggttagtatcaagtatcacaagtatgtttgtcacccatgagtcatgactagtgtcatgttgtgttaccattaagcccattttgaactatggattttaccgaaagctgtaaaattccaagggaaatgtatgtatgcaataatgcaagtgcgagtatgcaacacacctgcggagtgtacttcatatgcttcagttttggaagggtcccaaaaaagcattccttgttgggtcatggacgcagccttattccctccagagaactttgacattgatcctagtatcctacggcccaaaaagccacatgaccaaactgcccctccccccagcacgatgaccgtcaccgacccccttaactaactccccagtgtacctccacgccgtgggagctgagctgatctgatgatcccttctcacttccaagtactacacgaatgtaacaacttgatgtgacctcagttcttctcccatctcctcttctccccacctcgcgcgcgccgccctgcccagatgtttctccactccctcttgatgcaaaacatggccaagaacacaacaacgcagcagcagcagacgacgaggtacgcagttaggcgcaccttgcatgtggcatgatgatgattgcttcggttctacgtgtttggctgacgtgatggttccatgcgcaggtcgtcgaaagaggcgggcggcggcgccgcggcgaggtcgagaggggtgtcgtcgaagaagtcgccgtggtaccagcgggcggttgaggtgttgctgctgatatggaagcagccgacgggggcggggacggggacggggacgacgacgaaggccgcggcggcggcgggggtgacgggcgggaaggcggcggcgtcggggatgggggctcggctgaggaagtcgtcgtcgctgaacgtggcggcgttgttcacgcgggtctgcctgtgcgcgcccatctcgatgtacaacgagcaggcgctctacttccaggcgggcgacgtgacgccacaccggagctacagctacccgcgggcgtcctcggcgtcggcgtccgggtgcggcggaggcggaaacagcaacccgctggtggcaccgccgcccgcggccgagcagagggcgctgatgaggacgcctggccccggcggggagagcgcgaggcggccggtgttccgcggcaagtcgctgacggacgacatcctgatgcggcggttcgtcgtcgacgaggaggccacgcggcggcgcaacgagatggaggtgatccggagccgccacgcggccgccgccaagcggcggcgcctcggccccagcccgctccgccggatggccctagcggaatcggagtcggaggccgacgacgatgaggaggagacgacgacgacggaagcagcggagccgacgtcacggtctcacggaggaaaccccaagccgtaccagtcgcagcgtaacacttctgggggtccctgtctcccctctcaattttttttccttcccttacacttcttctcccgttccttgtgctcttgtcgttgtctcgcaatgatgcaagaagaaaactccgagcaacacgcgcgttctcttcgactcttccatatcgaccgatgcggacgtcccgcccagcccagcgcccgccccgcacgcaaaagtacgcgcgcgtcgtggagaaacccggcgaaaccgacgtgtttcccccgcgcggcgtatgattagggatcgagcaatatatcactagctctatccattcatctgctctactagctatatgctatacaccaggaaaccggccggatatccatggctagctagctgcatatgcatgcatgtatcatgtgcgcgcgcgtagtatacgtatatgtgcatatgcgttttcttttgtagaaaagtaattataaaatataagcacgatgcatgtactggtgtccgcatatctggaaaaggtagctatacatgaaacaaaataactaacgatgatatagatatatagatagagatagagatagatagatagtcatgacgtgtacaagcatatgtataagtatatatacatgtatgccgcatgcaatggcaacttggtgggttcgatcaaattaaaatgaagacaaattagctaattagaaatgctacttaattaattaattgccatgcatggctgtagaaatcaagtgatacgcactattagaaaaagcattatcgcaagcggccaaaaagggtcttcgcaagcggggcggccgtccgcctgtaaacaaacgactatgaagatcgccggtcttctcatgcggagcggccgtccgcctgcgaagataattttcgcaggcggattttcgcaggcggacattggctagtccggttcgcctgcgaaaatagaaagcggccgcctgcaaaaaaaaatagccgcctgcgaaaataggtaggaaattttgaaatttaataataatttgtccgttaatagaaattcttgtaggtagattattatgtacatatattggaagattatcaagcatttggtattgagaaatctacatatattgtataactcaaaagtgttaccaaaatatatatattacaatattttttacattgtgacttcaaatacgccatctagtcatattatggcatagcagtgttccactccagaagatccttgaattcgtcacttgtcgctagggcaccatctgggtcgaagaaatctcctttcacatgacagcactcagagtggatgaagtggcacagatcatgctggacatttgtgatgcctgtatcgtcaaagcttgttcgacgttctaatcttggcaactgcatgcattgaagataaacaatatattaatatcataaacatgtgaagcggtctagtacatagtatagagacttacatcctctgcgttaaccctatacctcccattaaccctaaggaattcccacgcgtaatactcgcagaggacagttcctctaggttgcttgtgacacttcaggacatatcatagaaaaaaaaagataaattttgcaattagtgaaacaattggaatacattaagtgagtgtagtattaccggccaataggtacgtactagcagctcctctcttattcgggtctgttctccacccttgaacttgtagtattggtacacactgtatggatgtcgtaccatttcacattaagaaggatacttatttataatacattcatataaaaatgcaagaatcataatcacttactactgtaagattgttagaaattctttgtatgactggtgtttgtaatcgagagggtccaagactaccacggttccgtctttagggtggatgagtaaacagatataatgatcgctacatattaacaacagcatagttagttagtaccagctaaaataagacatatgtgtagaagataaatgtaccggacttactcaaaattatgagcggccatgacgactctcttattttgaaagtgcaagaaggctcgttcaatgtactgtgcgacagtaatcaacttctccttgtgcaggcccttctgatattcagctatctcttttggagtcttgcccttcagctggtctgaccctggtgctagcctcacggtatgctgtgtttgacagatctgagttggatccaagaagccaataggttcttttttcttcttagcatccatgttttgcatcctacagaagaagtttgttagtaacaatcacatgaatttgtattgtacatatttttcatgtaattaattaaaactcatactcacatgcaccaaacaccgacatagttgacgtccatcttatcccgacgatatatggcgtggagatctgacaaatctagccatatgtaaccttcggcactgaaacaatctgccgatgatcgagctgttatattgcccaagcctttcttgttggcttccatgtagaaggtttgtaatcttctcatctcctatggtccttcgtttagtgcccaatccggcaagagtgctttcccgtgttcgtacttttccgggcaatcatcagttagccagtatgttggcccggctagttcagcggccttctgggggtcatcatctttgtgtttggcacgttccttaccccctctgaagacggttaccatgaacttctccttgttctcatatttggacttgtagtcgtggctcctaagcactctaggcacctcagaactggtagtggccttctcagggaccggggtctcttgcacctcggggtctttcgcaggagaagggtcttcaaatatttctggctctgtaccgtcccat

SEQ ID NO: 26447 - DNA, 14466 bp, Oryza sativa
ggatgatttgggatgttgagatgtgtggatttgggatgtttgagatattggttgttgctgtggatgatttgggatgttgagatgtgtgatcgatatgtgatgagtgatgtgtgaacacaaatctatgatatttggcgccagaaaagaaaaaaagaaaaaaaataacttttgtaccggttggtaccatcaaccgggagtaaagattctaaatctttagtctcggttggtgttacgaaccggaactaaagatatatttttagtcccggttatttcaatcaggactaaaaatagacatttttagtcccggattcgtagtcccggttgggaaaccgggactatagggggttcccaaccgggactaaaaagcgattctccagtagtggggggtcatccggtatcgatagttgagggtaaaagatgtctgatttttagagggtaattcgtactcactcaatagtttagggtgtgattcggactttagacttttccctttttatttttatgggtgcgaaaaaaaccgaaaaaatattttgtatattactaggcaatacatggttacacttctattctcacaacacacaaaattataacaccatttttatgcgctcgggattacaagtgtttaaatccgagatctctgcatccaaagcttacttaccatctcacctagtaacaatcgttgtttttaagcaaatactatcattcaaaacttataataaacatcatagataacttcgaatgaaaaatttgtcaactataaaattgtaggtctcattaagatcgacaattttcatataaatgttatctttgtccgagattgtttagaaatattaaaaattcacttatcccaatagatctgagaacttataacacaatttcagacatccagacaacctcaaataaaaaaaatttcagacatccagacaacctcaaataaaaaatttatgaactacaacgttgtagttttcattgagctctataaatttcatgtaaaatatattttatatgacttgatacgaaaactttaggtaaaaacacatgtataggagcgatgtaatcatatgtaccggtttaccactcataggtgccgtttttattaagaaacggtatatttgtgatgcctatatgtgccattccataataaaaactgcaccaattaggccgtactagaagataccggttattataagaaccagtacatatgtgatgtctattagcgccggtttattataaaattcagcacgtatgaagactattggtatcgggttttttaataaaccaatactattgagtagttatagatatcggttgttaattttatcctgtcgaaaggtagaaaacgcatcataaaacacactaacgaaaatcgagctaaaatttgtatcccatgtatccgattatcacgtttaaacgaggactagtgacgaagttgccgagacagttcgtcgggcgtgcactacaccagtccgtacacgttcagacgttctccacgccatgcgccccaacagagatctggccggttgcgtaccgactcgttgagttggccacgtagttgacacttgggctgtgtttagttcagcgaaaagtttagattttggttgaaattgaagatgatgtgactgaaaagttgtgtctatgatagattgatgtgatggaaaatggctgaagtttggatccaaactttggatctaaatgttggatagtatagggagaggtatacttcgtaacgtgggacacattgtattgagcctcgggggccggtatatataggagtacatgggaaggagataaggaaggattacagatatggaagaaatccaaacaaaccaatcatatcctaatatgactctaactaccatatactctaacatcccccgcagtccaagcgtgagcagcgcagacacttcgactgtagaagaaaccggcaagagtgctcaatacggatgatagcactttgtgccattgtcgacgtagccaaagcgaaggagccgagagagccgtggtcgatgaagccgtgcgtagagtagccgtggtcgatgtagccgaagtcaggaagctgatgtcgagatagccgagccacagggagcacatgaggcgccgtagagtggttgtggacgcacaggagggcgtcgtggaccaatggcgcgcgaagacgtgctagagacgaagacggtgacacaatcgcggcgatcgtggaggaagatgacgccgaagagctgatgtagtagaaccgtgaaggacgagacgtcacaccgggtttaccagacccggggacaactcgggacgaacgcgcgcaatggtgttgccaataccgcgcggacgaggtaggggaccaccatgaaccatacgccaatattggaggagactagcaaagaaggcctccgagacggtcgcggcgcaagaacggcgtagagggagaattgccggagcagcacgcggttgccgaagaagatcgaagtgtagtcgaggaagatacggcgatactggcgatgagacatgttggacgaagaagaagacgatgtagcgggaccaacggcctggacggcaacgttggaagctatgtagaggtagctggaccaccggccaagagtggctacggtggcaacttggagatgcggcggcgatgctcgaagtagaggaagaagaccctgagcggctgacgatgaccagtgcggacgacgaggatgtcgatgcgcaggcgacgatgatgacgacgagagcggcgaaactgcggtccgagaggacaatacagctacagctccatgtcgatgcagcgacgagaagtccaccgatgatgtagctatgctgagaggagggcacctctcagcactgcaacaaccagtggaggtgtggaccataggcagcggcactgtggcccaagagggcgacgcagcggcaaccataagcttgatggcgtagacgcgtgctcgatgacgatcggttgcagaagtcgttgttgccgggcgcctgaacgggtgatcaagccgaagatgcgtcgggctaaacgatgaagtcgaagtagagtcgatgccgatgtcggagacgcgtagatgtcgatgaggcagtgggcgacgcaaacccgttctctgaacgggaagaaaagagacaagcagcaggaaagcacagtaaccagcccaaagtgctcaatgctccatagaccaagtccattgccatagactaagtccacggacactcttaccccttctatccctgctccttatccagaagaactgaagcagagtgagacaaagcaaagaggagcatggacggctggtccatagcggcgaatttttttgagaattaatattatttttatggaaaatcgcaaaagtagtggccaaccggggaaaatcgcgaaagtaggtccctgtcgaacgggtgcaattcgatagggcacctatcgaacgacgagcagtcgatagagccctgtcgaacggctggcgttcgacacggtcacctgtcgaacggagggagttcgacagggcccaccaccccgcgccgccaggcctgtcgaaccgggggcgttcgacaggtccctccaccgaccctgtcgaacaatgggcgttcgacaggccggtttaaagccccgtccccccagcccgtgatgcttgttcgatttgtttgaggaccacatcgccagccgccgccgagagtcgccacatcgtcgccgtgagcgccggagggagcgagggtaggggatagcaggccggagaggaggccgaggaggcgccggccgggaggaaagggttggcgacgccctccagcagtgaagttaaggtatacattagtaatccctaagtacaatgcatatgaaagtttaataaaaaattggtttaagagttgttaattgtttcgcattgttcgatgttagtatgtatggttagcatacatttgttattgctaaatgttggtagaggtatttaagtaattgtacggttaaattagttcttagttagtacatattattgatatgttgtgtgttaaaatatgtacaaaggtgttatattttatttggattattaaactagttgtttgttactaatagttgtaaattagtacacggcaatgtagtataagttgtaatagggtaattatcgaatgattaaatgattaaacgtgagactatttgtcatgttttatcaggatgtcaggtgatatgcccattcgtctgtattatggcgatgctcctatacaaatatgtgatagcggggtggatttgactgtatatgccttccatgatactagtctgaatgcaccggagcatatgggtttgaacgacgtgttagggtggttgtataatatgtttggggtagatccagtgcacgataaatttgtcataaatgccgtgtggccagtgaggggtcaacatggatggcagtggagagtagtggaggttgcgtcaactaggagttggaggaagtttgttagtaaagtaagggagaaaggctatagcctggcaatagtggtgcagaagacaacatgtgttgatcgatcgggggagtcaagtcatgccgtggtggaagaaactccgttggaaggtggacaagctgaaaatgtttggcggactgagcaaggtcgaggggaagaagtagtagagggtaatacacaaggagaggtcattgttcgtggtactaatcgtgaggccaacgactcggacgatgaagaaccggattcgcctatgcgtgttgatgcagcggaggagaatgaggcggtagtggatcagatggaagtggaaaacgaggaatacattgcgcttgtagtggaaggagaagatacaacactgtgggacaacgaaactaacatacccgatgattggacgaccatatcaatgagtcgtatgaaggtaaacgatggtttagatgcccactggtgttatgatagtaagcaggtgaaagttggacagatgtttcatgacaaaggtcacttacaagatgcggtgaagaggtgggcatttgtccagaagcgtgagttcagggtgaaggtttcaaataggacgacgtatgacgtgaagtgcatacagggtggatgtccttggagagtgcatggttacaagccacaacatgacactttatgggtagcttcgagggttgagcaacatacgtgtttgttggagaatacccgtctggtgcacagaaacctgacagcggcatttgtggcacaaatggtatattcaaaggtggttagaaaaacatctttgtcccctttcaccataatgcatgacgttgagaaagagtacggatatgagatatcgtacgacaaggcttggagggcaaaacagaaagcattggagatgaggtttgaaacttatgaggattcttatcacaatcttcccccactattggaggtgatgcaggcaagaaacccaggcacacacatggctattctcgatgaggtgaatgaatatggggagaatgttcttcgtcgggctttctggtcatttgggtgcatgatagaggcctttaaaaattgcattcctttgctctgtgttgatggcactttcatgacaggcaagtacagaggaacaattctaaccgcgatcggagtcaacgcggatagccatgtcgttcatgttgcttttgcatttgttgaaaggagaacacatcaagctgggtatggtttttgcggcacattaaaatgtgtgttgttgaaaacagaccaaatgtgtgtgttctgcatgaccgacacgccggtttggtatcagcgatacagaagctttgagaagatgtcgaacagtcccggctatggtcagaggtacatagaaaatggagcatgcgagattgtggggctaatctttatagacaattcaggcgaaaaagattgatggacctgttcaagaagttatgcttggagaatcaacaaagaaaggttgatggcatatgggagcacctggatccgttggacacttcacacattggatgggctaggaaaaaacccatagttgccagacaggaggagccggagggacttgaacccattcctaatgaagcaccaagtattactcggcgcaggaagcgtggaagggccacgaagtgcttcacggagtgggtagaatttgagccaagggagaaatggtcgttgttgtacgatacagatggatcgaggtatggtgtgatgacaacaaatcttgctgaagtgtataactggtttatgaagaatacacgacctctaccacttgttgctatcctggagggcatcacgaggggtacacagaagtatctctgtaaaaggtattccatggctagtctgaacctcagcaaacccagtgttaagtatagccccgctattacacagtacatggatgagaaaagtaagaagggaggaatccacagagtgtggcctgctgggaatagagagttgttatttgagatacgatttcgtgacaagagtggtgtcggtattgggactactgacatcacattggaatgcacgttgtggccagagtatcacgcttgctaatgcaattgcaacaagccttacctgttacatcggccatgttcccatgttctttgctgtttcgcaaaagggggtgttgatggaaacatttttgtttctccctactttagaaaggaatcgtgggaggcaacttggcgtggtgaattgcgtggttggcgtgccgtgtgtgatttcactcgtcctcctccagggcaagccaattgggttcctgactcaaatttattagttgatactaagggtcgtcgccagtcgcgcaggatcaagaaccttatggatgaagctgaagtgaaagatcgttctcgtcgtaagaaagcttgcattctttgcggggagaaccattcccgtaaagattgcagcatgtacaatgtagggcaagatgccacaggcgctgatgttcgtcgcgttccaaaggggaagtcgaagaagaaaaataatccttagttcgctattatccttggtggactccctactttgaagatcgttatcgttcaatttatgtttagtgcgtctgtaattttaatttgaactttcttgcacttttattacccgaatctatttgtaatggccttgtaattttcattttgaactgcactgcacttttaatatcgccatgtatttggattgggattggtatttaaatttcgaactgcactgcacttgtaatatcataatatatgtgtcgtgggcttgtaattttaaattgaaatgtactgaactgctcttatcttgatctatgtgtgctggtactgtaattgtaaattgaaatggcatgcaaatgtgttatttgaattatgttgcatacatttattgtactgttaccatacgtgcattgtactaatgtggttttcgatctgcaggtatggctgatcaaaatgatgggcagctgatagacaaggagatcgataggaaccatcgatcgcgacgtcttagtacaggaactttctgcaatgtgctaaagatgcgaggaccggatcaatattggcatattgatcctcgttgggttccaaggtgtgtgaaaatatattgtttttactaatacaaggtgtttatattttcatgtattaataacttgcgctctgtcatgttgtaggctgagagcagctgggttattgacgtttgcacggttggtcgagccttcacgtgcaaggtccgaacgaatccacattgacgcggcgcttatgagtgctcttgtcgatagatggaggcctgagacccacactttccacctcacagttggagagatggtgcccactctgcaggatgtgtcttatttgttggggctgccgatagctaggccagcagttggcccaacaatggtgaatgctggatgggcggatgaccttctggccagttttggtggtgtgctgcctgttgcactggaggatctcacagatgggcacgggcctacgaaaagttggttgaatcagtttcgacaggatgtcttccctgatgaccaggaggagtggatcgtgcagcggcacttagtcgcttacctgttgtggttgtttggatgggtgatgttcacgggaactcacgctgactccgtggacaagcacttcatccactttgcggagcagattgcagagttacctattgcggagattccacagtacagttgggggtcggcggtacttgcggcgacatatgccggactgtgtgatgcttgcgtgaggaacagcaagcaaagttcactccctggatgcccgttgctacttatgttgtgggcgcacgagcgcttcgacattgggaggcctcagcttgactcgtacgcaaactacggtttgcgagagatgtacaggtctggtgttgatgacatcgacgatcgtcccactatgggatccttgtggacacaccgtgaggtaatttttgttaaattcgtttatgttatcattatgaatactagttcacaaactttccttatatgactaatgaaaactactacttgttacagccgcagtgggttagcgggacgacacgtcgtgtctacactcagtttgtagctgactttgatcagcttacgcctgaccgtgttcggtggactccctacactcagcacgatgtcaatgatcgtgcaccgcacggtctcgcggatctttgcacgcgagatatgcaactctggaggacgacttgtcaccttgtggtggacgtgcacgtcgagccacacaatgtccacagggttctcaaacagttgggcatgtatcaggacttccctccgagagatggtcgtcctttggctgatagtcttcataggttagttcacatcacagttgtttaatcctacattttttaaaataaatcattgcacaacattttttctgatgtgtgaatttgttgttgtgcaggtactccagaaaggggctcgggctttcctacgagctagttattgtgaccacggttcagccgacgatacaagagtgggagcacgcagctgataacttggcacttcagacacctccagacgatgggagttattatggagcttaccttcgttggtaccgcagtgttacacgatggaggtgttttcctccacaaggagatagcaccgtcccccaccaggcagcgattactgacacgtttgcccctcagcctagatcagcttacaactcaatggtacgtgtttatttgtggaatttgagcaactagttcaatatttttaaaaagttagcaagtagttcagtatgtctaataaatgtgcaattggttcacctagttccttttcttacataaatgtggaactagttcagtatttataaatgatgtgcaactggttcattatttctaacaaatgtgcatcttgttaaatactcttaataaatgtgcaactggttaaataattttaattgccttgattatttgtggaacaggcggaatttgttgagcacgttcacgtggagtccgacaccctgctgcaaagactagaggcgagacctccagtcgtcaggcctgacgacgtggcgagtgtccttcgcaacttccgtgcacgtgctgccgcactactacgtcgtgtctcctgtcggagcgcggcagatgtggtgcagacgtcgggccgacggccatcaccaccactaccccgacgttccagcgtggatcggagtggtccatcctcttcacgtcgcgggtacgaagcggcccacacatctcacggtcatccttcctttcagcacaccccaacaccggagtacaccagggggtcagccggatcaggggtacccacgtcgagcacggcaccaccacgtccgcaggtattccaaactccgccttatgttcacccctcacagggagtatctgggtcggcacacttcccttacatgccaacgggggacaacgtgttgaacacaccagcatggggacttcatatcactccgcgtgcgccagagcagggccacacacagcacacatgtaagtcattttaaacaataacacgttttagtttctaattatatgtatcgttactaactacgccatattttttggtttctccctcttgtacaaacagacgatgagtacggttcggcgtcgacgcatcacggagtgcctgcttactcccctcgcacagcattcattgaggacttcttttccactgatcctccccagggggaagtagggatggattactggcacgcagcacctcaggtcacacagccgacgcaggagacggaggccggtcaggggccagacgtgacaccacagcaggcagctagagataggcaccccctgataatttgacatatcccactgagcagattaggcgtaggaagaagggaggacctagcaagcgtgcgaagggcactgatcgtccttgacttatctatttgtattaaacttttagtcatttatgttctgtccgtactatttgagaaacactttacgattaacttagtactatcagtactatttcataaacttcttcggataattactcagtagcatacccttcgaatgaatcatgacaaattatcattcaaatatacaaataatgaaactaaataattcaaatattttaaccaacaaataaatactacaatttctgaccaaacattatcataatatatgtcacatacatataacattacaaaaatattttcctttcttacacactaaaataaattacatattattaaaaaaaataacttattacaaataaatggagaacacgaccctgtcgaactgctgtcgaactgcggcagttcgacagcccagcctgtcgaacgggggctgttcgacagccctgcctgtcgaacgggggctgttcgacaggtcctgtcgaacggcagccttccgatctcctcgccagtcgcgctctggccgttcgataggcgccctatcgaactgcacccgttcgacagggacctattttcgcgattttccccggttgaccactacttttgcgattttccataaaaataatattaattctcaaaaaaattccatagcggccatcccccgatggcagtagagtccagatgacgcatccacgagcgcaggcctgcggcgcgggccggcagtgtggggagcacaccggtggagtcggtagccggcggtgggcgcaagtggtggagaagagccctccccgtcaatggcgtcggcacagccaccagatgccggcggggaggtagcagccggcagcgaccagcagcgccggcggggcgacgatgttggtgacggaggccgcgtccccccggcagcggcagaaggagagcgtcgtggccggctggcagcttgccaggcggtcacgaaggcgggccggcgtggacggggtaagtggaggcggtgacggccttagagccgaagggcgtcagggggcgccggcgacggggaccacggcagcgcggaagacagcaacaccggtgggtggcctaacggtgacccgcgagtgctggcgacggagccgcgacctcctcctccagatcccgtcaacaacgacaatggcaggtggccgtgtgttcctttactgctgcttgacgatgaagacaccaagacgtccaggagatcgatttctcgacaatagatgatgacgaagacggaccgcgcgagtggatcgggattgatcttctcggcggcgaactacgacgacgaaaaagaaaagaaaaaaacgggttggccgcccccgggagatcaaaacccccaggggtgacaagcggaagcttgagagaggcgactagggaagcttgagagaggcgactagatcgcccgctctgataccatgttggatagcatagggagaggtatactgcgtaacgtgggacacattgtattgagcctcgggggccgatatatataggagtacatgggaaggatataagaaaggattacagatatggaaggaatccaaacaaaccaatcatatcctaatatgactctaactgccatatactctaacactaaacacagccttggtagtcgcgctgatcactgatcagccaagctttatggtcgcatcccggggttcgtccgctgaaggctcaaggtcgcagaccaacaacagatggatccgcgagctccatgtggttctttgggatgcatgcgatcctgcagtatatgttgatttggctgatggttcgggccactatactgtcagaaggctagcctgagtgcctgattccttcctctggaagtgggatagctcaaggtcgtactccacttgctaagcctatcttgctctttcctctggtaggatccctttctagcacttgctgatctggaaatctttcgctctccctcggtgccgctactttctttggttggtcgctcaccgaccttgctggatgaccgaccatctggagaagcgtgacctcccgcacccaacccattgtgtcttttgcgactagagggattataaaagaacgaagggattaccttgattcacggtcttagctttagagtaaaataggtgagcagtgcctccgggctccagcgtcggtggcagcgaatgccgccgccacgttcaggactccacctcaacatcaagcacaccatatcaacctatgcctccgccagcatcagcttgccgccgatgcacgccgtcgtaacgacatcatcccagggacccttgagcgtcatcgctagggttccacatttcggactgaaatttttgaaattttggtaatttgggacccctctgatacgatattatttcagccggaattttcaattttttaattttttcgtgaattttggtaatatttgttcacatttgactaaattttgttccaaatttcaggatcgaaattttcaagattttaccatatcggagccgcccaatctctagaaccgatttcaaggaccaaactctagcttcctattgggccacgtggagccctctaaatttggcaataccccctccaggaatccgccacgtgtccatttggaggaaagagcctggacgtttcatcgtgaaatgaaaaaaaataataaacgaaagaaaaggtgcattggcgtgtacagccgagtcacccgtgcatgccatggggcatggtggtccagtgcggttgctacagcagcacttgcattgttgccttctcaagctaatggtgcacacaaagccaagcataaataggataaaggaaagtaaagaaataacaaagagaaaagtataaataattttgcaaaatttatctgaataaataaaatacattatggttaaaaccgaaaattgagtcatattgatatcctatatttctacaaaataaatattaagaaaactatatacagaaatatggtgaaagtttggatgaaaaatttgcaatactaagaaataatatttcttcgaatgtgcattttattattgataccatatgcacgattttttggttaataaaattgccacaattttgaggaaacgttacgttttttttctaatagcatctctaatcatttgtccaattattggcaaacactaattacatcatactttggtttttctcatttatctgggacaaacattaaattaaattccattcttctgggacaaacacaaaattagtttccattcttttgaaagattttttttatgggttaaactaacttgtgtaaacatatattacttcatcagttccaaagttccaaattactggtcattctcatatttcaatttttagatcatgatcccatatctccacctttcatcaatgccacatatatccagtaatcaaagttaacattactattactagaaagggtttgcgcgctacgccgcgcagcaaaaaaaattaaacagaaaatattacagaacgattaggtgattaatgcatatacatgtactccgtcagtgatcatttacattgattaataaacaatatactaatatacaggacaaataaagtagctgcctttttctagtgagaactcgtggctaccggaaatggtccatttataagttcatgtgcattcttctctcctgctagttcaatccacaacaaaagcacagcagtatgaatggcagctttggtcctgcaaacatgaaatggttatacttatgtcggacgatataatgcacataatagtttcgttataaagcagcaccgactgaagagtgggagcaccaaactaaatggatcaaacataaaagaagaatatatattatgaaatatagcgcagtctccagctcttatcagtcaaaataaataagtaaataaaagaatatataatatatagaaatatgtaagagcagcaggaaaatgattatccgtaggcatcgccatcgtttggaaagcctttgtgtcatattaaactctgaaaagtgctctagaatgacataagaccaacatcccgtgagctgtttgtttataaacaagttgcccgttaaaagagtaaactatgcctgacaaaaaaaatcatgctagctagctacttacagggaaaccaagatttgcaaccattaaaattaaaccaccatacatagtactccctccgtcccacaatataagagattttgagtttttgattgtaacgtttgaccactcgtcttattcaaattttttttgcaaatataaaaaacgaaaagttgtgcttaaa

SEQ ID NO: 26448 - DNA, 33842 bp, Oryza sativa
  unsure (1)..(33842): unsure at all n locations
aattgtagcttttgtcatcacctacacaaatatcacttcacttttatcagaagtaaagaacattcacaaccctcgcggcaacacctagccataatgtgggaccttattttaagaaaaaatgatataatagtcactaaccaaaactactgcaccaaaatcgaaagtagtcacaataagttggcaacaaagagccggctaggtagtgggcttaactctcttatgctgaatgtacgttaactgatgcttggtgcagtctattttccctgcacggagaagtaaagcgatagaaatgaaattgctatggatccagatgtgatactgaagaggcaaccatcttaaacatcaaaggggataataaaatattatctggaacttatgctaatcaggtgtgaatgatgctatgtaaatcctaaatggtaaatgtaatacgcactaaacaccttgtttcatctccaggaactatgtgtcctgtaactgaatctgtatatagcactgaaaagtaagtaagattcagaggccccgcaaaaaaagtaagattcagaggcaatgcaatggcctgaacaaaaaaggaaaactgcaataagctagtattggtcagcagcagcacatccacatgacagcaagcatgaggcagagcaaagcagtacagagcagaggaggaaatacatatggagggatggaggaggctcatttcctcaaggcgacggagttgtccatgaagcctgggataacacctgcacaatcaggcaatagcagaaaggggaggaattgataagaatagctacattgccataactggaaaaaagaagccgtcgacagactacctgccagcaaaattaaaggtggaagctaatcatttaattgctgcttcttggcaaactcctgaatccaataaccgtggtgctggtgtgtcaccctgctgcagccctattgatgcactaccattccgtggtctggaagaccagtgtgggtcttgcactggcaaaatgaagaaatataccagcaacaaggctttcattgaaagcaagactgccattttgtctcatgtgattcacctcagcttggatgcctgaaagtagtgtttgcaattttgaaacttatgtaatacaatcaacgtaggttgtatccattgtaaagaaagtcaacccggctttttctttatgaatgtaggaaacatgcatggacttaatgaaattccttttttatgctggttttagatgaatttgtgtttcactctgtttcagaacaaagaattgcatcacaacaggctaaatttgtttcgagcagtgcaagaacatgtttgcaggaataggaccatgaagattgttgttggcaagatttctatatgcaaaatttggtcaacaattgcacagaataaaaataaagcatacaatgtaattcttagacacgataaaatttcttatagttcaaaaagctcaagtttgccaagttcagctggaattcgagctttgcacaggcacagctcttttcatgattgttacagggaggagggttgtcagttgatgacaggaggtcaggattagttgctttggaggtgacaggctaatggtcgcatttgctttagcacatctacatctttaagtttctattgaaaattagacttgtgatggtgatgacaaattcaatttcccttaaagttattttgagactcctccagtctttccactattcattcataaaaaacataaaagattggcatgtggtaatccatggcaaatgattacaaaaccacagaacacatcaaccatgaaactcaaaagtacctgcggagctagtccataacctccatcaatttcttgttcgaagaaaagtagctgtagagaaatatttggcaattgagagaattataaataatattccaaaattcaaaagagatgcagaacataaaagcttcaattccagagcaaccgaaggaataatcaacctcatatcttaaatttactttgtgcggctgaggtgactctgactacaatgcctgaccgagcttgttcttcacttattgttacaccataaaaaaaagagcacatttcttgtcaacctataaatagaaaaatatatgtggtagccatcccattataaacaagatcataacactggtagtggcggaacctttcctgctgctgatgatccaactgggagcgatctcaatgtatctgttccacttatagcttcttcaagaacattcaagacaaaaggagaactggaaggataagaactgaacctttgttgctcgaccaaaatttttttgttgacctgaaccattgctgaaagaatagaacaggaaggagagaactgaatcctttctaattcttcattataccaagctgtcacagaccatgcgcagaggatgtcggacccggatgcttgaaggggacaggtttgacggagatctcaacggccaacttctgccaatccgcttcctccatcctcgcgggccgcccgcttcttccttctccaccggtcaaactgtcagatccggcgaggaattgagctgccgaccacggagcggcgccgtagatttgggtaggagggaagagtggagcggatgggcagagtggagggggccggaggaggtgctggcagaggacggcggtggccggaggacgacgactgtaggagacggataggagagagacgagcggagaaggctgccgccactgcaggtccctcgccgccgctgccagaaggggagggagaagaagggaggggacacggcgggtcggcggcaacaccaacgacgggcgccgcatctgtcctccctcgtcgcaaccgccgccgccggcgcaagtgaagggagaaggaggaagggagcacctgtgccggctccgacgggcgcctcgtccgtcctgcccccggcggcgctgccacaaggtgaggtaggagggagaggagagggagaaaaggggggagggaagacaacggcgtcggctcgaacgcgccatccgccccgacgccgccgtgagggaatgtcatatcggaggatattcagacttgagattaccgaagaaacagagcaatacgtatttgtaaaatgcgctttagcttatgaaaagcgtaaacaagggtgtggggttgatatgttgggcccagtgggcagtagcgtgtggcgtgtatataagccactactgtagcaaatcggaaaactcgtcaaggaagaagaaaaagaaacacgaaacatctctctctcgtcttcttcctctgattcctttcccctttctcaagtctctcgttcttcctcaacgacggcgacttgtgctcgccggcggcgaggtcgtaacaatctggtatcagagccgaacgatccgtcgggcgtttcctcatattctctcggatcggcggtaaaatttttcccatagttcagtttgtggcttcccttttgggtgagctgcagtaaatctgtccataggattcgctgattttggaggagggacaccacggctccggcaaagcaaggcgttcaagtgcggcaagtggtggcggcgatgggcgatatggaggagaggctgatggcggcggtgcaagctctgacggtgaaggtggacaaggttgatgcgttgggtcaacagctgacgcagattgatagcaagttggagaagcagggtgcgcgcttagatgctgtgcagagcaaggtggatctctccatggcatcgttggggcaggtccagtgcgagcaagcgttgatgacgaaggctctcaaggcggcggcaacaccttcttcaccgctacttccgacgccgaggccgactttgtctcaggatgcggcatcgacatcaacacaaccaccacctgaagttgaggtacctgttcgttctggtcaacctccggttcgtgataattcggatgtgcaggggagacgctcttgggtgccaaagatggatttcccaaaattcgatggcacagatgtttgtgtttgggtggataattgtgagacttattttgcgctgtatcaaatcacagaagggtttaaggtttcagcagcttctctgaatatgattggtgatgcagcacattggtatcaggcttggaaacaggagaggggttggcctacttgggagcaattacgtgaggctgtactgaatgagtttgagatcaatatcaaacgtgctaagatggaagaattgctgttgttgactcaaacaggaacagtctctgaatatcgctctaagtttctgcagctggtatatcatattcggctgtatgatcctgctactagtggtttatttttggtgtcccgttttgtgatgggtctgaaagatgaattgagatgctttgtggctgctcaagaacctgaaacagtgcatcaagctgcccgagttgctttagcttttgaggtgccttttgcaatcggaaagtggccttcaagaaggatgtggggaatgtgaaatttggggataaaggaaaagttcctgtgggggatttgtggaaggctcaacagcttaaagagtataggagaactcatggactgtgctttaaatgcggtgaaaaatatagtcctgctcatacttgtggaaagacagagggtgctcagttaaaaactatggaagtttcttcttctgatgatgtgttaactgatgaaattttggatgtggtcactgcttttgaacagttaccggatgataacatgttattatctttgcaagcagtggctggtactagtgctactcattccttgcaattgagagcacttgctgggaatcaagttgttatcattttggtggattcaggcagttctcatagttttatcaatgcagatctctgttcgaaactgaatctatccactgatccaattcctgtttccacagtgaaggtggctaatggtgaaactttacagtgtgaggctcaggtttctgaattttcttggtggatacaggggtgcacatttgtttcttcattgaaagttttatccatgggggggcatgatatagttttgggtatggattggctttctaagttcagtcctatgacttgcaattgggctgacaggtggttggagttcacttatcaaggcaagttggttaaacttcagggtattcagtctcatcaactgcagtatctttctgaagtatcttctgaccaaatgatgaaatggcaagtgggtaatgatatttgggctttagctgtggtcgactgtctttcctctccattgtgtgattctgctgtacctgcatcgattcaggacgtattgcagaaatattcttcagtatttcagcctagtgctggactgcctcctcatagggaattagatcattctattcctttggttcctggtgccatacctgttaatagcaggccatacagatattctcctgcacaaaaagatgaaatcgagaaacaggttcaggaaatgttggaatcgggtttaatttctcgcagctgcagcccttttgcttccccagttttattagttaagaagaaagataacacatggcgtttttgtgttgattacagaaggctaaatgcaatcacaattaagaataagtttcctcttcctattgttgatgaactattggatgaattggctggcacccgtttcttttctaaattggatttgcgcagtggttatcatcaaatcaggatgaaggaaactgatgaggaaaagacagcctttaagacacatcatggtcattttcagtttaaggttatgccatttggtttaaccaatgcgccagccacatttcagtgtttaatgaattccatttttgagccatatttgaggaaatttgttctggtattcatggacgatatattggtttatagtccttccttggagactcatgcaattcatttggatacagttcttcaagtgttgcagcaacatcagttaagcgctaagttgagcaagtgctcttttgcagcttctcagctggaatatttgggccacattatttcagctgatggggtggctaccgatcctgagaaaactcgcattatgagagattggcctgttccaaccaatgttactgagttgaggggttttcttggcttaactggatattatcgaaagtttgttaagaactatggtgttattgctaaacccctgactgttttgttgcagaagaatgcaaagtttatatggacagactcagctaattctgcttttcttcagctgaaacatgctatgtgttctaccccagtgttagccttgccagatttcactaaaacttttgtattggagactgatgcttgtgcaactggtattggagctgttttgtctcaagaagggcaccccattgctttttacagtaaagctttaggcatggctaatcaaaaattgtccatctatgagaaggagttcttggctattatgatggctattgacaagtggagatcttacttattgagaggccctttcactattaagactgatcatcaatctttgtgtcatttagatgatcagatactaggaagtgaattgcaacgtaaagctatgactaagttgattgggttgcaatacaagtttcagtataaacgaggtgttgataataagtcagctgatgctttatctcgtgtgggacacttatttgctacggtttctggtccttatcctaaatggattcaagaagtggttaattcttatgcaacggatgctgatgctcagcaacttcttactgagttggctgtgagtagtcccaatgacaagggattcatgctttctgggggtcttattaaaaaacatgacaagatttgggtaggagctaactctggattacagtctaaattgattgctgtctttcactcttcccctattggaggtcattcaggcattcatgccacttatcatcgtctgaagaagctctttgtttggactggtatgaaacaagctgtggaggagtttgtgcaacaatgtggggtatgtcaacaggccaaacatgagcactgtaaatatcctggtttgctccaacctttacccattcctgagggttcttggcaagacatttcgatggattttattgaggggcttcctctctctaaaggagctaatacaattctggttgttgtggatcgttttaccaaatatgctcatttcctttccttgaagcatcctttttcggcttctcaagtggctgaattgtttctggaccgagtggctcagttatatggaatgcccaagtcaatcgtatctgatcgagacagggttttcactagctcattttggaagactttatttgctagatttggcattcctttgaacatgagtacagcttatcatcctcagtccgatggccaaactgaacgtgtcaatcaatgcttggaaatgtatcttaggtgtgctgtggcgaatactccaagtaaatgggctagctggttaccattagctcagttttggtataatacatctttccatacttcgcttaagtgcagtcctcataaagctctgtatgggtcagatcctagttatggtcttttgccgtctttgtcagttgaggcctcagatgaatcttcctcttctaaagatgccactgcattattgaaggctcgttccttttactccagtacgttacagcaccatttggctcgagctcagaatcatatgaagcaggtggctgattctaaacgtactttacgggtgtttcaagttggggattcagtttttctgaagttacaaccatatgctcaaacatctgtggtgaatcgaccttgtcacaagttggctatgaagtatttcggtccctttcctattttggagcgtgtgggatcggtggcttataagttgcagcttccaccagccagtcaagttcattctgttttccatgtttctcagttgaagccatctgttccttctcatgtgcccgtttatacttctctacctgatgtggttgctttagatgtggaggatctgatccctactgaaattctggattgccgtatggtcaagaaagggaatgctgccattgtgcaagtgcgagttcgctggggttcattgccagataatatggcgacatgggaggattatgatgtgattcgtactcgttttccagcagtttcagctttgggacaagctggatctccggcgggcggcactgtcatatcggaggatattcagacttgagattactgaagaaacagagcaatacgtatttgtaaaatgcgctttagcttatgaaaagcgtaaacaagggtgtggggttgatatgttgggcccagtgggcagtagcgtgtggcgtgtatataagccactactgtagcaaatcggaaaactcgtcaaggaagaagaaaaagaaatcacgaaacatctctctctcgtcttcttcctctgattcctttcccctttctcaagtctctcgttcttcctcaacgacggcgacttgtgctcgccggcggcgaggtcgtaacagggaagggagaagaaggggggagcggggaaccggcgacggctccaacgccgccgacgaatcgccgatcggaagggggagcgaaaggggatcggggagggcgacgtggggaggggagcgctcgtcgattccacgaccaggtaaggacggaaccacctaggaaacgaacggccagattttgtccacgcgtgggaaagaaaagctctgatcacgtggactcaatttgaaatatgaaaataacgaggggttttgtgcaaaatttgatgacgtggatcggctgggcttgcggcgactctagcacctttaagatatctagtactagtattagaatgtactaaatgagcatgataaggtaatttgccgcatctcctcatttgagacgaaattgtctagagtgataaataatctaaaataagaggtaagcaaaatttatatattccatatgagccctaaataagataatacatataccagcacgccaacaggcgtgtagattttctagctttgtaaatttggcattgccccctcaaagaaactgccacatgttcatgtggaggaaattagcctaacgtttcaccgtgaaataaaaaaaaaacattggcgtgtacagtccagcacgcatgcctgcactgggcctggttgtccagcaccgctgctacagcatttcttgttgccttctcaggctaattgtgcacacagtaccaagcagaaataggataaaggaaagtaaaagaataacaaagaaaaatatataaatattcttttgcaaattttatctgaataaataaaatacattatggttaaaaccggaaattgagtcacataccaaaccatattgataccctatatttctacaaaataaataataaaaaaactaaataatagaaatagggtaaaagattggatgaaaatttgcaatagtaagaaccaatatgttttcgaatgtgcagttttactgttgatattgtatgcacaaatttttggttaataaaattgccacagttttgagggaacataactttaacattttttttctaatagcatctctaatcatttgttcaatcaggtttgctataggatactcaaaatattgtataatttgctaatagagattgtaaaatatgtcacggtttaaatatgcctaaaaaaccgataatttgctagatgacacttccatttcaattggagagagaaaatattcaaatagacaataatacccttgaggccacatgcttcaaacatgggcttggagtaatactttaaaaattatgcaactctaaacttgccaatacctccaattacatcgcgaacatacatcgtatttctatcttcacaacatccccaggttagaagcttttgttcctagaaaaattctcatctttttgaaaagtacaaaaaaaaattaggtgttttatagcaaaatttgccatcaaattattggcaatcactaattacactcctacttttgttcttctcattcttccgggacaaacataaaattaaattccattcttctaggacaaacacaaaattaaattccattaaccttttgaaagattttttatgggtgttagagtaactcatgtaaaaatatattacttcatcagttccaaattaccggtcattctcacatttcaattgccctatctccacctttcatcaatgccacatatatctggcaatcaaagttaacattacttttcaaaactattagaatgtagtaaatgagcataacaatgtaatttgccgcatctccttatttgatatgaaatttggtagagtgataaataatctaaaacaagaggtagataaactttttatattccatatgagccctaaataagatatacatgctataaatttactggtgcgccaacgggcgcgcatattttctagtacaactgaaaacgagaaattgaaccctgtcatcgcgccccaccaccgccgcctgcatccgtgtagtgtatccgtcgtagacagagtgtaccaccggcatgaatgcaccgccgcgtcgaaccatccatccccgccgttgcgaccggtcgggtaggtatttccgccattttccggcgtaggcacggaacagggcttcgacggttgacccgtacgtattttgacgcatacgtacgggccaaaattaccaacgccatgtgggccgaaattactgcaacctatgggccgaaagtacaagaagctacaggccgaatttaatctcgccaatcggccgatgagctcaaactactagcgcgtacggccccaattacaagcaatagtgggccaaaattaccagctcctctaggggcgaaactacctccatctatgggttgaaaggaaaaagtagaccgaaggtcccaaacttgtcatcggcataaaaaacgtccttagaccaaaaaatcagatatgcaggtcccttaagtatataaaaccggtcacccgagatccttcagtgatttcaaccccgattttgatctacgtggcggctgagtcagctttagacccacgtgggctccacatgtcaggtgtccacatcaccctctctctttcccctttatgtttctttgtttctctcctcccttcctctcactctttgctcttgcactcgcaggacatggggatgctggcgctaggacgcccacagcggcgcgcggcgccggaggatggtgcggccagcgacggcggctcctagggcagcgcgagcttcccccaggcggcgcacgtgctcagggagggagcaccgagaaccaatcccgcagcagcctccaccggctcatggtccagcacgacaacgtgctcgccacggatctcctcgctgtgctcgccacggacctccccgcccagcgccgccgcatctctttgtcatgggccgctacctcggcggtgccgacgcgtgcgccaagcttgtcgagagcgacaagctgccggtgatggcgaagatgctgggggaggaggggctgatgcaggagctcgctagtggggtccggatgctcatggacccggcatggacgatgccgtggaggtggccgggagggagaagcgggtcacgccatcgatgcggaggcggaggaggaggaggacgccagcaaccgcgccgtggcgggatccggcgggggcgagggggacgctgacgccgacgaggaggagaggatcctgtcggaaggagcgggcgcggggcacgccgnnnnnnnnnnnnnnnnnnnnnncgccgacgaccaccgggagaagcggggcacgccgacgccgacgaccaccatgcccgccgctagggggctgccacctccacagccttcgtctccgcctccgccaccaccacctactggccgccgctccccatccaccggcctccgcacgctcgcccgcctgccgccaccgctgctccgcgcctccactccactccgcttcgctggccgccgcactcgcacgccgcctccgctggccgccgtcgcggcgctgtcctccttctctcccgcctcgccccgtccagcttgcagagaagtgagagagagagatgaggaagggagagaagaggggaaagatagagaagaggctgacatggataaccctgatatgtggggcccacgtgggtcccacggtgactcagccgccacgtagactaaaaccgaggtcaaaatcaccgaaggacctcgggtgaccggttttttatagttaagggacctcgcatatctggtttgcggttcgaggacgttttttatcccgatgacaagttgaggaacctttggtgtactttttccttgttgaaaatacctgcaactacgggactaaattagcagcgactatgggaatcatgaagaaagcacgtacaaaaaggatcgagctagcctgattaggaaattaaggtgaccctattttggtgctataatgtaatctgtcactacttggtctgctaccaaattttgaaacacaaaagaaatattttttttataataccaatttcagtactttattcgtcaccatttcagtattcaaacaatgtggtggcctattgcctatgttcatacaatgatgtgtagcaaatacgtaagaactaaaaagtaatttacatgtaattgaccgcactgttttctcgactctattatgtacttttcaagaatctgaaatctagcgaataccattaattctttgaaggacggagattacatggagaagaaacagcgaatgtgattatggacgcgacattgaggtatatacttttcttcatgacttcatttcaatggatttttcttgctccccatccgccatgtacatcggaagagaagaagaatgctaatttcaagatcaaaacactgagatcgatcaataggctcggttgttgaatgagtccgacttttgcagcctaaattgctcgtagaatttcgcgatgaactcctcggcctgcatgtcgatcggattcgggctgcatccaccgtcctccgtctccagagaattcttttcttcttcctcgtcttcttttccatggccattgacaagctcctgcaggtcctgggcggacgagtagctgctggtcatgctcgtgccatcgctcctgtccggcgacggcggcgggtagtactccaggtggccgtggaggcggagcgggcgcatgccgtcgacgaggttcttccacgacgcgacgtcgctggacgacctctccacgtcagccgccgcgccgccgccggccgcctcggccttcttctgatagcccatggtggcggcggcggcggcggccctcttcttgatgctggcgctgccgttgaaggacatgaacatcgcccggaagaggccgaacgcgccccgcttcttgtcttgctgccggcttccgttggaggaggcgctcctggcgatggcgatgccgtccgtctcctcctccttcatcgtcctgtcgtcgccgtcggttctgtccatggaagcagcggtgatcatcacaacatgatttgtctctgcagctccattgatgtgctccttctcctccgtgctcacactagggatgatgatcacattgtcgccattggtgatactgtctaccttggggttggaggtgatagatagaacttgttctacctccatgggaggaggtagaacaaggtaggggagggctcgaggccttcgagggctaaggttctcctccaaagcgaagaggatcgccaagaacgggagttttatagacaacatttgtcgaggcagttgaggccttgagggtgtagtttgcgtaggttatttttagctctatattttgtggtcagtgtggcattctgttggagagtgagaggttaattctaggtgcattttgagaggttcccaactcccaagcatggctcaattttgttgagagaatatgcctcaaattgggcctctgatctcgtctacaggcctattcactttatcgctattttcaatgctatcaaaatttggtggtactgcaacaaactaagcatgagcttatcaatgtcattctaccaaaatttggtagttcccaaaaattcctctaacaaaaacgtcatcaatgtttggaaaggtatccaaccaaacacattcaacgctatcaaaatttggtaatgccaaaacgcgataaagtgaacaagccctatacattcatgcgccaaagtaagatatatatagtaggggttgacattcaattagatcaatctttattttatttttgacattccggtcataaagaccgagtgatcttgaaaaataataaagaccaaacatttcagtctctatcctgaccaaagttttagaaaattcaaaagaattacacaattcccttataaattttagatcaaaacaaattaggcacacaaaaatcgcatatcctccaatgttggccggtgtcgtcatcgtcgttggagaggctgagtgaaggaagagcctctagaggagatgcagctggcgggcatgcctcaagctttggatgacgttcgagtgtaggccgggttggaggatagtggcgctgactcgggctcgggttcttcggcatcgcagtagaatgcaacgctagctcggtcctcaggcagatgcggagaagcggtggcgcaacttccaggaggtgacacatggcttggttgtcaggtagaggcggagtaggcagcgcgggatcgctcgtcaggcaatgccaagaggtggcgctccgtgtggtgtctaggtgagtggagaagtggggttgattgggatgggtaagaaagtaggatttcctctgttgggcttagagtgcgttctaaacaactatgtgaaacaactacttcatcactttctattaacaatcttctcgaattgctaaacttcttaacatagaagtttctttaaaaaatcaatcccagcacatcctctttctgaacgaaaccttggtggtctattgtgttgttaagttatttcaatcaatttggttagctgagggtgatgatcaaatcgacaaaattttgaataaaattcggttagtgacatgttgagaccgtattagtaactgaattgctctatctcggttccaatcttttcagtttggttttttttttttacccaccctagctagtaaaactagtgtgggagaaagaagaattgcatctactcagcctaagtatggcctacaatgttatggaaaagcattactcagccggctaggcggctataaatatttagcatgtaagaaaaagttgatagtattttcaaactttgattatcaatttagatggtgcatttttaatttcaaatgctttatatgactgcttttttttatttatttgtaagtccttttgcagatttcaggactttgtgtctatgtgcttatcttttatgagccttcctgtaaaacgaactgcccttgcatttcaactatcagtctatcactaaactgtattgaggcgttagcctcaatgtgtttttcagaaacgaaggaacaaaagcattcgaaaataattaataagtacagcttttttatacttgtgttattagttgtttgccaaggcttacaaataaactacgttgaaggacactctaaaaattaagttttaaacttcaatttttagttgtggtacataaaacaacaagcaaacaataataaggaacaaaagttaaggaaaaaaaagaaaacgatttaagaaaggtggttttgaaaaggtaagaaaatttactgtttatcatccttcgaaaatactagtttccagatatcactctaccaaattttcgttttcatttgcccctcaatccgaaccaattctcttccgcaagccactcctagccccattctcactcacgtggttgttttttcatattggtcccgtccaacgtggaagcacgataggaagacattattttttaaaaaaagaacgtgggtgacaataggagtaaaaatgattgttggcaactttttttagcaagaagacaatcacgatcgagacacctaaacgtcttacagtgatatggagtcgccaaccacctcgatctagccaaaaggccaaatcaagatgggttttgtagaaaacggctaaaccggctagcggagccgatttagatatcaaaatcagcctctaggccgatggccgatttaaatcgatatgaggataaatacccgtctcatgggaaacggaaggtttacgggacaaacctacaaaaggggtaatcgcactctcgtagcgacaacagacgatttacggtgtaaatcgataaagatggataaaaactagggtaaagtagaaaacatggctgaaaagtaaaagataagaaaacgattcgattgatctgtgtatagactgtgtgatacattgtttgaaccggccttatctcttaaacaggggttggtctttccctctacaggccctcctatacgtccaacttgggtagacactaatggaaacccgaaacataccttcccgagcaagaaaacatgagacctgacgaaaacagactcgggctcggattccggtctgactggccctttggcggcggtctaaccggcccacacatgacgatcagaccggcccttctagagaaaaccagcagagttcctatatttggattttttcctatttcgacccttaaatgtcaaatttgggtgtaaatagtgatgtgcgggagagagttagtgaggatcggccgagtggtaagtttgaacgaaaatttgggtgagtggcagttgagggaggatggcaagatagtaattttttccacgaagggaagaaaggtttgcatcaaatttgcgaggtaagtaaggtacctacttttaaaaaggtgttgtttgtgtgtaaacgtcgagaggaaatcttcttaagaactgtgaaatacaactacatgataatataatcaagatgtcatggggtaattacagtaaaactaacatttaattattgcaatataagttgaaaacacagccacctagtggagagctgtgcccttgcccgcacatgatattttgattttcccaaactctcaaacgctttatgaaactttatattcatgatattcatgtgacatgtgtttttataactaagattttaatatcttagggcaggtgaaatatctactattataaaaattaaaaatgtttttatcggtataagtcaatccgtgtttaagtcagattttaacttcattcatttttataaaaacagatccatgtttaagtcagtttttaagttcgttctttttaaaactcatatgacaatcgattttgcaaaaaaaaaaaaaatcaaacaaaatcctacagtgatttcaccttgctaaaccgtataataataataagattaaaatagttttatcctttgcaacacacagatatttttaatagtttaataaaaagaattagaagaagcaactattaatttttttttgtcagcagatagtccgtataacttcgtttcgaaaatacgcgccggccgaagattctcggaatgggaactgcgattactgttcgccgccaacctttccagcaaatggcccgccacttgctgacacgacatgacccgcgcaccaaattaaagtagcctcgggaagaaaagaaggtccattggaactggcagcaaagctcgccgagtacgagtagaaaggccagtctccactcccctctccacttctccaggcctctcagattctcacgaactcacagtagcacttatctctccacagggaggaaggagaagctagctagccgccatggtggccctcgctgactcagcagcggctaggaagctcctcctgcatggcgccgccaccgacgccgccgccgtcggcatgagcttcggcctcgacggcctgtggcagctcatcgccggactcttctccggcctcgtccacctcctcctcctcccgttccaggccatcgcccacggcttccaggccctgggccacgccatccaggcgctcttcgctgggctcgggaccgtggcgcacctgctcgtccaggcggccgtcgccggcattggccatggattcgacggcatgtggcatgccatacagggcttcttcgccagcatcgtcgccgcgctcgccggcgcggcccatgggctcgtcctgccgttcgaggcgttctggcggtggctgcagacggcggcgggcggcaccggctctggtttccaaggattgtggcagaacgtgttggccttcttcgccacgctcgccggcgccgctcacgacctcgtccacccgttcgaggcgttctggaagtggctcaggaccgcggccgccgacgccgccgccgacatcagcttcaggctcgacggcctgtggcccctcgtcaagcgcctctacgccagcctcctcgccacgctcgcgagcgccgcccacgggctcgtcccgctcctcgagtcgctctggcgggggctccgcgccgcggccgccgcggcgctcccctacgtgctagtgatcgccgccgtcctatgcgtcgtcgcgcttgtctggctcgcctggccgttcctgttccccgccgcggcggtgatcgggctggcgctcgtcggcgtcgcgggctgctgcgcgttcttactgctcgccgccgccgtcctgatcgggcgggcgctcgtctacgccgtctgcttcggcgttgtcctcttattcgtcgccgccaaggtggtcggcaaggtgctcgaccgggtcctccccgcctgcgcgcggtgctgctacgacgaccgcgtcaccaccaccgccaccaccatgagcgctccggacgccgccggcatggacatctcgcgagcagcgtacgagtcactcccggagctctacgcccagatactgcgctccgccggccccgtcgtggccgcagccgtcttctgctcgcatcccgtcgcgtgggcgtgcgcggcgccggtcgccgccctcttcctcttccgcgccctggataaacgcctccctccaagcgaaccctgcgtcctccctgcggctgcataccctgacactgtcactgacgtgtcggactcacgttccattggccagcatgtcagcgaagatgatgacatgtccgactcatgttccatagtagacccataccacggcgagcacgtcattctgactatacgccagaggattcacctgcgtatacatgtcgtaaataatgtctgtcccgtgtgtgcgctagcttaacgatggttaatgtaaaccggtgctatcgatcaggtgatcaatgttggtttgttggcatgtttggttgtctcggattaccacaactcaacttgtcttgtcataatgttaaaaaaaatggactaagtgtagaatatacggagaaccctacatttatggggagcggattctaatccctcgaggagatatccccccgtatatctttttctttcaaatttaatgcaaatagttggaaaaattctaaaaaaaattgacaatgtagagtataatgatacctactaatccaccaaaattcaagttcaaattcgatctacacatcgagaaacaaaaaagataaatttagatataaacagtacgggactattcatatgctgaatttatcttttttatatctcgacgtgagagttgagtttggacttaagattttgtggagttgtatatatgtgttgtatgaatgttgtcaaatttttccagaatttttcataaccgtttagatggtttttaggtaaacgagggaatatcccctcgagggattagaatagttccccatatttatgttactatatttttcataatgaatattatttaacgtatttacatgataagtcttaaaaagtacattgtaaatttaatgtatttatattgtataagccaaaaatcatattgtaaattcaaatcttatattgggaaaaaaacaagcaaaagcagatagcaaggtgcggcttgccgcaacagaagaaatcaaacggaactaaaaggctcctgtacccgcagagcaatcggacggacagtgaaatagatagagattcgagatcaacctagaaagctatcaaaaacattttaacgtttccaaacttaaatctattataaattaatcaacaaaccgtggctcgactacatttggtatcgaaatgtggttcttaatttactagtataatgttattatcagtattaatttactctttttagtgccaaagtgtggtgcggcgcacttttaacaaaaaaaaaagtgatgaaacgaggtagcaaatttagcaatcacttcatcgaactataagcggaagatcgatagataaattcgatcttaacgggagcaaaccaagcagcttatttttgcttattggatgatcatcccgggtacttttttttttttgccggcggggttttggctctgaattacatgtccgcctgtgaaaatcgatcccctacgatgtcgaaaatgagttttctagtagtgtgaatgcgtatgtttttcaaatttttaaatggtgcgacttcttgaaaaccttcgataagagtaaattttccagagactgttttgaatcctttatagtaacagtttaattcactattcatgtgtaccctaagagcaagtttaatagtatagccaactgttagctccaattcaactatagctaatctaatagctcatccatacaatagttacatactacactagtaatacctggtcccacctgtcatacacatactgcgtcttggagtccgtgctatagctggctacaaatctatagcccgctgctcttctctctccttatttatctccttaaaatatgtttgcagctggcttatagcctgctattgtacctgctctaaataactatcacagatgatttatctattcaatcgttcgtcacaaaacaacacagttatactatagaaaaaatatatcctaaatgcttagaaagcctctttatatttgtattgtagtaagtcagtcattatttacaaactgatatggagtaaacagttctaataggcttatactccgtctgttacaaagtacagattaattatttctaccattcaagttttgtcctaacatataatacaactgtttttccttataccccatatctcaaccaatcataattctttcatactcctatttagtttcaactatactttctttaatacttgtgtcctacttcataatgcttgtgctaactctgtcccaaaataagtgcagtcgtaggtgtccgtgtccgtgtccaacgttgtttgactctccatcttatttaaaaaatttataaaaaaattaaaaagaattagtcacacataaaatattattcatgttttatcatctaataacaacaaaaatactaatcattaaaaattttaaaataagacgaatggttaaatattagatatgaacagtgcaaaactgtatttatattgggacggagggaatactttcgggtcactgagttagagcagcagagattttagtaaaatttacggttttatcactggcagggcagtcctgttcaactgtgtatgagtacaatagacgaatcttccaaagtttcagcaggcactttacttacaagttaagctaacaacatgcgccgaatcaatgcagtctaaagaattaaagttacttttcccccttctttttcattttttcgaaagcggacagtatacttcttttatggttcgtagtactccagttgccactgattcattctttccattatatgttgaagacacatacatacacacacaattgcatacgtagatacccatcgatacgttctctaacactaatgaagaaaccatctataatcggttgcttaaaaaccacgataatcccagctgcttaaaaatttgggactataaatatttttagttccggtttacaagcacaatgggattatgtgatatttagtgccggttagtaacaccaaccgggactaaagacctaactttattcccaattggtattactaaccgggaataaaaatcaaaacacactatataatcactagtacttatcctcttctcccgttcatatagactcctctctgtctcttttttccttgtctctttttgtcctctaactgagagctgagccttatctttttccagccttgtctccttacttcattctcagcgaaggagcggatgggagcgagcattggaggaggacgccgagcaaccggcagcggtggcgggcggcggcatgcgcggcggggaggggaggaggggatgcgtgcgcggtggcgcggagggccgcacggcgctggctggcacggcggcggctggccgacgtggaggggaggcgggtagcggccggccagcgcctctaccggaggggagacggcagcggcatttttttttttttgagaatttttgattcattgtataatcctatgatgtatttgatttgtgtgtgatgtgaatatctgatgtatttgtgatgaatttttagaacttgtgatgtaattttattaagaatttgtgatgtatttggagatgatccttttgatatgtgatctgtgatgatttgggatgtatttgaagattatcgatttgaggatttgggatttcacgatttaaggatgatttgaggatggagtgaaatcaatattcaatgttaaaaacaatgaaataaaaaaaggaacaactggacctggcctaaaatggatttttactcctagttatttcacccgggactaaagatggccatttttagtcccggattcgtggtcccggttatataaccataactataaggggttactaatcgggactaaagcccctttctccagtagtgtatcatacctacgtagacaaaaaaaaaaaaaaaaccagcagcaaccctatagcttactagtaaaatttatacggagtatatagagagacaaacgtcaacttcctatagcatcacagagcgcatgtacaccagcatcactgatttgagaagtgtgtggaatcgtgcacccttaactccaccactacactgtgcttcttagagcaggtacaatagcagctataaacatattttaaagggataaagaaagagagaaaaacagcgggctacagatctatagccagctgcaacacggactccaatacgtaatgtgtgtatgacatgtacccagatattaatagtatagtaagcaactattgtatgaattggctatagataatttggagctagcagtgggctgtactaaactttctcttaggatgtcaatgattttcgttgcatgttttctctacatatagcagttcctcgcttgtcttcttcttcgttggaaatggatcgaatgcccttcagagtagatcataagtcttcccattttcacatggtcaaagtagttatttttttttaaaaaaaatagataaattattgtgtgacacatcttctgtaaatatgtaagattaaatttgatttatgcaaaagaaataaaaaaaattagactaattggtacaggatatagtatattctagaattacgaatttggataattatatcacatcacatattaggtttattaatttattttacgacgtagttgtatacatacatacgtggtccgtgtgatagagtagtggtgatgggctctcgggccactggacctgtagcgtgcgtttagtttgtccgcaaggtcatcatcatagtgtgtttatttgtaatgctagctccattctctgtgatatacaacttcggggctccacatagagtcctactacctccgtcccaaaaaaagacaaaccctggtttccgtgcccaatgtttgaccgtccgtcttatttgaaaaaattatgaaaaaaattaaaaaaacaagtcacgcacaaagtattaatcatgttttatcatctaacaccaataaaaatacggattataaaaaaattttatataaaacggacagtcaaagttggacacgcaaacccagggtttgcctttttttaggacggagggagtaagggtgaaaaatattgacccgtcccgcgcatagagttgggcctcgccctacattacctgcgtgtgtatatttggctcagacttggccttgttggggcgaggatgcagcctcagccaagaaattgccaccgctctaccatccattcatccaccatctaacagctcaacacaaatcaagcaaatcgatcagagaggcttctagccttccactatctttttccatcaagtaacagcatgcaggcaacaaccttctgtttctcttgtgaattaattcaggtattcgcctccactctccgccgatcatctcatccatatagttggaacatgttgctcaatggttattattatttggtctttgttcagtttgctaccatttttaaccttaccaagttttggcaaagttaaaaaaaaagtggctacatttagtttgttgctaaattttagtaagcacatataaaatgttgccaaaattttggcaaccttacgaaaatttggtaatgtcaaaatttggtaaggttgaaaatggtagcaaagtaaacaggtcatttgtctattttaagatccacagctgctactcgctcatcgcatttacggttcatctatttatcctcttgcccaatcccatgtactggaattgatgtcaaggagtttttatttcagtttggatggtgtaagtttttatttcagtttggatggtgtagtacctacagaattttgtgctaaaatctatgtgattttaaaaacattatttcagttgatttttttactagcggaagttgaggatttgtcccatcatgtctttttttaattcctttcttttctacttctgagacttgttagctatgtgcccatgggcagaagcaggtgatctaatctatttccattattaaaaaaaatacgtacaagcaagagatgagcacaattatttacctggctctctctccccctcccctttgatctctttaggctgcacatttatttactaaatagatattgcacgtatattcgctactatagaaaaggcaataggtgtcggttgggaaccccacagacacctagaaagcgacactgatgtgaagagaaaatatgtgccggttctggtgtctgtttagaatcgacacctttaaggtgccacgaataaaaaaaaagacagctcgatgagccgagcaattccccttcatcccaactaatccaagaacattcaagcacacaaagaaccctaagaatatccaacaacatctgctgttgccccctccactccagtcgctgccaacgcctcctctcccctactctggcggaggggaggacgtcgccatgccaccgcctcccctcctgccggatctggcggaggggagggtgtcgccactaccatggatgggtgtgttggatggagtaggaggagaggagaaggaagaagaggagaagccttacttattttttaattaggtgtaggtatatggtaaaatctatttggagagacctctcgcttttaccacgtccatatatagatatagatgtataaaaaaaaaggggtcaatccgtttccctgtgaatgtttacaagccgttgggtacggctgcctctgcctttacaggactaaattaaggaagaggatacggtttccatggagaaaggttgtgcttttttccgagctcttggcgtttctcctgtgggaagaatgaataatcgatgccggcttgcagggccccatttctgttattagtcaaggctattgatcattctacttaactagctagacatttatatagataattagatattgccaatggctgtggttgattgaactctccagttaagcgcatgtacaatggtgcttattaatatactatctctgttgtcatggaagtaaatttgatagttaacatgaaagaaagagaaatattgttgctacgcatgacagcaactcagagtcagctcttagtatttctctatataggctacatgactatagaggctgcttatagagaaatgccctatctgtaggctacatgactctatccgttaagatttagatataatttaatgtcattaaatttacttgcataataagagactctgataacaagtatactttaatatgattttacatatatatactagctagatgcttgtcacattcgctgttcagtctgtgagtgagtttagtgtacgttcgtacgtcttttatgcgattgagtgaaaaagaaataccgtagagggcagactaatatcaagttactaccttgcaagcttgcatccgacgtgcaaaattgattttgtgataatattttgaaaattcaaacaaatgaattgactaatataaagttaaaaagttattttagaattactgttctgagaaacttatgtacagagaatttttacaaaaatcgcatagcttattatttggaaagtgtgggtgataatctacgagagaaaaagaacgggaagatggtccatcccacctaggggtgaaaacggtacggaaatttccgagaattccggctaccgtttccggtttgcaccgaccgtttcaatcggtatcggtaattgtcggtatcggaaatggaaacggtaatctttttcggaaatggtagcggaaataatatggggttttttccgaccgttttgtcggtaaccgttttttatcggtaatttccgtcaaatttccgacaaaattccgaagaaggaagtcggctgggcctggctagcaggaggaggagcccattaggcattaaggagcagcccattccgaataaagaagccaactaggcctgaccgcatcgtcgtcttcatcggcgctggggcaccgccgcgccgtgttgggcgccgccaccaggtcgccgacgccggccgcaacttccttcgccccgacggcctccgtcgcagccggccacctttccctcccccatgctccaccgccggcttccgtgccaccaagccaagcgccgagcgccgccgcaccgccccagcctcctcctccccaccgatgccgcccctttctcctctctccttccccccaccgccgccctgcgccaggccgccatctccggcgcctctctcctctcgggcgcgcgtgaaggagccaaaggcagagaagagaacaagagagaaaacagagaagaaatcgagagagcaggaaaaggaaccgagagaagggaaggataagagagagagaaaataaaagaaagagaggaaaagaaaggctgtgggatccaccggcgggccccaccatcttgactcctctctgtgatcgacctggaaataccaaaaagtctagtttagcatgaaacttaattacaacggtagttatacagtgtcaacataaaagttcttatgcaatgtgccactgtaggacgacgatatagctatgtcaattgatgatgaaataatgaatgatatttgacaaggagctgatcagctgaagccatgccagcttgtgagcttggtgttctcgaagacttcaaatctatatcctaaaaaaagtcggacaatattagttatgctgtaatcctatcatgtaagccacattgtatgctttagccacattgatgttgaagtatcattgaactttatttatattatttgtcaatcttattgtcaacttattaatcatcatataaaggtgttgtgtggcagcataatgatgcaagggtgaaattataaggttatcttcatacatagttaaatgcgggatgataccacagttcgctgtttccgacatgaattttcgacttccgtccgatatcggtatattcccgttccgacggttccgtttccgagataccgatataaccgatatccttaccgtttccgagtatacgttccgattccattttcgagaaaataaaatgaaaatggaaatggtagagggtttttccgaccgtttccgaccgttttcatccctaatcccacccatgacgtatctataagatcatacacattgcatcatatttgttgcgtcaccgccgtatataaactttataatatattaaagtaagtttgatgctcttactatagggatgatgtggctttcgatcttagcaccctcctttttgggtattttctggttttgccaaagcaaaggaatcattagtgcgattaccagtcaatgaaaggtgacctccaacaaccgccaggcatatgattactgtcactcctattaaaattcacatgttctttttatgtgttataaatggaccctttgccattacaaatttaccaatttggaaaaatatcactactattcttgaaaacctactatatgtcactgattttttctaaaattcaaatcatgctattgccgtcaagtttgctatcatcttctctccgagaccatattccatctatgcttacgacgagcgtggagaggccgatgctgtagcgctgggagcaggagagatcaacgacggagagtaatggtgcaaaagagagtacggtgaaagcagcgtcgggagggcgtatgagagtcaacgcgatgacttggatttatcatggacacgagtacatataggcacaatacgtccttatctctataaccgacttataggaacaaaatcgctaaaaaatcagggaaaccggcccggaaaagatagttagcgtgcgcgccgccaacgcgcatttccagcccacgcggcccacgcgcgcgcccttcttttataaagttttatctctctatttgaagatgttatattaaaataatgaactaggtgtcttatagtaaagtgccacaacactagagtaccatatgataaagccgtaaaagtagaatgtcctagaaagttagtgttctaaagtaaattttgccttagtataatttccttttgtctcattttgtctagagcagccaccatcagatcaggtacacccatcacttccatttccacttctgctctgcgatggaaatcctgatggtggcaggagggccggaggggcaacggtagataacataagaagatactagacatacaaggtttagagtggagatgaagctagactgttgctaaaagagagggcgatgaagtgtctactagagccatattttctccggcctattgtcgcgtgcgcgggtgtggacatcggctgcgcgatcgtgtgcggtgacgtcgagggcgctagcacttcgcgcaccgaatgacgcggcacgccctgcgagcagcgtgctcgggtagggcatgggtgacgcacgtcgagacatggtgttaggcccttcgcagtgcaccatgctggtgagttacttcttgcctccacctaggctgcgtgatgccgtggagaagagagggtataggccctcatcccttgacataggttttcctctttcaacaaagatgccagttactcacatgaataaggtggcgaggggggaaatgcatgggagagccgccggagcaagcaggccgcgtagagctcgtcgccctccattgccgacaccactctgcctcactggctcacaccttctttgcctcaggcagatgccgttcctcctcaaaccgccttgtcatctcctactcccgcgtcgccgacctcgccgctgcttcggggaaggagagaaaaggtggtggtgcgctagtggatctaaccgccgcttcgcccggtgtcattgtcgcttgggtcgccgcccctccgcccaacactgtctctactcgacgccttggcttcctctgcccggtgccatcgccgcttgggtcactgccgttccacccgacacaaggattttgattagcctagaagggtgattgagaatgaaacattggatctgttggttactcacgtggagagtacggatgcgctaagtgggaggagaggataaaggaattaaggacatgttgcgctcaatggagatagtagagaaaggcaagtgcataacatataattgcaaataagaaacacaagaaagaaaaataaaagaacgacatttgaatagttcacatgaaaaactaaggatcagacaaaacagactgagtcaaaacccagaggttagagctcttcctaacttgtcataagagtatatatgatacaattctttattccaaagggctaggatttttcccacaaaataaaatcatctaagttttctttatttttcctacaaataaaaggaggcttttaatttaaaatttaaggacttacacgataaggcatccatgcccaccctttcaacccaactgttgttttgcctctctactttttagagtttacatttttgcactatttttttgaaaacaaaccagccatttgcgctcacttttgacgcctcttgggtgggtcccatggtttttagtaacataaatacaaacggaaataaattttttttctacaatgttgaattcccatactcccgttcctggcccgtcaccacccaaaaaccctagaggtggcggtggttctctggtgagcacgcaacgaaggcggtagtttagacgaatgcatggtgttggcaagcgcggtgggcctccgggaggcgcatcgaggctggtatccagcgggggtgcattgaggtggtagccgcagggcttccgcgtggcaagcaacgactaggcgcgtggaggttggcggcggttgcggtgcatgttgcaccttggcacgacgaggcacaaccaggcgccctgaactaggcgacggccgggggggtgtgccacgccatgccacggtgagtggcggccaagtgcgccaaggcagctggcagccatggggctcccagcatggcgagcagcagccatgggcttcccgcgccacggtgctggcggctcagtggcaagcattcggaatggaggtgtaggtgctttcgccaagggtaaaaatgtcgtttcgtcctaaaataacacggttaaacctaccgtcgaaatctgtcatatgcttagaacttatcgatagaaatggaattcaaaacttgggaatagttttgaggagagcctttttctttccaaccaactgatctttcattccatcattctttctttcctcttcgaactttgtgcttgactgtattagtggaagagtggaagggcggttaatagcttgaagaatggaaagagtcttttcgtccctctaagagcagggtataatagcatactataagccagctataaatatattttaagaagataaaatatgagagataagagtagcgggctctagatttgtagccagctgcagcacagactccaaaatgtatgtatgtatgacgggtgggaccagacattaattatgtaatatatgtttatagataattattgtatgaattggctattaaattgactataggtgatttggagccaatagttggctatactgttaaacttgctctaaaagagggaggggagcagtgaggacaaacatctggttcattttcaaaaaatggggaagaaacaaaccctaaaagtaagagtaaaatagcagttgtggttaaaagtgagtgtatgatacaattatccctataatatattaacaagagtaaattaaccctcggtacatgtactgtccgcaggaagttccgcccggaacctttgaagcaaaagcttcccctcacggtggcgtgacatgcaccaatctcgccccaaaaggagtctagtagtagcggaactgtgggaatggagtagctagccggcgagttgccctagtggccgagtcctctcttcttctccccttcttcacccatagtcacagtagtcagttgtcactccacactgctacctgctacattgcagctagctagccatggtggtcctcgccgactcagcagcaaggaagctccttcatggcgccgtcggccgagcccgcaccctcgccggcgacgccgccgtcggcatgagcttcggcctcgacggcctgtggcagctcatcgctggcctcttcggcggcctcatccacctgcttctcctcccgttccaggcgctcgccggggccatcgcccacgtcttcgaggccctggggcatgccatccagtggctcctcgccggcgtcgtcgcggggctcgggagcttggtgcacctgcttgtgatgccgttcgagatgctgtggcgcggggtccaggcggccgtcgccggcatcggccatggattcgagtccctggggcacgccgtccaggtgttcttcgccggcatcgtggctgggctcgggagcttggcgcacctgctcgtcctgccgttcgagatgctgtggcgcgggctccaggcggccgtcgccggcatcggccatggattcgagggcatgtggcagggaatacaagggttcttcgccagcatcgtggctgggctcgggagcgccgcgcacctgtttgtgctgccgttcgaggcgttctggcggtggatccaggcggccgccgccggcatcagccatggcttcgacggcatgtggcatggcatacagggcttcttcgccgacgccgtcgcggcgctcgtcagcgtggcccacgggctcgtcctgccgtccgaggcgttatggcggtggctgcagacggcggccagcggcatcggctctggcttccaaggattgtggcagagcatacaaggcctcttcgccagcgtcatcgcatcgctcgccggcgctgctcacgacctcgtccacccgtttcaggcgttttggaagtggatccagacagccgtcgccgacgcaggcgccggcatcagcttcggtttcgacggcttttggcagtacatccggtccttcttcgccagcgtcgtggccatgctcgccggcgcagctcacgagctcgtccaaccactcgaggcgttctggaagtggctcaagaccgcggccgccgacgccgccactggcatcagcttcggcttcgacggcttttggcagaacacccggtccttcttcgccagcgtcctcgccacgctcgctggcgcagctcatgagctcgtccaaccattcgaggcgttctggaagtggctcaagaccgcggccgccgacgccgccgccgacatcagcttcaggctcgacggcctgtggcccctcgtcaagcgcctctacgccagcctcctcgccacgctcgccggcgccgcccacgagctcgcgccgcgcctcgagtcgttctggcgctggctccgcgccgcggccggcgcggcgctcccgtacgtgctggtgatcgccgccgtgctgtgcgtcgcggcgctcgtctggctctcctggccgttcttgctccacgccgccgtccagatcgggcaggcgcttgtctccgccgtgtcaagcggcgcgcactacctgttcgtccccttcgggcagtgctgcgtcccgctcaccatgatgagggccccgggcgccgccggcctgatgatttcgcgagcagcattcgaatcactcccggagctctacttccagatactgcggtccgccggacgcgtggtggccgccgccgtcttccgcgcgccgtccatcgcgagggcatgcgcggcgccggtcgccgccctcttcggcgcatcatcatgatcaatactacctctctgtcgtcagtaatgtctggcactctggcctctatttgtgatactagctgttaactatgtgagctgtgctaccgatcagcgtgtgtgttgggttaatatggagtactgtatttaatttccaggaatgatattacattactgttaaccagagtacctctctctgtttacaaaatttaaaacttattaaaatataacatatgaaattgttttttttgacaaatatatcaatataattttcatatattaactactgatttttattataggaaaaagtacgaattaccccatgaactatcacggtcgttcgaattaccctcctgaatcacaaaaccggacattcttcatctccaactatgcaaaccggacgaattacccccttcgacccaatccgcagtggttttggtccacgtggcgtacgcgtggcagtccagtcagcaatttatttattagaaaataggcgggccccacctgtcatacacttttcctctctcttctcttctctcactctctcacgaatcacagcggtaggcggggggcggcgagcggcagcggcggcgggggatgaggcggcgagcggcagcggcgacgaggaatgaggcggcgagcggcagcggaggagacgagcggcggcggcggcgagggatgaggcggcgagcagcggcggaggaggtgagcagcggaggaggcggcggcggcagaggaggcggaggaggaggcggcggcggcagtggtggttatgcgactgcgaggtgtggcgga

SEQ ID NO: 26449 - DNA, 5718 bp, Oryza sativa
cccacccgccctagacgccaccgcttcccccggccaccctggacgccgccatccggttccccctcctcgtctcacaccgcgcgccgccatgcatcctccgccacgagagagagaccgagagagattaggaagagagagatagagggggtatgacatgtgggtcccaccatttaaaaaaataaaatgctgactggactgccatgtagaccaaaaccaccacggattggatcgagggggtaattcgtccggtttgcattgttggaggtgaaaaatgtccggttttgtggttcaggggtaattctgacgactgcgatagttcggggggtaattcgtactttttcctttattatattaataatttaaaatattgtggtttgactgcactcattttagtgttagagtatagagatagtatcgtattatacccagttgttatggtacatagaattagtttctatcaatatatttttagagttaattgagattaaagtcttgtgcgcttagctacacatgctcccgaggcggcatacaatggcataaagattgtcatagggcgttgctagttggcgcgtctgcgccactacggcagatcgcacgcgttgcggatgtgcttgggactaagggcctgttttgtagagctccaacttcaatttagctttaggagttgggtctggagtggagtcgtggagctgcctaaacccagctccacctctctaattcattttgtgagagagctccacccagctccgctcccattttaggtggagctaaaactgtttggctgagctccagctgagaggtggaaccggagttgtgccaaacaagccttaagcctggtgcataatgcttaagtgctattcgcaataagtttttataatagaataaaaaataaatagttgagtctagagttttcaaatctggacataactaatattttaaaattctgaaagttttaaaaattaatttaaagattttaaattttgagttaacagtttttaaatttaatttgaaacttttgaatagaatttttttgaatttcgagttgttagtttcaaaatttggagtgaaagttttaaaatagggagatcttttgaaaattgatttgaaagttttaaatttaaatcgacaacagactatgtatgtaaatttaaaactttcaactcctctacaattcctattgatgttgttgaatcaaagcagtccttcaagtcttaacacatactccgtccattccaagaaaaagccaacttctgactatgaatctgtatataacgtatttccagatttatagctagaagttactattttgttttaatagaacagagggtgtaagtttgataaaataaggatacaaaccaagcaatcacatcattgtacttgaactatgagtggaattgattaaatctatagttcaagttacatgtaatactcctttgaaacgttagattctaaaaacgcaggattaaaatgtaatggctttttaattctataggaaaaatcatagaaattgtgcaaagtagccatttagatgcctcacaggataggtaggggaaatttaagattatgcgttgatttgttagagagagaaagaaagaaagtgcgttgaaacttttcaaataaggagtaggcctcttttgaggaaagaggatatatatgcctcttgttagagtaacggtacaatagacaaaattagctagcgatagtgtgtccacggtagtaaatgtggtgaggtgacagagaaacgagtggagagagagaggtagcgagcgactaagtggtgtttacatccaacgactttagtccctgtctttagacactaatttagagtattaaatatagactacttacaaaactaattacataaataaaagctaattcacgagacaaattttttaagcctaattaatctataattagagaatgtttactgtagcattacataggctaatcatggattaattaggctcattagattcgtctcgcaaattagtccaagattatggatgagttttattaatagtctacgtttaatatttataattaattttcaaacatccgatgtgatagggacttaaaagttttaggtggtgtttagatccagggacttaactttagtccctgtctttagacactaatttagagtattaaatatagactacttacaaaactaattacataaataaaagctaattcacgagacaaattttttaagcctaattaatctataattagagaatgtttactgtagcatcacataggctaatcatggattaattaggctcattagattcgtctcgcaaattagtccaagattatggatgggttttattaatagtctacgtttaatatttataattaattttcaaacatccgatgtgatagggacttaaaagttttagtcccatctaaacagggcctaaggtggtgtttagatccagcgacttaactttagtccctgtctttagacactaatttagagtattaaatatagactacttacaaaactaattacataaataaaagctaattcacaagacaaattttttaagcctaattaacctataattagagaatgtttactgtagcatcacataggctaatcatggattaattaggcttattagattcgtctcgcaaattagtccaagattatggatgggttttattaatagtctacgtttaatatttataattaattttcaaacatccaatgtgatagggacttaaaagttttagtcccatgtaaacagggccttagtcccatctaaacagagcctaaatagccactgacgacacactctctccaagacgtgagaagcggcaccaggcctgctgctactggccaacgtgattgtggggtccacatgaggcgatgcgagaccggcaaggcatctaaacggagcttggaggcgaagcgttcgacggcgatacgatagaagctagcagagagctcgttgctggtgatgagagctgcgtcgctcgaggagatggccggctgccacggtttgtggagccccaccggcgacgctgagatttgatatctctgggacggggagcacgggagcgaaaagacatcgacatgtccaagacgacaagaacgagagaaacgagcaaagaaatcaagagccaaccaagagggaggaggagatgcacccgagatcgccggtggtgtcctgctcaacaccgggcgacggccgacggtcttgtcctttctttgagacttggagcattcttgtcctggccatggaaggaaggccgctggcctcccaagcaactcgcttggttttgctctgctttgagaacaagtgggcagaaaaatggtgaagaacattggaagaagaagatataataaaaaaattcataaaaacatgtgggttattgatgcaatagctaactattgtatgcactagctcttatcaagttaactctaatgctgacatagatgtttttggagccaactgttggctgcactattgcccttgctcttagaatcccttaaaaatttagaggcaaatcctatgaaattcctataaagcaagcctaccatccaaaggttctcataggattttatttccaatggattcaattccttcaaatttcccaaggagccctaagacaaccggtgcatgattactacggccgagtttagttctaaactttttcttcaaacttttaacttttccatcacattcaaactttcatatacatacaaacttccaacttttccgtcacatcattttaatttcaaccaaacttctaattttaaggtgaacttaacacatcctatgtatatctccgaggcatgcatgcatttactacttcactacttaactgtagtgtcttccaatggattcaatgccctaggaagcatatcagaatcctaataaatactttcagagatcctttggctgtgtttagttcagcgcaaagtttggattttggttgaaattggagatgatgtgattgaaaagttgtgtgtgtatgacaggttgatgtgatggaaaatgactgaagtttggatccaaactttggatctaaacacagcctttgtggtgttgtggtacaactgtgtccgtatcgtctaacattacatggtaatggcaggggtagcattattcccatcctgaccatccataaaaaatcaagggctaaaaacacaggttgtactaatcgtgctagttagttatccaaaacctcatgcttctttgagacggtatgcattccttagttttagttggcattgccatcattaaacactaggtaaaaccccacgtattgctgcgagaatttagtatgataacaataaaaaaataacgcgtaagatagctagataacattggattaagtaaattaatgtggtttatgataatttaaatttaaatagtatacagaatggtgattcaaacgtaaaaggtaaggtggtataactttatggaagaagaaaagtagggagatagtttggaccgtagattaatcatgtaaaggctaaaaacaattgatctgatatgacttaattagagaaaaaaaaggagaaagataatttggaccatagattaatcatttaagcactaactaagtgagaatgaactatataagtatataggatatcataaaacataataaagatatacattgaaacaatatgtgaatcatgttggatggtaattcaacatgtttgtatttgaaaagctcttaaattataaaaactataaagatatagcatgtttgcatgatatttaaatgtgatgattattagtggatgatgatgtgccatcttgttaattagtggatgatgatgtggcatcttgttagtggatgataatgtggcatccttgcatgttatgtttaaggagttagtgggggatattgtagtgttgtggtacaaccgtgtccgtatcgtctaacattacatggtaatgataggggtagcattatccccatcctgaccatccataaaaaatcaatggctaaaaacacaggttgtactaatcgtgctagtagttatccaaaacctcatgcttctttgcttctttgagacggtctgcattccttagttttagttggcattgccatcattagacactaggtaaaaccccacgtattgctgcgagaatttagtatgataacaataaaaaaataacgtataagatagctagataacattggattaagtaaattaatgtggtttatgataatttaaatttaaatagtatgtagaatggtgattcaaacgtaaaaggtaaggttgtataactttatggaagaagaaaagtaggaagatagtttggaccgtagattaatcatgtaaaggctaaaaataattgatctgatatgacttaattagagaaaaaaaggagaaagataatttggaccatagattaatcatttaagcactaactaagtgagaatgaactatataagtatataggatatcataaaacataataaagatatacattgaaacaatatgtgaattatgttggatggtaatttaacatgtttgtatttgaaaagctcttaaattataaaaactattaagatatagcatgtttgcatgatatttaaatgtgataattgttagtggatgatgatgtggcatcttgttaattagtggatgatgatgtggtatctttgtagtggatgaatgatgtggcatccctgcattgtatgtttaaggagtaatgggggaaattgtattggtttggtacaaccgggtcc

SEQ ID NO: 26450 - DNA, 5700 bp, Oryza sativa
tacatatttgttagttatacgagaccataagttgcatgcctttctatcagcaatgtaaaaatatttttaatgctatattttctatagagaacacataatacctaattgggtaccacaaattgaaatgacatttagtagcgttgttgaggctcaacaattttcgaaccattatggcggtcaaattggttttgatgttagaaaacgatttgagaatactagcaaacttgatggcaaggctatatcagctgaatttgtttgcaacaaggaaggctttagaacgaacgataaaagagatcctttgataaagactcctcgagctgtgactagaactggatgcaaagttcatatgggagttaccctaaatcgagtgctaggaaaatatgagatacatgatttggttcttgagcataatcaaatacttcaaacccttgaaacctgtcacttgttgccatcacaacgacggataactgaagtgcatgattactacgttcagactccctttgaacaaaggatgaacgaaggatttcttctttctttttgcatttaaatcatgtagaaattattcctaaatgactcttggaacaaaggattgcattctattagaatttctttgaaattccacggtccatagatattttggaagaaaaataacttcatgtttaacctttgaaattttctttgactgctatctctcatccaaatactactatttttactactggagaaatgatcttcgccgggttgccaaaaatctacgatagtcccggttcaactaaaaaccggaactaaaaaccatttttagtcatggtttaaaagtgcagcgggactccagaatctttagtcccggttggtggttctatttgtgtcagacgatgtcaggacgccagagatttattgtcccggtaagtaacactaaccagaactaaaaatccatctttagtcctggttggagttaccaaccgggagtaaatatttatctcccatctccgatcggttaagtccaagacgagattttcttcctcaccgagatatttagataagatcggatcatcccctctcctcctacccttcagatccccttcctcctcctcctcccctccctcctcccctaccatccggtggccggtggcagcgggcaggccgtcggcgccggtagggccgcgagtggcagcggccggcggggccgcgtccggcatcggccgacggggtcgcaagcggcaggcgccggccgtggcgagcggcggcaggcagcggccgtggcgggcggctgcggtggcagccggcgggaggggaggcgggggcgcgcatgcatggaggccgggtgccctctcctctgccggcgtccttttttttatataatttgtgattcactgagatgtataatttatttttttagaatttgtgattcattgcatggatctgagatgtataatccgtaatgtatttgatttatgcgtattttttttaagatttatgatatattttatttgtgtgtataagtaacttaggatttgtgatgtgaatgatttgggatgttattttgatttggggatttggggtttgatttggaaatatgcatggcactcgatttgggagaaaatacatggattaactatagcaagtagcaaacaaacaatgacaaagaaaagaagaccaaccgggaatgccgctaccctaccaagactaaagattcaactttactcccggttatttcatccgagattaaaaatgggcatctttagtctcggatttgtatccccagtttgaaaatcgggactacatggggttcccaactgggattacaaacagtttctccagtagtggtttcttgcctatggtttgtccaaataatcttttatgtgttgttgtcctctattttgcatatatgttcgtaccaaaatcctgtaattgttttctattactgtgttttattgtttgtacgttccaaaggagacctcaatcagaatttagataacgatactcatacatttttaatagggatttagtaaaatttacggttttatcactggcagaatttacaaatgtcagcacatagagtcatcaaattaaaagatgacttacaaattaagctaacaattaagatgactgcacacacagtcaaaagcggaaagtagttatcttgtggttttccttcttttcaagtagttatgtgttacctttatacttttcattctttttaaaagcggaaagtagtactatatgtttatggttcgtacaaaggttgtcaatgattttgcttgcatgtttcctctgcattattgctcgctcaggtggttgtgattcgccttgttgccaactcctgggtagtatagcgatctctgacatctgttttgaaagcgcgaatcacagaggcatcggtgatatcggagatcgtatttctgcactcattaaagcgccaaacgtagtccctcaaagattcgcccggattctgtgttaatgcgtgtaaatcgtcttcgatcgcgtggcgcttgtaagttccttggaagttagtgacgaattgttgccacaaatctggccatgaagaaatcgagtagggcgggaggtgcatcagccacgaattgcagaacctttcaacgctgttggcaaatagtttgctaacgcgttgtcgtctgccccggcagtgtatagtaccgtggagtagacctggaggaattcttctggatcagtactcccatcgtacttctctattgctccgggtcggaatctctcgggccatcggacatcatgtagagaacggttgaaagctctacacctggcgctaggggcggtgggttgtcggcgatcgtgtgtcctccgtggatgtctatcggatgacgaggatgaagacgatgacgatgatgatgatgggtcactcagctccggtgtccgattccgagggcgacgttcagtttctcgagaattctgtcgtcgtccaccattgttgtcctggcaccgatccccattatcatcaccgtcatgtcggtgtcctcgtccagcatcgtctggcgtccgctgttcgcgagcgtcacggtcgtggcggttatgacgatatggtggtgttggtcttcgttcgagtggcctcctcgctcttcgttctcgcgacgtcgtgaagagacacgatgtcgggaacgattctcattatctcgcgcacgtcgtgcttctcggcggccattcagatggtcgcggagatcgccgatgccgcgaggtggaggggtagctcgtctaggcgacatccattgctccggtgcttcgccgtcggcaccgccagctgtcggatgttctggttgtgctctggtagcggcctcctcgaacgcgttactgagattggctaccgattcccatagtcgttctgtccatcgtgcgagatcatcgttaagtacagggtaatagggagcttctctcagtattgcgttgacggtgccgaagtgttgggccggcatgaccgcctggttctccgcctctgcgttagcgtgcgcagacgtgctagtcccaccgatgccaaacacgtcgcgtggtgtactggaagatgatgagccatagtcttcgagcaagtgtagtactgatggctcatggggatcgatgtcgattactccaacgaatcgatccgaggtcaacgtcgctccttattccttgtctgtatccttaagagaggttcctgactgctggaccttaggaagtggcgttttcatggcgcggagaaagaccttgcagcttgagaagtcgtgatttttcgtcttgtgaataggacaatagacatcacgagttggagaagtacgctggattccacgctctttgcaagcacgaatttcagcttgtacgttgagaaaaacccagcaagcttgcaagttatgcttcctggacttgtggataggataccaggactttgttacctcgaaagttgtccttgtcggctcgtggttcttgtcggaaggacaaggtttagccgcactagcaaccttctcgagttcgtatgacatcgatgttccgttctccactacggcgggaggatccttcgacacggggtcgtccggggttatagccacggcgctctcgtttccggtcattgatggaccagccgagattggtaccgtggtgtaaaccgggaagacaatttcgccgacttgagtccacaccagcattgttgaagtagggactccttgaatggggccggtgttgatgccgttgtcgacgaagcttgatgtcatagtagtagaaccttgagcaccaagttcccctacctggcgcgccactgtcgacggtgggtacccgtagaccggatatagagggtattggggtacgctggtacgaggatctacgtagtatgatatcaagaaaacaagagacaaagattatactggttcaggccccttaataggtaatagccctaatccagttgatatgggattatatggagataaccacaaattacaaagggaataatagaactcaatgataccgacgagatcgtagtcgagttgattcgactagatcacccggcgacttggctcctgtagactccgacttcataggctgtggtcgttgtgttggctatgagattcgatgccttaggtccttccgggggtcccttttatatcgcaggtcaggtggtctccaagtaggactcagagacatcggaccctgcacgatatagtaacaacccagtcctatacgggtaggaacctttccattggtgaacttcgtgatgaatttccttagcgtatacagagaacgtccgtacacgcgcagatgtaccatattgccgtatagcgtatatccaagggtagagggtataccttattcgtaaccctgacagcaattacatttttttcatttattctattggggtgctcgtcaagtagtgggagagttcatcgaattgggatacccactgcaacttaagctgtcatataggcaccggtggattggaaagtaacggccaagattttccttggaacttttctgacaaatactgtagctggatgtttcctgtagcgaacaccgtagcaaatactctttagaaccgatgtggcacagattttaaccgtggtcgtatcaaggtgaaaaatgattccgactgcttaagttggagtccctactatagctgcagtcgatccttattcgagttcatcacggtttcgagagacaaacaaattagttattataaagttaacaaactgattaatagctcaactggttaagtttttttaaggaaccaactcacctggttcaagtttaagatttgacacgagtacttttatttgtggctaattatttttttataggtgatgtatccgtcgatagtgatacacctgtgattacttcgtcaatctcaagatataccggtgtagtcttccggaggtgcatacagggatgatgtgtgcatgtgtgcattcatagggtgagtatacgcgtgttgtgagtatttgtgtttgtactatgttaaaaaaagtttaacaagttgatttaatattgttttttaagaaaatactgccgaacaaagttttaggacaaggcacatcatttagtagcatgttaagtactgtgactatgataattcataattaaagtgaacgcgcctggaggttgcaatcaaccaagttctagccaacggcaatatctatgtctaagctatagccttgactattaacagaactgctggtcatgtcaaagaattagttaataataatggaaagctgagag

SEQ ID NO: 26451 - DNA, 8425 bp, Oryza sativa
aataattttgtatagattgtttacttatattttgggcaaagctagaaaggacgaagacaaaactgaggataagaaaccccctaaaatcaattccaaaaccaaatctaaaattcaaaaattttcaattgcagacaacgatactgatctgtgctgctatcgactaattctagttcgtgctctcttgagaaaaaaaaactttattttaggagggactcatgtgacactggtagtctataaatagcagaaccctcccaatatgtagcattggattaataacaaaagtaaactaaacatactatcaacccaacaatgattgagcgatataccattgaattattgatagcacatatcacatgattatttacgcgcgctatacttcttaattataactagatgataccccgcgcgttgctgcggaaattgctagataaaaatataagtttatagcaattagcatgctaaaaaaatttatgactaacgacttgaaaattttgaacatacaactccaatgcagtaaaattttatctcgcgaattgaataaaccatacgtaattatatttgtagtaaaatgaaaaaataaaattgattaaaaataataaataccaaaaaggcaatggagcttaaagcttcactgagccataggcccatagctatgcaggatctcttggatttgatgcatcaacagctagtgccatatgtgttcctacaaagaagttttttccaggagaaattgtgttcctacaaagaagctttttcgaggagaaattcggcatcaattgcgcagtccaaaaggatgtatgtacagaagtaattaactgttagcagtaaaagcaaagagaaattatgccgaatctttatttgatataacatatctcttttcgtgtctggcatatgtagctgtatatatggacagagacgctaaaactttactgatctgaattcagaacgtgacacacctgaaggagcaggactctctcacatatcagttggattttatgtagcagacgatagcctagaaaactttgagctgaaatgagcatttcaggtagtgaattgcaacctgcactattgaagtattgagactaaggaatgttgacctgtttcacagaacatggttagttagcaaacttacagcagcaagtttaaaatgtgacaaactaaaggaaaatggtataagatggaaatgtcagataagatatgaacaaataatatttcaatggaaggtagcgtctagtgagacacatacttatgtgaacctaattaatggtccgtaaacatatgaggtataaaatgagcattataaaagcaaacagagtctgcattagttaaacagatcgagattatggttggaacaacagatacctattagtgttatcttacatttgaacccaatatcttggaagcaaggcagtaacatgagctatatatgcacagcagagagacaattaagaaggatttgagcaaatttccatagagcagaaaatgattcactcgttgcaacaatttgtctcaaggacatgaatataagaatgttagatctctatcataccttgggtacaatctggtcagaaatctgcatactataaagacatttgcccacttaaattaaataaataccttcagatattaggagaaaaacaattgtgtatgcagaagtataaaattgtgctgaaagcagcaattaccacccataagaacgtaccagcaaatcgcatcatatcatcaaccaaaaatactgttcttcttaccactttcttaccggataactgaaacatttggtccatatctaagatcagatatgccataggccaggcctggtgactacatggtgcagtactttacaaaataatatcattgatcttgcattggccaccgatgagcaagaagaaaaaggcaagattgggatccatggtgcatggtgatgccgcagacgaacattggagagagagagaggtaaggactcaaggtccttgaagtactccattatcatgtcttggcaataaatctgatgacagaggtcagagaagactggcatcgagtgaggggggttaaaagaagataaagtggaggagcgtcgagttgaatgctccttccatttgtagaagtggaggcagggcatgcgccatcagtttcacgcgagggagatggaagggggaaggtgaaacgaattagcaaaagattgggtggaagcgaggaagggaaacagccctgacggtcagggggaggggggggtggcgtgggtggggaggagaagcggcgctggcagagtgcgccagggatgggggaagcgcgacgcggcgacgatgctgggcccgcggctggctcgcgctagggatgagaggagacgcgatcgtggccggctagcgggcccgcgctggcgcgcatgatgggggagaccgggagaggaagcgaggacgtcggcggagggcctgcgtctggcacgcgcgcgatggggagaggaagcagcgcgtgatggaggaggcgaagcgggacgcagcgtggatgcggtggaggggcggcgacgcgagatgcgggagaggagatgtcatgcctagaaattcactagtaatttttcgaacttatttgtgcattaaatcctcgtccagaaatcagccgaggtatacaaactgacaatttaatatacagattcatcaaaataataacgttacatacttacaaaagaaaagaaaactgcatcggaattacggtctagcgaagctccggctccactcccacaggcagctcaactggggtataagccaaacgtcttctccttcgcaacttgtcttcaactgaggtttgattgattattgcaaggtgagcatatgacatactcagcaagccacacaacaaatatgcaagtgcacaaggataccaaaggatggcataatatagggctcatttgtaaaagcagcatttagcaaacatttgagaattgtaaaacagtagagtacttaatcatcaatattaatcaacactgaacagcacatccatactgcttaggcccaaccatcctgaacaaccatacccggttgcacagatctatctccaaactagaaatgtaccattccaaaccaggagctaaattaattaccatcaattatcacgttattattaatgagtagtgtgggactaatcacgaaagatattgttagacccgcccaaaaccgcgggcacggctattcaaatagttttactctggctagaggtgtaccactgtacccacaagacacaacccaccgtcatgtcaccgcatccgtgcagacacgtcaccatggcgagtgattgtgacaagacccctcgcataactcaactcaaagcagtgcaccgttcctggatcataatcacccccttaaacaaggcatggactccccagcgatccccatgggcttatctccgccacttcttagtctggtgctccgcaatgagccttgttatacaaagtgtctagccgttgcccactctggcttgtggttggcacggttaatgtttcacaaccgaaactcgtgaaccggtccttaattgtcatgagcacgaccatcgaaaccatgtgctcacaacccaccattatcaagttttagttggcacattaattaattaaccaatcacgattaaccatcgtgagctatcattaaatatctatcattaagtaatagtgaaacattagtcatcccaatcgtgtgctaatgtttctaagcatggctaagcaattatgtctaacatctagctgaaccaatatataaagttcaactagtcaaattataataacccaaggtatcaaggaatagagtaatcaatgcaaattggccatacaaaggaataattcacaccacccggtgacattcgaaaataaatgcacagttgaaataaatagagaatttaaatataggatcaacatgctcaaaggaattgtgtttgggatctgtgtaacttgccttgcaataatgggtcttcaattaatcttcttgaacacttccgacgcactcgcgaaccttcgaaacgacgaaaacgacaagctaaaacgcaaaacgaggaaaaagactaataaaaccaaataaacaaaacaaacatgtagatcatgattttagatgaattatgagtcttgaacggcctcattctgacttcatatgaattaattacgaattttacaagatttaatctaattaaagcccatttaaaaaggattaaataaatttaattcaatttatggataattttaatatgtagatctttattttatagaacttttgcaacttgaaccacattaaaccgagttacaatgaattagttatgaatttttaaagattaaaccggattaaagcatttatatggattttaattgaattatgacgcaataaagaattatttttgaaaggaaaaagggatttattgcgccatcaaagacggtccacggtagaccgggtgcacagaggcggtctgcgaaaccaatggccgagatctaatctaagccaaacggacggccgagatcgatccggtccaccacgggtctacggctgactaagcactgacgtcgatgatgacgtcatcaccggcggtggctcggcacaccatgctcgacggcgaacggcggcgaggcggcgcaaacggagggcaccaacgcgtagagctcggcccggcgaactcaccagcggcttggacgacggcaaacgatgacggatgacgacggcggcgaggttgaagcggcggcggtcttcaggtcggcggtgacggcggtgctccggcgggaaacggtggcgacggaggggtggacgaggtgctgctcctcctcgcgatgccgatggtggcgacgacgaccgaaggcggcggctgcaacggcggcgtggcgcggctggatcgacggtagcagtggagagctttgggtcaacggagtcggcggcgctccgacgtgctacggtggcagcgaagcggtggacggggaaggcgacgacctcgcgatgctaaagaaggagacggcgatcgacggcgacgaccgaagcgacggcggcgcccgactggactcccgccggcggcggcgacgcaaagaaccacgcggagacggcgctagagaaggcggcaagctagggcgaaggtggcggcggatagaggaggtcccggggatccatttttaggggctaggaggcggcgacggaggcccatggccggcggcaaggagatggaaagttttagggttagaagagagagattgatccgaatcgagctcaaatccgtcggtttccaaacgaaattagcccgggattcctaaagagaaaaggaagaggagatcgaggagattatttcccctcaatcaattcggccgaaggaggaaggagacggccggattttagaaggagatcggcggcttgcggcgcggctaggagcggccgaaggttgaagacgaatgacaggtgggccccacctgtcagcggcaccgagagagagaggagggagggacggcggactgggccggctaggccggacgcaagcaggccgaggagaggaagagagacttgggctgactttcggcccaaagctaaaagagagattttaaaacctttttctatttaaattattcatgaaatgatattccattgattaaaaatacttccttggctcaaataaatcccagaaaaatctatgaactacagaaacaagagaagtatttaacaaaattttatctaacccacttttatattgagatttaacaaattaaaaattagatcttctcttttaggcttttaagattatttctaaataattccttttagacaacaatttatattttaaggatttttaaacaagaaaagcactgaacataattataattagatcattaattgattaattaattaatttagggattgagctctgaaaaatccgagaaaatttcagagagtataattaatcatggagaatttaataaaatttaaatccatccatgttttaaatttaggaaattttatttcccacatttaacttcacttgtaaattaatgaacatttaatataatttctattaatagtttattaaataatttataaatcctaaaacggaaattcaggctgtgagaggagaggaacgatgcggagaggagcgatgtgcgcgtggggccggcgaagccaagatgcgggagaggagaggaggggagcgatgcggggaggggaggggagcgacgcgggatcaatgcgcgtggggccggcgccgcaacgagatgcgggaggggagaggagaggagcgatgcggaggaagggctcgatgcgaatctaacggtggggacaaaaaggggtgacgtggaagcaccaggaagcagagaattgtagtagtggggatgatttgtataggtatataggattccttgtaaatacactacagtgaagtagtaaatgcatgtctcagttgtaaataagtttccttgacactaaattaattattcaaattagaaaatatggccccataactataaatatataacgcactgttggtaacgcacaagatcttgttagacattagatctatgttagaatataaaaattaatgctctttagcattcgataatatttttatgttgtgttgcaatggttgatcccactcatattcaaaagaggaaattgaatttaagcagtatgtcctctatttcatactataaaatgttttggttttttaaatagattcatacatggatcaatgtatgtgcttcatatgtgtgttcaaaaaaactcatgtgatgttggtgaatatagacaagggatgaagaagataaaattaaaaaaatgtttctctaccctataccacaaataatggggtcaagacttcaaagacaaatgccacttatgtcacatcattgtattttctatctatataatcacatggaacacctaaacaccctctagaatccttcgcatccatataccccaattcatctgtgtcctccccacaacggtcgtcatggatatatcaatgcagagcttggtacactgttgtgagtatcggacgttgggcacaatggctgaaccgacatgggccctagtggggagtcggcgttggtgacagaggtcaactagatatatactggctcattgatgcagtcctctatgagtgtgatgacgatggactaggcacccgatgcgaaccccggcaggaacttaacaaatctcactgaggaagttggtccccaataatattttgattctagcattataaatttttaaaatgcatttaagtgaatttataatatttcattaaaaatattagatgcacctgcatataatgtggaataatgtgaagataatgtgaggatgatgattgacacgatatgaaatgcttggagtaataaattgtaaataatgtgtcatggttgcgtgagctttaaaattctctaagacaaataattgctagtgtgtgatgatgtgccatatttagtgatgaaaacagattagaaacatatagaaactagctctaccatatccgttgtcatattgtttttctgaattggaataaaaaaacatggatacaaaaatggaagtgaatattatcaaatactgatactgagcgaatacaaaacaaaaacagaatgaatacagtaacaagtatttgacaggatataaaacccgttaattgagcttccttaatctaggaagagatatcgctggttattttctttgaaataaaaggtcactatctccaaaatttatatcgtcaaatttataggtgattgtaaatatgattatccacttcatagtcccaagatgtcttatttgatgcatagcttacttaccatatcatgtatgttcttgttgtatagattgaaaatgttattcactttattccgtttcaagtttttacactttaaatattttaaattataaatgtcataaactatcccattcaactctacaactttcatatagagtttgtttccatcaaatgtcatttgaattgtacattacagattttgtaaaagcagatatgatattttgtaatgaatatttagaccccctaaatgatctcaaataataaagtcttcagcaacaaagttgtagatctctcgtcgagctctacaattttgatgtaaagtttgtattcatctaacttcatatgataaagttatgtatatctatgtgttttttaattaattaatacttgcggtctacggatatctagagaaaaatccaggatactttccgaccgtttttcaattccgatggatagtgtccttactgtattcggttctattctgagaaaatactcagaatttgtttctatatccgaaaatatttggaactatctaacgaacctatttgttttaaaaacaaggtccgaactgacgaaaaatatgtaccaatttcatctctagtcgttacatgttaagatttaaaagtagtgggtactaattatatagaaggtatagatagattgagtatggggggtg

SEQ ID NO: 26452 - DNA, 5585 bp, Oryza sativa
caaaaaatgtctacgtttagtttgtttccaaaattagcaaatacataggaaatcctgccaaaatttggtaaggtttattttagctacaatctaaacatgccctaaattattaaaaaaataaaatttgcatttatttaatttttaaagcaacttctataaattcttttttgcaagaaacgctaatgagaaccgaggaagaagccaacccgctcttcacttttgaacataccctatgtatggttaatgctaatttatcctctcgtgagatcacattaccttaatcgttttaagcccttagattattcatatatgctatgaaatgtccttcttctctcttgaaaccatggacatcatctcatctatattatttttaccaaaccatcccaattattttaaacatttggatcactgatctattatcactcttatcttattgatctacactatcttaatatttctagcattggaggatctacggaagatgtaattttgtgtaaagcacatgaagttaatttgtctagatacaaagcaaattcattttgtgcttcaacttgttatcatacaattttccaattaatgggaagatgcgatattttgtagtatctctagtattttaaacaaaattaaaaataatgcttctgcgtgtgagtgggttttcttcctagtggtttaaatacttgcgaaaattcaaaaaacaagataagtcattgtgtgacatgtcctttggtaaatttctaaggtcaaaatgactttatacacggagacaaacaagacaataaaaagtgctgttgtatttacaattgaatttgttttttttctccatgtgggtaacgaatctaaccttctatatttttgtgaatagatatatgatcacttatatgttttctaaggccttttcatcttgcttttgaggcactagctgatttctcggctgctcgctactgtgaaaattttgaggcaaagatcctgtttagatctcaccctaaaatttttcaccctatcatatcgaacgtttaaaaacctgcatgaagtattcaatataggctaaaaaataattaattgtacagattgcgactaatttgcgagacaaatcttttaagcctaattgctccatgatttgacaatgtggtgctacagtaaacatttgctaatgacggattaattagacttaataaattcgtctcgtggtttactaacaaattctataattaggttttttttattagtgctcgaacatcctatacgataccctatataatattcaatgtgacaggtcaaaactttacccccatgaacacccccaaagttgcaaagacctcatctcacacagtcaccgactcacagtactcgtacttgtcagttgtcaatctcgacacggaggaagaaggtagctgataccttggcgcgctatccatggctgtccttgccgactcagcagccaggaagctcctccatggcgcctctgctcagggcgtcgccgccggcatgagccttggcctcgatggcctgttgcagctcgtcgccgacctcttcgcgagcctcgtccacctgttcgtcctcccgttccgggccatggggcatgccatccagtggttcttcgccggcgtcgtcgctggtctcgggggcgccgcgcgcgtgctcgtcctgccgctcgagacgctgtcgcgctggctgcaggcggccgtcgccggaatcgcgagcgccgcgcacctgctcgtcctgccgttcgaggcgttctggcggtggctgcgcgacgcggccgccgcggcgctcccgtacgtgctcgccatcgtcgccgtcgtgtgcgtcgtagcgcttctctggctctcctgcacgttcctgtgctccgccgccgcgctaatcgggccgccgctcgccggcgccgccatctcctgcggggcgttcctgctccccgccgccgtgaggaccgggcaggcgctcgtctacgccgtctgctacgccgccaggggtgccggcgtggtgctcgcctgggtgctcccccgctgcgggcggtgctgcgtcgtcctcgtcaccatgaaggcccccggcgccgccggcatggtgatctcgcggggagcgttcgaatcgctcccgcggctctacttccttcctgatactgcgctccgctggcgccgtcgtggccgccgccgtgttctgcgcgcggcccgtcgcgtgggtgttcgctgcgccggtcgccgccctcttccgcgcgttgtgatcaacaaacttctctctgtgcttgttgccggtaatgcctgacatgacatctacgtacttgtgctatctaccgctagtatattataagaagtatagcaccgcgtaaatagtcgtgtgaactgtgctatcaataattcaatggtatatcgctcaatcattgttgagttgatagtatgtttagtttacttttgttattaatccaatgctacatattgggagggttctgctatttatagactaccagtgtcacatgcgtccctcctaaaataaagtttttttttctcaagagagcacgaactagaatcagttgatagcagcacagatcagtatcgttgtctgcaattgaaaatttttgaattttagatttggttttggaattgattttagggggtttcttatcctcagttttgtcttcgtcctttctagctttgcccaaaatataagtaaacaatctgtacaaaattattcttaactaattaaatattcaaattattttacaccaattgattatgggcctatagcttcatgtatggagtactaaggttgtcatcatttgccataaaagcttactaaacttgagtaaggttaggatttgaacaccttggcaagcttaagcctcatttgaattggaggattaccatatatagttcaacttcgtatcaaaataagaaagagatccaatctcttgaaaacatccatttgctttgttttttttccctatgatgctatcaaatggaccattttctgttttcttacgcttttcattcttgtagaattagagtaacacgtaacttcaatttccgtgttttttctatttcaatgtgtttcctatcatacattatatttcaaaggaggcataagagaaatttactagtagtaagtcatttaggatgaggatagtatttattgttggcctttcctaactaagtgtacgttaaaaataaaggtatggtcaattgtataagtacatagcagagaaactgaggatgcgactacgtaaggcgataggtaatagtagtgaacctggcttcccgggtcctgtgccaccaagagcttcatcggccaaatcctcatgcatagtacactgacgcgctgggtgatgatgaggggagggagatgctgcggtcaaacttgttgcatcggcttgatccagttatccccaagctcccgggggctagatccagtaccccgcatagccgcaggcagccaaatctagtggtccctaggggaggtagataccattgtcgagcggtgcatattggctagatctaaccagcccccgagttcatgacggccagatctagcggtggtggagaaggagaattgaaagaggaagaggaggaggcgcagcagtggtagggacgttggagtgggggttagagaggaaaaggcaaaacggctgttggcggcaaggaggcgcatgcatccgaagaaagagagcaagagagagcagagagacgtgcatccttaaaatcctgatgcccattgcccatcggctcaattcccattgatcagctccgcagccagttttttctacagcttccttaaagtagcacatatatgacatatgtagtgagcttttttttaataaactagcacatatcttataagtgttggtttttaattttagccttccatggggcttgagtgaatgggaaatatgttatgtgtgtaattttaggtgaactagtacataggtgccatgtatctgttcttatatatgtatagtcatgtactctctccgtttcacaatgcaagtcattctagcatttacatatttatattgatgttaatgcatctagacatatatatatctatttagattcattaacattaatataaatatgagaaatattagaatgacttacattgtgaaacggaggaagtatgtgttgttatgtggtagtcttaggttgcttagtttcaacaagtggtacttatcttcttaggtagtttattagcatatgattaattaagtattagaaaaacttgaaaaaagattaatatgtttttttacaataagttttcaatagaaaagtttttaaaatatacattgtttactaatttggaaaccgtgcacgtaaaaaacgagagagtaaaaaatggaaaagtgtagaaaaaaacacaacctttatacttcctggttttttttgtccctttcctttttcgagcgaacttgcctaatctacatatcgcaagtggcatgcgagcatcccatgcaatttttacgtacgatactgatacgatttttcccgtgctaattggtctcacatgcacactgaaaggtagtcctggctttagattgggcctcttttcttcgagggagaatgaataatcgatgcatggacccggcaaattatgtttcgtatctctcagctttccattattattaactaattctttgacatgaccagcagttctgttatagtcaaggctatagcttagacgtacatacagatattgccgtcggaacttggttgattgcaacctccaggcgcgttcactttaattaggaattattatagtcacagcatttaacatgctactaaatgatgtgccttctcctaaaactttgttcgacagtattttcttaaaaaacattattaaatcaacttgttaaactatttttttaacatagtacaaacacaaatactcacaacgcgcgcatactcaccctataaatgcacacatccacacatcattctcatgtgtgcacctccgaaagactacaccggtatatcttgagattgacgaagtaattataggtgtatcactatcgacggatacatcacctaaaaaaaataattgccataaatatgagtactcgtgtcaaatctaaaacttgaacctggtgagttggttccttaaaaaaaaacttaaccagttgagctattaatcaatttgttaactttgtaataactaatttgtttgtctctcgaaaccgtgatgaactcgaataaggatcgactgcagctatagtagggactccaacttaagcagtcggaatcatttttcaccttgatacgaccaacggttaaaatctgtgccacatcggttctaaaaagtttttgctacagtgttcgcgctacaggaaacatccagctacagtatttgtcaaaaaagttccaaggaaaatcttggccgttactttccaatccaccggtgcctatatgacagtttaagttgcagtggctatcccaatttgatgaactctcccactacatgacgagcaccccaatagaataaatgaaaaaaatgtaattgcagtggcaaactcctatgacatgttagcaatggttgttcatggagttgaaaaatggctatggtaacctcagaagaaatgaaaaaagatatataaattcgttttt

SEQ ID NO: 26453 - DNA, 12777 bp, Oryza sativa
tgagtgaagtgataggctggctctcaccaagtcgaggaggatgttagatggcttgaagttagtagatggccagcgtgtgagcgtaatggaggaagtcgagccccttcgccatgtcggcagtggtctgcatcctcctcatccgttagaatgctgaccctcctctctctagccccacaaaggcagatggtagcaaagtgtggtattgtccaacccaagaattccaccgtggatatgtaaatgtggaagaaaactaaagaagcagagaaaataagaaacaaaaatactgtgcagcagacagcaagaagcctcaaataaaggaaaataataagctagaatgctccaaccaacctaagtttttagtaaacacattgagtatttttctgcaaattattgcacccaaatgaaactaaccagatcgttgttgttagcacgtagtaatggtggcatcgatgtcgtagccagtcacccaatgtcagccacgatcatcaccccccccctcccaccttcccactacgtcggatgccaggatgggtggcgaacaactgcgttggatgctccttcccggcctcacctcagcacggctggttggaggcacaggctggttggagggtgggcgcagggtggaggtaagggcaggcgccggaggtggcaaagaggctcgggcggtctggagagcaggcaccggcggcgggaatgggcgatgatgctccttcccggcctcagctaagcatgccggcagtaagggtggcacgggctggatgggcggatggggtggaggacgagtgccggcagcggagaggcacgggcggttgggatgaaaacggtacggaatatttctagattccgggcatgttttcggaaacagaataagccggtcggaatttttcggaaacggaaatgaattcagaaatattttgtcagatacggaatcgaatataataagaacagtttccattggaactcggaatcggccggaaacttttttgaaatttccgaagtttcaggcccatacagtacaatagtccataatacattaatacctccctatcccaacccaattcagcataatacctcccatagtccataatatctcccctaacttagagacttagagagtagagagtgagggactgagagagacatcgaagattcctgagccgggcggcggagcaacgcatccagatctcacgttgcctcgtcccccgaagtctgattggagtttttgtccatcgaagtttaaagctcggtttgagggttttttttaattccgataaattttcgttatcgtatccgtgctggttcattttcgctctgttttcggtttcgataatatttaattccgtttttgtatctggggtttccgattccgattccaattccgaaaaaattatgaaaacgaaaacgataaggtggtttccgtccgtttccgtaccgttttcatccctagcgggcagtctgggtggacgcgtgggtgacggttttttttaagagaaggattagagaagcgttaatcagtgttaatcgcagtgttaatccaacttgcaatgtacattgttagattagaggatccaatggttaggaatcttctggttacactttcttaggtggatgtggaaagaaacaaccagtacttttatattagtactagcaaattgacacgctcagttcatcgttcgtatatattttgtagggcacatttaaaaatagggaatgtttcaattggaacatgttaatttgttttataatgtattattgtattacttagatagctcgaaaaaagttatcatgtttactctggatgatagaaatttccacattagtcactaagaaataaaaaagatttggactattagatcatgatgggtttatagattaaaacatcgtagatacaaaagtacaattgtagttatagaaacaaaagctagctgttgtatatgaaatccaatcatattgaaatatatattgcttagaaaataaaactatatttcggaaaataagatttaagtgttgtatattgaatataattctacttttaaaatttagcactatgcaatttgcaaaatgatcccctggtttttaattaaacccaaagtaaattgtattgttatgaaaatccttcgaattccactatttttatccaaattgtttaaggcttctttgtttgtgtaaaaccataattgaactgtctactaaattgaattctgtaatacatgaattttttaaacacttgcaaacaaaaatatcttggatataatataaatcacaaatctatcattagagcccatatatttctaacccacattattgataatttagaccagaccatatatttttcttcctttttccttttctatgggccgtactgccaatgaactctatcacctgcaacctgcaagttataatgtactcatatatgtttcttcttgaaatcacctgagccctcccaacagtaaatacaccatgaaaaaaatgatattttttggtgaacttagtgcatcgtatggcattcattggctgtactcttaggatttttttttctcaccaatgatttagagacaagtgtcaacaattagaggggaagctaagcaccaatcagcccgcagtaaataaattaaactgctagcttagagacctagatatatatgtgcatccagatgttcgggatgacgtactaaacaatatggtgatccatgatttcctgaataaacgtggaatcaatcatgttcgggatgacctacttaacgattccatgatcgatcatgacaaataatttatattttttttattccgttgctatgtaataaaataacaatttagatttttttcatgattgaccaatgcaataattttatttttaccggtgcctgtgataattttttaataatcagtatatgatcaataataatatatatttactagttaaaataaaaaggggagagcgagagagctggagccttgagggagatgttagatgtgtgcacgtaggggaggcagcggtatgtacgtacggacttatcatacctagctacgggatagatacgcacaggagggaggtggaggttgaagggattttttttcttaaagactaatatgatggttcatactaattgattaatcgatttaaataaaaatatatgattagattttcttaatcgatttaaataaaaatatatgattagattttcttaatcgatttaaataaaaatatatgattagattttcttaatcgatttaaataaaaatatatgattagattttcttaatcgatttaaataaaaatatatgattagattttcttaatcgatttaaataaaaatatatgattagattttcttattgccacatgacagtttaagagtatttttaggaagcgtgtgtgacggtttgagagtgtttttaggaaatttaatggatataagagatactccctatgtcccaaaataagcacagcaatgagttcctatctccaactttaattgtctgtcttatttaaatttttttaaaaaaaataaaaaaaaacataagtctcgcataaaatactattcatattttataatctaataataattaaaatacttccagtcaaaaaaataataattaaaatactaatcagaaaaaaatttaaataagttggacacgaaaactcatgattacgcttattttgggacggagacagaacgtaacaaacttttaagcttttgagttgatcactgttgcaaatatgtaccgtaaaacttaaacggtctttatttttctctacgccatatgctaagtctaattgacaggggtttgtattccctctgttctcactttttgtttttcactagtaggtaaatactttatgataattcgtgtccagaatggattggtatgccctctgttctcagaaaggattgtctattggggattgagctgttgataatgccacgatgttccgatcctggtgaggccggagagtacatccctctttcctcagtcttgtgaacttcacttttgtgcactgcacatactgttgtatgtgtcgtgctgttaaacatttggcttgggccttgtttagatactaaaatattttggccaaaaaaatcatatcaaatgtttggacacatgtatggaacattaaatgtgaaaaaaaaaccaatcacacagtttgcatgtaaattgcgagacgaatcttttgagcctaattatgccatgatttgacaatgtgatgctatagtaaatatttgttaatgattaactaggcttaataaattcatctcgcagtttacaggcggaatctgtaatttattttgttattagtctacgtttaatacttcaaatgtgcgttcgtatacttcaaaaaatttatacccaaaaaactaaacacacccttggtatatttcttaaaaaaaaacatgtggcttggttataggtgctgattcccacacaaactggttctatctctaggaataacggtgtgcctcatttatttgaagtacatatacatacgtgttgaataaaacgatcaaacgatggacctatatagctttttttttccaaatttctctggctttgatgtgcacaagtctgtgtgagagtggttcatgtcgtatggacctttgtagcgtgtgtgctagaacaagtataataggggctgaagagccggtgataacaaattcaaagactgagttaatctcacataaagactgagttcgcactaaactttctccaaactctcaactttccatcacatcacatcacatgtattcaaaacttttttactcacataaactcttaactttttttccaaactaccaactttcctcaaatttctcccaatttcagaaactaaacacagcctagccaaaaagctgatgagagaggatcactcggcgactaattagtcgctagcgtcacacactctctaaaaatgtgggacccgatgcatgctttctacaccatacaaaatgaagatatgatgtagaatgtgagagaatatagaataaataaataatagactatattgcaactacttgttgtatctattaactttttaccatggctatagcacacgtggcaattactggagtaagcagcgagcgcttctgatgcctacaaaatagtactccctccatttcataatataagacacaaccacttttttttatgttctataatataaggcatgcatgcatgtagtcaattaactataaccccttctccattaaattattacttttttaaatcctccactctcatgttccctaattatattggatgcatgcattgtatttattaggatgattcaaactacaagatgataataattattttgtggcaaatgcttaccatcagctgtccgacacgaaagaaaaaaatcggacgcctcagtccaaacgagcagcaggtgcatagcaagtctgagcgtgcatgcaagcatattttaaacttaaaaattttttttctctcaaactatttatctgaatttcaaactaattatatcgttggatttgttataattaaatctttataataagatatcacatgactatattatgatgactttttttttactttttaaatgttgcacacattgttaatgtatgttccaacaagtatttattaatgtttcactaatgcattagcaatgttgcacattattttttatatgtttcagcaaacattttttttatgtttcaacaattacaattcgatgcaagctaaatacaaaaatattttaacaaaatcaaatatttgcaaatgtattgtatcatacgatttcttttcaatgtttcactagttgggacataatgtttcatgtagtgataattactgttgcagtcaatactttttatatgttgcatctttggaacattttatgaattgggttgatgcatctgcacaagtgatgaaactttttttagacggtgcaacataagtttgatttttttaataaatattttttatcaaaatatatccatgtgagatcttgttataaagatctaattatgatgaataaaatggtgtaatagaattatatattgaacacatattttagaaaaaggaaaagggagagaaagtagagaaatacatgcatgtgacatacgccatgcatgcgccacaagccaacatgcaaacgacatacgatgcgcatcctgacggatgtgccagacgccaaggatgggcggtcgtccgatatttgataaaatatctgaaaattcttgaacctgagcgcccgatccggcgccaaacaatcgggcgatccctccatgtgccgcgcttcccgcgtgcgcccgcgcccgtgcatgtgtccccaccactgcgccgctcctgccacgtgtccctaccacgcacaacgttgcaacaaatcacccacatattttgaaaatactctattaagagaattcgttttatttgttgttccacataaaatgtttcacctagtgtacttacaatgtttcactatgtatagatctaatgttgcagtgaactgaaacattctttcgctatttactgaaacattgtttttatataaggtgaaacaatgcccgatttaaacgactaaaacattttcgatctacttagtgaaacaattccgatatacttggtgtaacatcgtgcaacatttaaaaataattcaataataagctaaaaaaattttcgtcggaatatatccatgtgtggtcttgttttaaagatttaattgcaacgaatttaatggtgcaattggatcatgatttggattaataatttaagagaaaaaatagtttaaagttacaaaacattaactatccctgtcacacatgcaattctgtatgcaggaaaagttgcatgcatgcatatagctgcgcgggagaagtttgcatctaacagtgacgacacgctatcaatggttgggatttaatccctcgatccgatggctgggatgggcgtccgatttttttctcctgatcggacgtccgatccgtagttctctccttattttgctggtctttgggttaggggtggttatgccttatattttggaatggagggagtactactaaggccattcccaacccaatgactaggatgatgtacatagtattaaataagctgccatctaggatggaaaatgatgtggcaagtgaataaatgaggaaagaagaaaagaagagttcaagtagaagtacaatctaaaaataactgaaattcagaattaaaaataggcaatattggaggaaggtccatataggaaccgaatacgagattaatcaaaattcggaataaaaataaaataaaatccaaaaattagcaaaaaaaaagaagaagtgtccaagtaggaaaataatttaaaaataactggaattcagaattaaaaataagaaatattgaaagaagagtccataccagaatccaatacgaaaataaaattcagaataaaaaataaacgaattgaaattagagaaataaaagaaacgaagagttaaagtaggaatacaatttaaagttacctgaaattcggaattaaatataaagcaatattaaaataagagtacatataagaacccaacagtagatcaactaaaattcagaataaaaaaaataaaattcaaaattaggcaaattaaaaagagagttaaagtagtaatataattttgaaataattgaaattgaaaataaaaaataaaaatatcaaaagagcacaatacgaaaaataaaataaattctaaaattagataaagaaaaataagctttcaactaggaatacaatttatgaataactaaaattggtgataaaaaaaataaagactattaaaagaaaagaccatctaaaacatatgacgagataaattaagtaacaggcctataagggagtagagtggcggcgattgatgggacatctaaaaactattaataaaacaccaaatagaaaatcctaatgacggttaaaagtaaggatgacgggtaggtcgtgaagcaatcggtcaaggcggttggcgggacttctagaaagtaaaaaaataaaccccaatgataatcatatttgatttttaaaatctcaattacgataaaaatgagaggcagcgggcggatcatataggagtataatgggagagccgtcgatggttggcgggtcttctataaagtaaaaaagaattccaacgatagttatatttgatttttacaatcccaatgacaataaagagtatgcggcagacaggtcatagagaagtatagtggcagcgtttgacgggatttctaaatattataaaaaataaaaccgaacaagacaataaactctaaaactacaaggtctaatttttaaaggctcggaacttctaaaaagtaaaaaaaaacaatgataatcacaatgacaataaagaatggaggcagcgagcgagccgtagaggagtacagtagcaaagtcgctgacggtttggcgggacttctagcaaataaaaataaacccaaacgataataatgttcaatttttaaaatcccaatgacaataaaaaaaagaggtagtggacgggccgtaaaggagtataatggtaacgtttgacgggacatctaggaatataaaaatgaaactcaacgtgacaataaactctaaaaattataagatccattttttaaagattctaaggagaatgaatagaaatagtggtagatcgagcaagcaaataaaaaaggggaatttgcaaatttgccaccgattttttcaattttgcaaggatgccactcgaatgacagttccactggtatttttgcaattttctagtggcagttttgcaataacgattcagagcagcaaatttgcaattgccccaataaaaaaggagatgacataactaaggggtagtaactggtgtgacttttaaaaactatataattggaaacacgaggatgataaggtttggtctttcaaagtctcaagtcaaagtaagattatataaaaaaaaatatatgattttgtttaggtgctagtcacgcaattgcgtaggccacccagctagttttacaaaatttccaggaaaaatctgcaggcaaaaattcaaaattgccttctctcacctccgactaagcttgaggagaaggggattgagaagattgggaagatacacaaaacgaggtgaaccattagcgcataattaattgagtattaactattttaaattttaaaaatatattaatatattttttaaagcaactttcctataaaatttttttaaaaaaacacatagttccctcaatctcaccagaacgaacgcaggtaaatttgaatttctggaagaactgttacaaatcgtctgttaacttctggaagatgaacagtatacgatcaggctgagaaattattacctgatgcacacaatggcacaactctcctactcctatcaatcatatcttaattcattgagatttgttatggtccagcagatatagtaccttgaggtactggtaccaccagataccaaataaaatcatgccgttgaattacaatgggcacgattggaaacgggctgaaaaggggcggagaagacccgcgacacatttgcgtacagacgttgccgcaatctcctcgttctcacctgccaacgccaatctcctagccgtcgtgcgcaggtctcctccgtcatcgccgccaaatcctcgattccacgccgccccctctggtgccgagggcaaatactgctgccacatagcgcagcagggaccgaatactctctagttggcctcaacttcacccggtgattttgggaaaatttcaattcaaggttcatacatcggcaaggtgtacggcaatatcgcatcattgaggtggtcagcttgattgctccgccgatgttgctgctcacgccgggccgtgactttttctagtggcaaatcaaactatcaatacagagttgtgtatatgtccgcttaatgaagaagttgcagcgccgttggcagggaaacaatggaggtcagtcggttaggagattcctcccaagtccgttgccagcgtagaacgaggggtctccgctgctgttggccgctcccatggtcaccgcctccgctgtactagtgctggccatcggggaggagggaggaggaggagttcaggagatctcgatttggtgctgctactctggacgacggtgaggaagtgaggtgatctagcacgacgacggttggactcggcgagactccgccacccaccccggcgtccagctcgcaggcaaagaagaggtcctcccctagagatggcaagcctcgaatggacggccgcgggagggtaggcagcttcatcttccctgcttcgtctccactcgtcgtcggcttgcttcagcttatatccagcggcctccctatcacgatgcagggaggagacggcgaggccgcccccatggcttcgcctactggtcttccggcctgcctgaccgtgcggggcgagccctcggtgccgcgcggagacgagggaagggcgatgaggacggggctggaacggtggcggcaacaggtccagtcgctagcttgcattgactccaacaatcgctaatgcgaaaagacaaccttaccctctcacctctcaatcatgatgcggtaccctcccaagtacctggcggtaccgacggatgatagctgttggatctgatccaatcgatggctaagatttagtaccgccccaatctattggactgtaaaaaaaactctaatttattttataacctaagactaagatttcgtctccgtacgtcgatggttggacggtacatttgctcggaatcggccgtggcgcaacggcaacatgaactgaatcgcaattcgcaatgtcttgcacctaactaggagtgtaggactttctaatgcatctatggagaatgccgagccaccgactaggtaatgtatctgatcgaggttggccatggttggcgtccccgagctggaacccatcggccgagcactgcgctgagtagtcgccgacttgatgaggctgccaccgacgtccatggcgaggaagccgttgggcgcgtcggcgaagtcagcgccagtgctggaggcgatgggctgagcctgcgcggcgagacagctgccgtcggctcgtgggtggttgtggcagcggcggcaacggcagcgttgcgtgagaacgactggtcgtcggagtagttgatgtcatctccagccggcgttgtctgcggctggttgccgccgccgccgctgctgccgacgtacatggctgatgacaggcacaacgacggagtcgggagcgcccggctggatcgggatgtgcagcagatcgggtccgccgccgtcgccgttcacggcgttgccgtcgtccagtagacccagcgcagcgcctcccgcctcgcggtcgcggccaccatcgccgcgtccatggactcgagcagcgcccgcgcctcctccgccgtactgatgtagctgaccgtgtcatcccacaggtgcacgcagagatcgcggcactgccgcaccatggcgagcttggccctctccctggcgagcttcaactcgaggcactctcggagcgtgtgcgcctccggcctaggcaggatggcgcggtacgaggcgaggacgccctcctccgactcccacaccgccacctccgccgtcgacaccgcaccgccgccgtctccgtctccggtgccggggccgccggcacagaggagagcgacgtcgacgccgcagaggatggagagctccctcgcctcctccatcagggactcctgcatcttcccgtacgtggcgtcctcctccatcttcatctccccgtacgcggtgttcgccacggggaccgcctatgcatcacttggagggaccgcctatacatcactggggtgatttttgagaaaaaatcatccagattttttcttcctttggatttgcatccaacggactacaaaataaaataactaatataaatttacttacacaacattttcatcaaaattacagtgcacttatatgtcatatcaactaaatttacatatgtaattttagttatataagactgtaattttatatttgaaataaaataactaatgcaaatttacttacacaatatttttatcctcaaaattacagtgcacttacatatcatatcaactaaatttacatatgtaattttatttatataagactgtaattttatattttaaagaaaataataagtacatatttacttacacattatttttattaaaattacagtgcactcacatatcaaatcaactaaatttataaatgtaattttagttatataggactgtaattttatatttcacgacaacgatgagagggacggtgtctctcgccgatcagtgttggccgtgctaccggcggctggctcgccggtcagaggccaccgtgtcactgtgcttctccaatctccgttatcgtgtgcgcttggggtagctagacccgaaggccgacgtgctggtgtccgacgcgccggctaacaaggctgcaaaaaaaacgtgaaatgtcagcaaaagaatcacgcgagtgatcgatagcaaaatcgttggcgacgtatgaaaatttggccacgcacgaaaatacgaatatcaagaaaggatctaatatcaaataattagaaggggtgaggcttcgaatttaggtcgtctaacccatcacaccttgatcgcccacgtacgcttcggtcggcagtggtcgttgctcctccgatccggccgtatagttgtttcaaaagcttccaacaagtccggcgcgtttgcccggcggcgggcggtggcgaggaggatatatatagagagcgagaaggagacgcgcggactcgtccatctctagggggct

SEQ ID NO: 26454 - DNA, 12689 bp, Oryza sativa
aaatgataggcatactttgtgccatattccctatttcccgtccatctccaataatcgaatcctccactccttttgtcagttccaagtattcaagtgctaggacctcccagaatttcatgtaatctgtaagaaagggcgacaatgaggttgtgccaaatgtcattgatccatcttcttgttgcagggcatcctgtaccatgtggtttttcctcttggagttgcactagaggttcggtgctaggcttttgaagctatggccgccaatctagttggattccaagaagtttgtttttgcctattaccgataaaaactctagtcaatatcgcgaacaattccttattgagttcatcatagggtgtttcagttttggcgccctccattcataccaaagccatctcagccgtaggctgtagcaatttttccaggttgggtacttcaagaccgccataacagatgggggaacatacctgaggccaaatttatcttgtattttccccatgcatctcataattaccggctcataggaatcatcttcttgcttcgtcaatttctcgaaggtatttctttggcggcttcagttgagtgtaaaattaaaggtgtttttgattattattctgtgatgaacaattgacattgaagattattggttttgatatttggaatttatttacgaagtggttttggagatgattggatttcataggtgatctacaggtactgctgggtgtggtccggtcagaccgggcaggtgttgccgatcagaccggcgtgtatcgcgcggtcagaccggtgcagcccgcagtctgaccggccgacgctgtgtcggtttcggtttcgggttgtttgtttggatatccatgattgtttatgtttatagcttctagatggatactatgtgtatgtaatactgttgtttgctactaatgagtcaagttggggatacgttggtctcggaatatggtttctttgtttgttctatgtgtaggtgactcgagatgccgggagagtatttgcggtgattgaccgggagtcggcttggggatgagacgatgttcgtggtggtcagatatcatgcgggatactaaggctagagttcactgcacgtggttggtgaagattccatatgacatacgatggaggtattgtgtgcgtatgggatgtggagtcgaatttggaaggagtccaaatttggtatgagtggttatgtaaagtttgtttcttgtacgagaaggtttcctatgaggattaggacttctagtatgagtttggttcgtggctttaggctgcctacctcatgtataaatagagagggagcgtgaggcttccctgtatcattttagagagcaattgagttgatagttgagttaggggtttgagtttagtcgagatttttgtaaggagtgctgttggtgcactttgtaaacacagagagaatcaataaagtcgtcatccactttaagagttctttgatttgtgtttcactgggtttcggcggtctaattggtggcacaccggcggtcagaccggcggcgtaagggcggtcagaccagcgttgacgacaggtgacaggagctgatctcggtggtcagaccagagatacaatctcggtcagaccgacggtaactaggcggtcagaccggcacatctacttcggtcggaccgcgatctgtcgaatttgagggtaacttttatttccgctaaaagttttggttttttagcataccaaccattcaccccctctgattagcttaattgttgtgtttcgatcatacattgagatggaactttggaaggtggcgcatgcactctgatggtggcttggtcttcgccgggtaattaattccatgttttttcgtacgtgctatatgtgttttgggtgtccaaaactatttcaagatttctaatgtttgtacgtttttcaaattatgttgtgccatataatgtgttccatttctttcaatcaaaacgcattgtcgataaattttgccactccatgcatgcatggatggtaagccaattttctttttccaagttcatgtcatggagtagtaaattctaaaaccagggacttgtggtcagttttgatggaatccaaagcgtagcatgcttaacatgccgtaaggtgatttatacaacattaattagttgcttccaacacgcataaagaaaatatattttatctcaagtacagctaccaatagcaacttcgacagaccactagtattaattaggtcggctatataatttgaccgggttaactcataatttactgtatacacgggagaatcctgccattagcagccgcacaacatttttaattcaatagaggtgctggtctgctggatatgccaaatagggcctataccagtataaaatcttgaagggtggaaatatggtaaatataacaatcatgcacgccgtacggatatgccaatttaataatttagtgcagctgtacgttctctacttgcaactgattatatatatacacaacaggtaacatagtccgcaaggcatttcaaaagcccctagagagtcaaacatacgtgtccaattatctaacaccctccattccaaaaatgtataagaattccactcttctagtttgtcctaaaatgtctgatttttctaaaaactcaaacattggttcacctctaaaagaaaaatgttttagcactaagacaaaaatgttttaaaatattaaaatggtgggactaagtcgaatcaaagattaaaacatttcattttgactgatgaaacatcaagctttaattgctaaaacattaacggatgtttaagaaccgaagacaaaagagttaatcccttgtgtacccatgaaaatttgcccaatctcttctataccttttaattttactcgaacccctctgtacccctaaattctcgctttgatcccttccatacccctcccgttaggttttcttcattttatagttatgtgtgattgcaaatgtctataatgccctttagatggaggagcaactgcaggtagattggaaaagaattggaatatgttgaccgcacagcatgtgtattttatgagactaataatgagtttaaaacttttattgtggtattggaaaaaaaaatgcaatccatcgaacaatttgttttgaaaaaaaaataatagggttggaaaatcaaagtgacatcagtttgctctgtaaaaaaaattggtacactcaacaggaatgtggacaaaggagaaaatctgtgaaacaaaataatctggatcaataagagcatcaagagcatcatagatcatcaatcaaaatagtagtaaccatacagagcacttcatatcaattttattttcatcatccatacagagcacttcatataaatttcatacaattttattttcatcatccatacagagcacttcatatcaatttcattttcatcatccatacagaacagctcatatgatgcacataccacaatttcatttccatacctaatagtgcaggaaccaaaccaactttccactccatacacaaatgttgcaaatgacagatcaaatatgtcaaacactttgtaaggcatcacaacagcaaacaacaatgaaaactgcaagaagaagaaatgaaaattgctgctactcctaccagtagggcggcgcagcgacgagagggtatcggactttggccgcacgacaggaggaaggtggccggcggtgcctgcgacagagggctatgggcggcagctgcgcgactggaaggcggtggccggcggcgcgccaccgcgcgacgggagggcggggaccagcgacgccctacctcgcgacaggagggcagcggccgacggcgcgcgcgacgggagggcgtgagccggcggcgccccaccgcgcgatgggagggcggcggccggcggcgccccaccgtgcaacgggagggtggcaggagggcgttggccggcagcgccccaccgcgcgacgggagggtggcggctggcgacgccccacctcgcgacgggatgacagcggccggcggcgcgcacgaccgggggggggggggtgggagccggcggcgccccaccgcgcgacgggaggacggcggccaccgcgcgattggagactggcggcgtgcagaggatggggggagaagagaaggagattggatctgtttacctagggttggctggcaggggcattttggtattttttgaaaatactgacaatgtaacacacaggtcacgctacagatcaaacggaaacctaacgggaggggtatggaggggaccaaagtgaaaatttgggggtacataggagatcgagtaaaattggagggtatagaagagattaggtaagttttcatgggtatacaagggattttctcaagacaaaaacatgaaacaacataaaagtagctagtgcggattttgacccaaccataaaacatcaagatacgttagctgaaacatcaaaaaatcacaaactttaccagtttagatatggcttctttctcctattcgatgaccaccggctcctttaatctcagctgcagatccatgccaagacgttgcaggacccttctactccacagcaacggatagccgttgctcccccagaggctttgtcaccttgtcattgtcgattttgtccctcaactacgtccgtccattgtctttctctagctccctagccttgatgaactacaacccatggccgtggcctgatacattcttggtggagtattgagagagaggggggttgatcacaacaatgcggtggaagagtcagagagagagagagaggagggaagagtggataaggatgcggaacggacggatgagagcaatgtccgatattttttttactcattggacgcgcgagccagagtgttttagatcttatgattattctaaaactaccagatttttactgggtttttttcctacttattaacttttgtactagttttttcctccaattactaccaccttgtgtattatgattattttccatttgctacatccttatttttttttaaaaaaaaagcataacatgccctttgtttggtagcatgacacctaagtgatttcagggaatcacacaatctagctattttcacagtaaatttcacaaactatcagatacatcgaccaaactaccacaaaactacatatctaacgtcttgtaccacgaaactagagatttagttcgaaatttctcacaaaactacaaattttcgatagagtataaaaaaagattagtaagtagaaaatttatcataaaactataggttaatgctaatttatcctaaaactacaacgtttatagctccaacataatatttgcacgagctagttaaactctagaatctgcatctttgtgataacttcaatgttaaatctgtatttttttgtgataactttaatataaaatatgtattattgtgatgcttggcattaaatatgtagttttgtgataattttaccactaaacccttatccttagttttatgatacatcgtctcagacatgcatgtagtattgaatggctggagcatctatcactactcttacctagcccaggaatgatggctacaagggttaacccgagggtggtatggttggagggatacgcccttataagttggttccgcccttactaaactagcaatgtggtattaaatatacatatacctctcttatgagccaaacatgctaaatcctagttggaccatgatgttactcttaccaccccccctcccggtcaaaggacccaattcctcgttggtccaacctacctacgtagtcacacaggcatatagtcaaatatctaggatcagcctcttaaccaaagttttaaatctccggctatagctgccgctatagccggagatagctgctgggaacggacggagctaagagatgcagtttttagcgctaagaatagcgggacgctaatagcgccatttagccggcaatagctgctaaactggccgtaatttagcgtagctaaattgtaaaacgcggccggtctggcccaagaggaaaccggcccaactagaccagagtcgagaggtgggtaaagtgctgcaaaccctagctcgtaagctcccagcagcacactatccattccaacttcgaagcgctcactctccagctgcaagaaaagtggaggcggccggcggcagcggcgcaaaggcgtccggcggcggcggtggcttcaagcggatcgaccaacgcaggcggctcgtggaggcgaccagcgccggctgctgcttcgagcgggcgtccaaccagcggcggcggctttgaaggcagctgagcagcggcgcaagtccgacgaggaggtccgtcagtgcaacgtctccgaagcactgaagcagcagcaccaaaggtgacggcatggcacaacaatccggtcaattctcacatcctcctctcttttttgcttgtatgttgcagatcttacaatatgtgaacaagttgtccatatttgttacctctaatttcagatacttgccttatgatgtagatcttactatatgtgaattattttctgtcacgaccggaaatcacccaacaggcgttcctgacgtgcgtgtattattccttgtcccaggaggcaaggtacaccaaaagttgatacaattcagagtttaacaagcggaagcgtaaatataattattacacgggcaacaacggcccagcacacaaagacaacgaaaaacagcggaagactagggcgacgaccacaggcgcttgacggcaggcacgagctagacaccaaagccttcatcttcaaggaactcctcatctgggcttgggaaaattaagcaagactgagtacaaccaccgtactcaacaagacacacccacaaatgcagaataaatgcaagggagtacaagggaattatgacataaagggttagggttgcagtaaacagcatttaaagacatttagttgctcaaggccattttgtaaacacgatcctagaactatccaatattattaatcaaggccgtgaacccacacgaacctgccttaacccaaggcctatgatgattcagaccgaactggcaacccgaccctgggtcccagctcgtcctaagccaacccaggccaaccattccacattttagttgttgagcaaattttaagaattagaacactgacttgggtacattgctcggcttgcccatatccgagggctcggctattcgaatagatttactctgatcagaggtgtacatctttacccacaagacacatcttcctcacgtgtaaccacgtgccacataccaccacggtatacagacgaaagacgtgacatagtttccaacccatcctagccttagacaagagtaccgacccaatcccgcctacggccggaacccccgggacaggtagacggaactgagcccctcgcagcagggcaccaaccctgtgctttttgacatctcgactaccgggccgtagctcgtgtagccttcatttgccctggagaatgtccatcgacccccgacttcatccatctccaatccgtgtacttttgtttatgactagactgagccacaaactaagccttacccattagacatgtggaagtacggtagtgctttgcaacagaggcccgagcttaatccttatagtggccggggtgctacttcccacaactggcatgcacccaaaccccaccgaaaacaggttttaggggttttgaaagaggaagagaggtgtgtgtccaattccaacataagccaaccattccatggtgtccaaaggatatgagaatttcccaaagtctatagttataaaaccacctaatgttgcctaattaaattgcgaagcatctacctaaaattaaactagtggtgtcatgagtagagtgtccactagttggggttttgtttgatctagggtgaacaaggtaataatagtaacaatgacaataataatatggtcataacaaaggtaaataggcatggctaagtaaaacagtgataacgcgggaatttaaataaagcgataatgcaataatttaaatcaacataattttataaaatgggattcaatatgatcaagatgatgtgtcttgccttgctcgttttcccaatcgacggcttcgacttccacgaagagcggatcttccgaagctgcagcggctacacgaccaacggaaaagaaaaaggctttaacactaaataactccacataacagcagaaacaaagcacaaaaatgggttctttacatcttaaggagaaattagagacttgaacggtccaattccgagttcaaatggccaagatatggccatttgaagtttatatgctctttaaatggatatttacgaatttcttcatttaattttcaattaaaaaacggattattgcgtcagccgaggggcgggcgcgcggaccgggtccacgggaagtggggcccacgcgtcagccgctcggtccacggtggaccgggcgcacgcggctggcggcggtcggcgccgtgggtcccgcgcgtcagccgcacccgcgggcgcgggcggctgacggccgggcccacttggcagccgcgagggcgcgcccgagggcggcctcgccggcgcggccgacgggagaggacgcgcacccgcgccccgatggtcgccgccggcgaccaacggcgcggcggagtggcgcccgagagagaggagggaagggggaaacgaaggacggtcctcggctcaccccgagacggcgaagacgacggaaacggcggccggagcggaggaagacggcggcgcggttcgggaagacgagggcgacggtgctccggcggtcggcgagcgaaacggagcggcggacggggtcgacggcgatgcggcgatgccgagggaggtggcgccgagccgggaggaagaccggagcgacggcggcggcgaaccgaaggtcgacggcgacggcggagagagaggagcacggcgctagcacgattccgacggcgagagcgagcggcgagcggcggaaacggaagagcggagctcgggcaacgaatatatagcaacgggagggggagagcgcggccggggaggaaggaaaccggccgcgaagatctcggccgccattgattgcgccggcgatgaatgcgggcacgattcgaacgaatccgagggagagagagagggaaaagagggggaatcgggagagggaaacgcggggaataatttccccctcttgattgcacgcggggcggacgggagcggcgggattcgcggcggcggcggcgctagggcacggacgcggcggcgggcgcggcgggaggagggcgatgacaggtgggccccacccgtcagcgagagtggcgggcgggcccgcctgtcagcggcgcgcgcgcgcgcggggagccgatgggccgaggggaaagagagagagagagggagggaatgggccgagccggcccaagaaggaagggggagggggaaaagacttcttttaggattttctttttataaacctttttaactttgttcatttcttttcaattattatttgtgctctgaaaattccactaaaatttatttaagcattttaggcttttaggaaatatacaaaaatcctccaagcctcatttgacttttatctttgcacattttaattgttgaaggctttcacattgaattttaattattcttttgcacaatttcgaggatagattttagagtcgatttgggacgcgacattttcttactccctgagatctctcgtttgcttgttttgcctgtttaggtggtaatgataatacgtgctatatcagtttgcattattttgatgcttaggcagctttgacgctagcattaatgtgggctaagtttgctttttgtataggtaatccgtccagtgctgcctctgtctcagtagaagctggaccaaaacaagctggtatcaactcagatgatcctgcatgggctcactgtttctgcccagacataaccaagaaacatcacctacggtgcaagtattgtgacaaggtctgcactgctggaattacaagaattaagtaccatcttgctggaattaaaggtttcaatactactaagtgtcagaaagttccaagtccagtgcagcaagagatgtttgatttgcttaccaagaagactagtgaaaaggaacagaaaaacaaagaaaaggaagtggccagagctgaagttgacatagaaaattcagattgtgaaagtggcagtgaaggttcagatcatggcaataatgttcttgtggtgaagccaaaggagacaacaggatctagtagctctagatctgtagcaggtggtcatactattgacaagtactacaagcctccttctatagaagaatctgccagtatgacacaaagagtaattaagctaagcaataaggttcaaacagcattgacaactcagaaaagagaagagaggaggaatagaacttgtgagtacatatgtcagtggttctatgaagctagtattccacacaacacagtaacccttcctagctttgctcatatgttagaggccattggacaatttggtagaagtctgaaagggcctagtccctatgagatgagtggatcgttcttacagaaaaggaaggaaaaggtgatggatggattcaaggagcacaaggaatcatgggagctcacaggttgttctatcatgacagatgcatggacagataggaagggtaggggagtgatgaatttagttgtgcatagtgctcatggggtactcttcttagattcagtggaatgctcaggtgacaggaaagatgacaaatatatctttgaacttgtggacaggtacatagaagagataggggaacaacatgttgtccaagtggtgactgataatgctagcgtcaacacaactgcagcaagtctattgacagcaaaaagaccatcaatattttggaatggatgtgctgctcattgcttggatctcatgctcgaggatattgggaagcttggaccagttgaggaaaccattgctaatgcaagacaagtgactgttttcttgtatgctcatactagggtgttggatttgatgagaaagtttcttaacagagacttggttcgctctggggttacacgatttgccacagcttatttgaatctaaaaagcttgttagacaacaaaaaagagttagtaagactatttaaatcagatgagatggagcaattgggttacttgaagcaggccaaggggaagaaagccagcaaagtgatcaaatctgaaaccttttggaaaaatgttgacattgcagttaattactttgagccattggctaacgtgttgagaagaatggacagcgatgtaccatcaatgggattcttccatggtttaatgcttgaggcgaagaaagaaatttctcagagattcgataatgataagagccgcttcatagaagtttggaatatcattgataaaagatgggacaacaagctcaagactccactacacctggctgggtactatttgaacccctactactacttcccaaataagcaagagatcgagagtgatggatcatttagagcaggtgtgatttcctgtattgacaagttggctgatgatgaagatatccaagacaaaataattgaagaactcaacttgtatcaagatcagcatgggagttttggacacgaaattgccgtaaggcagtgaaagaacaaaaatttcaatccaggttcagatctcaacatgtgaacttaattttattgctgaatatcatttttgttgtaatttgtgtaatgtttatgcagcaaaatggtggctgaaccatggcacaagcacaccaaatcttaggaagttggctgcaaggattttgagtttgacctgcagctcctcagcttgtgagaggaactggtcagtttttgaacaggtaaaaagaaatttgtgacctgtagctttatgtgcatgctgtctattttgaattataatgcttatttatggaatttagatctgacctgcagctttgtgttcactacttggcttataggttcatacaaagaagcgcaacaggctacttcatgaaaggatgcgagatctggtgtttgttaaatttaactccaagttaagaaataagagagagaacaagggtagagatcctatagagaaggagtggatgatgttgtggcagatggtgacaatgaattcattactggtgttgtgccttcatcaagtgaaatggatcaacaatgtgcaaaagagtcacagcagcacacaacaccacaagcaccagcaccagctaaaaggaaaaggcctgtgcacgctaagaagaggaaagtcagaagcctacagtctttgatgcgcaatgccccagtgcatcctgaagctccatcatccgactcagaagattgtgatgatggtattccaatgcagacttctgattctgataagtcaccctctccctctccctatgtctctgagaccgatgattgatgactagaagaaatgaagattgcaatattgcctcatattagtaatttagtatccactatccagaattcttgatgacctttgtgttgtactgttgtctttattctagaatgctgtacttttgtgaaactgatgtttcagtattctgttaaccacttagcctgtgatgtaatgtactcatatgaacctgtaatgtactcatttgaattggttatgtatcaattggtaatggttatgaagttatgccaagatcatgtcttttatttatttattt

SEQ ID NO: 26455 - DNA, 4718 bp, Oryza sativa
tcttctctccctccgatccggtgttgcgccatcgtgacggagcagcggcagacggggctcctgccggcggaggaagaaacttaacggcggccgccttgtggaagaagccgaaccgccgccgaccggccccttcccgtggcctttcccgcattatgggggcccccaaagaaaccttaccgccgccgggggccttgcacttgatccgtgggaaaaaaagaaaaaaaagaaaagcttacttatgggttccattcctgtttctccccttccttgccatgttggcatgccacgtgggtaaaagtggtaaaataattaaaatggcatttcttaagaggggaaaaatgtgcaaacctaaaaggggcatttggataattgtccaatctaaaagtggcaaatagttaaatttcccatgtccgcctagaaaaatgtaaagggaaattttgctacaccgcgccagtggacaccgtgccgattaaaataataattttcggttgagaaggagacagaaatcgcgtgaaatattaaaaatgcccttgggcccacatgtcagctctccatctctctttctctctttctccctcctttctctcttctcccggtcatggcttgctcagcggcggcagcgatgcccggagcgcgcggcctaataggcggccgaggacgccatggccgcctcgtcgcaagaaccgagcagctcatcgacacccaaaaccaaatagaggcgcgtcgtcatcgccagcgtcatgcgcgcgcgccagcagccagcatcacggagacttgcagcttcgccaagctgtgcatggagtcgcagtcatcgttgccactgacagcgagggcggcagcggacacgagcgtgctggcgagcgcggcagtgcttctcgtgaagcagaacgtgacggcgacagcatcgtacctgtcctagctgcatggcgccaccgctgccgccggcggcggcgacctagatggcacgccgtacgacaacgcggacgacggcatggtcaggtatggcagggcggtggctgcacggcttgccggagctgctcgccgcgcgcaatggcgccgtcgaacgcctctgcaacgtcgccatggacatcaccaggctgcgccgacgccaacgttcttcctcttcctcgtcggcctcgagctcgacctggagccggcctcgcttcgccgcaccggccgcaccgccctcgcgaacgtggcgctggcgttggtcgcagcagcgttgttggcggcgacggcacacgccttgccgctggcgatggcgagggaggtggtggcgcgagaagcagtgcctcggccgccggtgccgagtaagccgtgcgcgctctgggcgtcgccgccctcgccgagcaagccgtgaccgagagaagattgaaaggagggataaagaaaaagagagatggatagttgacatgtgggcccaagggtatttttgacatttcacgcaatttctctcttcttctcaaccagaaatcattattttaatcggcgcggtatccactggctaattactatgtttatagaatatttttcctcaaaagtgagtttgggctgtgtgctagggctaaaaccacacatcagcagtgttcagtagcaaaatttaccaaatgtaaatgaccttaaaaatcgggcccctgcacccaccactgcttcacctcaccccactccctcacctctcagatcatatcccctcccctctctccctctctcccttacctctcaggcagcttttgtctatagagtatatattgtctataaattcccaaaaaaaatacttcaactatgacatttgtttcgtttaacagcattagtatatattgtccggaaaagaatattttttttgatcgatgatcttgtaaataggaattaaagttatgcactacgtactgtatgcgtcaatacctgattcaaaagagaaacaattaggcctagatcacatcctaaaattttttagcctgtcacatcgaacgtttaaacacttgcataaagtattaaaaataggctaaaaaataactaattgtataaattgcgactaatttgcgagatgattttttaagcgtaattgatctatgatttgacaatgtggtgctacagtaaatatttgctaatgatggattaattaggcttaataaattcgtttcgcggtttactgatggattctgtaattagtttttttattagtgcccgaataacccatacgataccctatataatatatgatgtacagctttacgcaccttataaacacccctttatgcagaaaagctaacgcaccatgagatgctctgcgcgaacggtttgaccgtttgatgccctttcccatttcgttatctcagtgtggcaaaaaatcaaagcatgaaagagatgttccaaagtactctgtgttgggctcttctaatttcagggcctgttctcccttgtaagttttttcatcctatcacatcaaatgtttatatacatacataaagtattaaatatagaaaaaactaattatacagattatgtgtaaaatctgtgtaaattataagacgaatcatttaagcctaacttctccttgctttggcaatgtggtgctacagtaaatatttgctaatgacggattaattaggcttaataaattcgtctcgcagtttacaggcggaatctataatttgttttgttattagactacgtttaatatttcaaatttgtttccgtatatctgatgtgacacggtaaaaatttttacccctagatctaaacacagcctcacatcctctcttccctcgtttttcgtgcgcacgcttcctaaactgctaaacggtgcactaatccatcgctccgttttccatgcgggaggtgagggtgcccatccctcacgtaagaacacagccctgaacaatagcgttgaaacatactctctccgtcctaaaatataataagttttaatttttagaattgttctaaaatataacaacttctccaccgacattcccttttcaaccaatcacaaccatacatcattcaattttcccacctacctctacatcttaaccaatcacaatcttccacaatttaattctaattgatttcttaataatcatgtccaactctataaccggacgggtgtagtataaaaaggattcagtgtctaataacgcaaagaataaacgttcatggggcccacaatttgcagcagcattctagactgaggctgtgtttagttcacgtcaaaattgaaaagtttgattgaaattgaaacgatgtgacgaaaaagttagaagtttatatgtgtaggaaagttttgatgtgatagaaaagttagaagtttaaagaaaaagttgggaactaaacaaggcttcggattctttacaaaactaacatcacctgacagcaatcattatgaagcatccaacaccaaccaaattcttcaatgtttgccaaggaactcttctaagacacgaagtttttttatttagaaaatgggtaaaaacctggccctctacgtctgaatggatgtacacaataaaaaccataataatttatcacaagttaatacatattcagatatacgtacacacatttaaaatattaaacgtagactaataccaaaccaattacatattccgcctaaaaaactgcgagacgaatttattaagtctaattaattcatcattagtaaatgtttattgtagcaccacattgtcaaatcatggcacaattaggcttaaaaaattcgtctcataatttacacgtaatctgtgttattagttcttttttcatatttaatatggcatgcatatgtcgaaacattcgatgtaatagggtgaaaaatttttatttgggaactaaacagggcctcagtacaaatctgaatatttagagtagaagagggttgaagctaatcagatgtacataaattgtaagtttccgatcgattccggtttcccaatagtagcctcaccatattcctttttgtttttgagaaaagaaaacgaattaatttccggtcccaaaactttctgaaaaaattccatccgacgtttacctttccaaaaacaggtctgaacaacagaaactttccgaactgttttgatatgtaatcaaaagttttcagtttgtatcatctaatgtattttaatagaattgttttcaatctcctttggcagaagttgactagttggaagactgtaggagtctcactcagcttttgatatttgaagctgaattttgtttttcgcccggttcatactcagatgtaaaatgtaaagctaacaaaacaagtctactttgcattgaccagagaggtaaaggtgttgcataatattgacatagtccaaagtcccaatggattttttcgtcaacctgacaaattgactgatagctaaaatatttacaagaatcaatagcacactctgtctgaattgacgtccaaatgaggtttataaaaaatttgtactgccactataaattggttgtctatatattggaaaattcatcgtttaccacaagtttcctcactcaatctcatccatatccctccaaatggcccaaaggttttagctttctctatactttttacgaagctaaagcttatcgtgcaagcatgtcacattatcacccaccagaaattactatttagcatattttaaattctatacaagcatgtcacatcatcacttctagcgattactattctagtcattttaaatcccatacaagtatgacacatcatttat

SEQ ID NO: 26456 - DNA, 688 bp, Oryza sativa
cgtgacccgaaggtacacaaaatcatccactggaatttcagatcacggcgacggttatctgcataacttttctgccgagactgtgccacctttagattatcccgaatgattctgactttagcttcagcttctctcaggatatcagtcccgaacacttggctttctccaacttggtcccacaatagcggtgttcggcatttgcgcccgtacaacgcttcataaggtgccatttgtatgctggcttgatagctgttattgtaggagaactcggcataggggagactcttatcccaagtcttcccgaaatctagtacacatgcgcggagcagatcttctaggatctgatttagacgctcggtctgtccatctgtctgcgggtgataggcggtgctaaaattcaatcgagtacccagctcttcttggagcttcttccaaaagtgagaggtgaattggcttcccctatcagatacgattttcttgggaataccatggagactcacgatcctagcgaagtagagctccgctagtttgttccctccataagtggtcttcacaggaatgaatcgagctaccttggttaatcgatccacgactacccatatagaatcatatccaccttgggtttttggaaggccggtgatgaaatccatcccaatttctcccatttccattccggcacttggagagg

SEQ ID NO: 26457 - DNA, 665 bp, Oryza sativa
accacataaaaatcttaatcttaagtggcatcttaagcttccaaataatcttggttatctcaatatatccattattaattaaagctagatacatcgacctaacagaaaatattccattctgatgataattccatctaaagctatcagaggattgattcaattgaatatgtccaatagaagcacacaattcataccaatatgcaagattctgaccaactaatgatctcctaaaggaaacattgagtggaacacatctcataacattagtaatagtagaacttttccttcggacaatatagtataaagatggatatttgtctttaaagccaagattcctagccatttatcttcccagaaccttatttgtttcctattatttacaatccaagaactcatatctaagaaggtatctttgatcttcatgagacctgaccaaaaatgagaatcatcccgttttttattaactcgggttatattataaactgattgtaaagatactttcataaaaccggatcaccgacctgatcctatgtttccctatggtggctcacaccaacgatacctaaaaatgccaaaaatctgacactgaaacggacggccgagatgacacgtggaccgcccaactgagcatccacgcaaggccatgaccccataaatgacctccc

SEQ ID NO: 26458 - DNA, 3838 bp, Oryza sativa
cttctatcgaatagagaagcactcaagcttgttatttgatctgcctcactttttttcttgggctttttgacggacctcgtaaccaagaactccacgttcggccacaagagttgtgcagttgctgagggtgtccactgccaatttgctgtttaatactgtttttcacgaatatggtttacctacatacaaattcggggcacggatcggtcagattccaaattgtcacagataggctaatggatagcatatggcatatgcataaagtaaaaaaaaaaaagaagaaaaaagatgcaacttagatgcttggatcacccttcacacaatgtgctcgacaaccatttatcactgttaatggcataaaacaggatgcgactatgggttgaatatctgatggattaatcccattagacactcaacatgctacatttgtgaatgtcatttttttacggaaatttgagcggcctgttgcaacaagaaaaacaaagagtttcaattgcaatgatgacaacaaaacgttcttgacagaaacgaaccaacatctttctgtttggtcaactgatgaccaaaaagaaacatgagatggctaataaatacatttatgacgaatacaacactacacaaacaaaagttaaattcaatccacgcaccagaaaatagaaaaacaaaccagacttaacaaggtgcaaaagcatttgcatttggatttgttattactcttccatccaaaaaaacaaatttgacctacatgtctgtggagtgacacgcgatacaattatctatgccactaattttttagaacttctataattatcttggccacataaaagatgtcagataacacttccatcatacaacttctatttactagcttcaatacccaagtaaaagagtttcaaaagtaacagacttgtatgatcaatacatgtttccagcaaaaagaaagaaaaatacagatattgtcctcgatgcaacacaggacacagacatcttgactgcaagagaaaatcaaccttttgttgggccacaaataccccggtaagcaaaacaatggaagataatttgcaacaaaaaatatactagttattactgagaaaaactgatgcaatcatatggagaaaaataaaaaattctgcgacgggactaggtgcctcgacagcagcgaagcttgggaatgccctaacctgacaaggccgggacccgcctcgtcggcggcgaagacgtctccgtccctcagccgggctcgatggacgggtggagcactggattcggagatttggaagagagagaggaagaaccaagggtgagtagataacaagtgaatggatcggactcttcagctacagaaaggtgaactagtgaatagtgggctttgattctgcaggggaggtggtccgtggtccgtgggccgtgggccgtgcacgcggaaaggagggcccaccaccgtgccgtgcttatccaccaaaaaatcggttcaccccgtgtgcgtgcgcgttcctctcaccacggcgaacttccagcctctcccgccgcggcttccgcgccgtccgctcggcagtggcgccgccgcctcgccgcgcaatggcccccgccgtgctcctccgcctcgccccctcgcctccgtatccccagaacccgccgccccggcggcggagccccgcctcggcatgcggcgcctcgcgccgcgacttcgccatccacaccgccatcgcctccgcctccgccgcggttgcggtctccgttcgtccggcaccgccgccgccgccgacgaggaggcgccaccgggggagccttcccaaaataagaagggctcccctctgctgggcggcatcgcgaacaccaagtcgtggtcgcagtactacggcagcggcttctccatccgcgttcccccttccttcgacgacatcttggagcccgaggtctctcgtctcctcccaatgtccccttgcgcgttcggtttcctcaggcattgtagtcgcgcgaggccgcgagctcaacattttggttttaacctcggaattttatcgacaaatcaggagttcaacgtcgggatgacctactacggcgacaaggcgaagcccaggacatacgctgctcgcttcgcgtctccggacaggtaggtaagtaaggtcccgtttgacttatcgagctctctagcatttcgagatatgcgtaatgattataaattttacaatactattaatctcaaattcgcctacgaaaatagctctaggaagaaattgggtagaatttgtatcactaaatacattcagcgagctaagatgattaccctgttatttttctgtaatgcaggtctgaacttgtaagcgtggtaattaagccatcgaatcagctcaaaatcacattcctagaggtttgcacagcaactagttatttttctgttactatagtttgattgttttgtgttctccctcccgaatttttctgtatgtgcagcatttattttgtctaaaagaaaaataatggtagagcaccggttcgttttttttttagttggtcgtgatgcaagataatgtgatgatttgtataatctgatgttctcaactctttggaatgaccaacgacccatttcctaatcattaaagcggcttagctttgcacactagttagtagttactataaattgatttacaatattgtgcagttgtctcactgtgttatgcaaggtagtatgattgatggcactttattttattttatttttttgataaagagaggcaggatcctcctgttttcattaacgaaaacgaaatgatgacaagtttgatggtgctttatatgttgataatttaccatcctttgataaacacccctaaacaataataagaattatatagaaataaatatagtattgataacacatgtcaagtcccaattaattatatttataatgaacaatagtagcattgattcacagagaggcgacaaacattactttttttgctccaactgactagtagaaactggtactgcactagtaggtgcaggagtgttcataatgtttctttatatcaacaattctctgtaatcaaggcccaaagacatgttttttattttgaattattttatgttgcacccaatcagccaaaaaatttatgttctgacacaaacattggtttgtaggccaaagatataacagacctgggcactttaaaggaggcatcaaagatatttgtacctggtgattactgttatcttagacttcagagatgtactttgcttttaaaataagtttctaagatgaataaggacacggcatattcacagttttcacttatcaaaggaaattgctaactcttgatctagcttcttgtgtgggcgctgctgtatatatgatgtttcacctgaatgacctaacatctaaaacatcatgtttacaaattgaaggggcatcttatcttaacaatgttcttatgatgttggttaattttgcatcatttttaaaataaatgtccagcaaggaagtgcactattaactgctttcttaatgagttgcacaatgtactcacatgcttactacattctattttgaactgtttctttcacattgtacaactttgtcgttatctactgttgtcttcgtaaaactttgtatgatcaatattgatgcttggttaaaatattcaaagaaatataaacttgtatccattttttgtttccatcacttcaaaaaattatatgaggaaacatgaagcaaaaatattctgttagcatgtagtgctagcataatgtactcatttggaaatatctgacttagctcttccaatttgtttgtaaattcttttgtctcatttcataggtggcgcaaaattatactcag

SEQ ID NO: 26459 - DNA, 4011 bp, Oryza sativa
actctctccgtccgaaaatataacaacttttagcactttgtgtttatcccaaaatataacaacttctccaccaacattcccttcctaaccaatcacaatcctactttcacttttcccaactactttcacttctcaaccaatcataacccatttctatttaattctacctactttcttaataaccgtgtccaactctaaaaaaacttcatgtattctgggacggagggagtaaagtctttacgccgttaaaaagaagtaactaaaaaataacctcgctaatataaattagggagaaaagcattgttgttttatcatattcctgtttgttttactccttgtttatccttagctgcggacctcatctatggataggtaacatggataggtaatgttttacatagatcgccgtacgtgtcagagtgtatagatggccatgtgggccgcccggcacggcacggcccaggcccggccgtgcctgggccgaggcttgtcgggccggcacggcccgaccaacgcaccgggccgtgccgtgccagcccacgtgccgcactcacagcccaggcacggcccaacacgcctcgggccgtgccgggccggcccgaaggcacgatgggccatcgtgcttttcctcagaataagtctaaattttctccctcctattgggctgtgaattgtatagctaaaaaaagtctattttacctccctcttctttgtgctgtggtatataaatagctaaaataagtctatttaaggtccctattctttagacattgacatttatatgtctatttttagtccctatactttgtgtaccaggtctggcctgctagcccatcgtgccgggccgacccgaccgtgccgtgccagcccagcgtgctggtggggaggcccaggcacggcccgacggtcgggccgggccggcatgggcccgacccaagtcgggccgtgccgtgcttgggccgggccaaaaaggcgtgccgtgggccgggccttcgggcctcgggccttatggccaactatatcagagtgtgattggcgatgtgtcttttttttttctttcaacatgcatacccttccatgaaatgctaaaagtattttgtaattggctaactaaatccattaaaaaccgatttggtttggaactggtgcctggaatcagtagctagctagggtatctttttccctttaaatgacttaattcctatataatatcgttagagataatatgtgtttttctattcggtattttaattagatatcatcatgagggagattaatgttttatctcataacctcgagttttttttatattttctttgctaaatgactgtgtgcttggcaaagaccgatgatgtaaatcatttctattattaaaagaatatttactgtatcgattcagagagacaggtactcccttcatctacaaaattacatttttgacaccaagaccaagaaaaaattaaataaccttggatgttataaaattaagaagtgaatgcaagcatgtaaccaatgagtatttagatgactccttggttctaataaaatatttaatttatctcttcatttaagtcttgaatatataaagactataaataggaacaacttatttggaaaaactcaaatgtgaaataggtataacttttgtggatggaggtagtatattatatttgtcttttcagaaaccagagaaaaacaagactagtgcatgcataattttcgttatttacaataatgtaccttgagtagaaattatgtactatcttcatttaaagcctttaataatggacggagggtagatatcactggtggagaaaccatctttggttggtcgaccaaaatacacaatagtcccggtttcactaaaaaccgggactaaagatgatcttagtcccggttggtagctacagtgggcatatttgatctttagtcccggttggtaataccaaccgggatctttaatcctggttcgtatgttgtcaggggttgttaggccctcttgtgatctttagtcccggttgttaacaccaaccgggactaaaaatcctaactttagtcccggttgttaaacaaccggtaaaacaaaacctctatccaggcgcgcatgcaaagtctcctattaattccatccttatctcctcctctcccatctagccatctccatcttatcttcttctctcctctcctcctatccttctcttccttcttctctcaccccatctcctcctcccctctctcctccccctcctcccctcccttcccctccggcggggcggcgggatggaggccggccgcggcggccccgggcggggctacgggatggaggccgccgccggcagcccggcgcggggcggcgagatggaggcggcggcgggctgcgtcgggggtggcggcggccggttgcgtcgggcgggaggcggcggccggctgcgtcgggcgcggggcggcgagatggggcggctggcaccggttgagagggcggcggccggcgccgggcgggaggcggtggccggctgcgtcgggggcggccgacgccggtcaggaggcagcggcaggagaacttttttttctcttctctgtgctatctgatgaatgctaatgatgttgtagatgtgaactttctttttcctttctttgttctctgtgatgaatgctctctgtgatgagatgttgtagatctgaacaagtgtaaacaatatggatgatttgttgtttgattttattcattcaatctatgatttaggttttgttgttgattttattcattcgatccacgagcgaaagctaaacaacaataaaaaaggaaaaaggccaaccggatgaaaggaaaagaaaaaaaaaccaaaactttttagtccaaaatcgatctttagctccgattatttgaaccgggattaaagatttgcgatctttagtcccggattcgtagtcccggttagaaaacaaaggttacaaaccgggacaacaaagcatttctacactagtgtatatagctgaaaaacgacgttccaacatgcgataacattacaatgctgaaaatgggcacgttaacgtactttatcttcgcttctggaaagatagttaaagtcttaaaagacaaattaagcagtaggctaaaagacttgcattaatgcgaagagaaaataagtatattagaaaacgagagagatgaggacgtatggctaaaacgagaagaaaacaataaacgagtattacggaggctgtagattgctacttacccgtacggagcatgaggtgtgcaaaaggtgtcaattttttatgtgtgcgcgcaaatgcgcagccgcttacatggatcacgcacgtttcacatgtgtttttccagcactagcggctagccgcctacacgcgcaaagcagatcaaaaggttaggaagtccatcgattcagagtggtggagactagagaaagacaactcttctttcttcacatgcgcccatgttccctacttacggaagtactacctccatattttaattccatattatattttaatgtatgacgccattgatttttgtccaacgtttgactattcgtcttatttaaaaaatttatataattattatttattttattgtgacttgatttatcatcaaatgttctttaagcatgatataaatattttcatatttgcataaaatttttgaataaaacgaatggtccaatgttggtcgaaaggtcaacggtgtcatacattaaaatacggattaaaatacggagggagaggaaaagtacatgattagtactactgatccctcggttgaaagtgtatactactataatatctttgtgatttttatacgaaaggagattaaagccatgcatggaccaaaatgagaaagatcattggagataaatttaaaaataaatttattttattattaaagaaccactactacacataaggttttcccgtgcggtcgaacggattttcgcgtgcggagattcggcccgtctggagcagttcgtctgcgaaaatcgctatttatgcgtg

SEQ ID NO: 26460 - DNA, 8844 bp, Oryza sativa
gccgttgccatcgccgtggccagatccgccaccttcccgtcgtcgtcgccgtcgtcttcccatagtcgtcgttgccttcccgtcgccgtcaccacctttccgtcgtcgtcgccgtcgtcggaggcccgccgccgccgtcacgccgccggatccgtgcggggggtggccgccaccgccgtcgcgccgccggatccacgcagggggttgcctccgccgccggatccgcgctgggggcggccgctgccgccggatccccgcggggacggccgccgccgccggatccccgcgggcggcggctaccgtcacctactcccgccacgcgccgtcgccgcgggcagtcgccgtcgccgtcgacgttgccttcaccacgggcagctgccgtcgccgtcgctgcgggccgccgccctcgcctacatccgccgcgggaggagaggagagaggagagaggagtgaggagaggataggaggggcgctgaggagagataggagagagagcactgagagaataaaggagaggggtgggaccgaggcgtggaaaaaggaaatttttgaagtgggtacgaggaaaaggaggaatgattactttttgtgtgcggttgtctaaataggcccgcacggaaaaataggtttatttttctgtgtggttcatttagaaggaccgcacgggaaaatcgattttcccgtgcgggcgacggcccgacacccggtcccctatttttctgtgcggttccacttacgaaccgcatggaaataaaaggggaccgtgtccagaaaaatatcctctagtagtgaacttttcaagtagaagttctttttttctaaaaaggttatgttcaatgttttagaaatcttgatcatggtaaatgagaaactagcgctctctattaagctgaaaaaaacattgctgatacagaatggagataaagaaaattaaacgagagatgggcgagtagaagccgagggatatatagctatttcctccttttaaatgacgtaacttagtattgaattagacacacatattactatgaatacagagagactcatatccatattcgtataactagtttgtatctaatttaatattaggttgatatattttggaatgcaaagagaagtatttgaactgaggaactacgccacatcaattcagaatcagatggtgatctacgttgtaattgtttacacccaaatttagcacctaggattaaaataggaaatattgccaaaatttggaagtctaccggtttcctccgagtgggccggtctgaccgccgtgtgtggccggtctgaccggcaggtccgagtccgactctgtttcgtcgggtttcgaggtttccttgctcgggaaggcatgtttcgggtttcctttggtttctaccccgagttggacgtggaggagggcctgtagagggcaagaccaacccttatataagggacatggccggttcattgtaaaaaaccaatctacaatcaatcgaatcgttttttcatattgcttttagttttctcttagtttgtccatctttgtcggtttgcgccgtaaaccgtccgccgccgctgcgagagtgcgacatctctttgtaggtttgtcctgaaaaccttccgttttgcccacgagacgggtagctatctagaaatcagctccgctagccggtttaattatcaaaacccatctaggtttagctctttgctagatcgaggcggttggcgactctaggatcaccgcaaggcttaaggtgctgcgatcgtgcttgtcaacttgtcaaaaaagttgccaacacgatttttggcgactccgctggggaggagatccgttcatcgtcaactcaactttgacttcgccatgacgaagctgccatccaagacggaggtggagccatctaatgtgatgccggtcacattggatgacttcgaaggagaagatcgtaaagctatggaggagtacatcaacgagctcacacgggaggcgttgatgagagcaactactaggactcgtcaaggcgtgatcatcaagcccgggccacgtcccaaactcgctcccgacgtggtaagtaatgacaaggtatcacaatctatccaacaacaaattgcatctacaatagattcatctatggctaattttaaagatagattagatgtaatgtttaaggataaagttgatgggtttttaaggagtaggctcggttcttttatggatgattacacattaaaggataaagcctataccactgttgatcagcctcctatagatccaatgggtggtaaaaccgacggaacggcattcacggtcggtctgaccgggcctcacagccggtcagaccgcgacatagccgtcgatccgactggccagacggccggtcagaccgggcattaccccagcggttagaccggctctcaggccggtcctaccgcgcatcatgacgccggtcagaccgggccctaggccggtcagaccggcgcgattgtcccgattcaggctatagatccaatgactaatgctagttatttgtatcattttaaaacatttgatcctcctgtatctactgccaccactaatcctcaagttcccccacatattcctaatgcttataatgatgtttctaggggatatcctcccgatactaggcaaggccaatataatcatattgcgccacaaacgcaacctattaggccaccaaacccaccaccaaatccacaagggcctaatagcatggaggatatgattagtgatattatgaggaatagattcggaattgaaactaggaatcgtgctagagcttacaaaaagccatatcctgattattatgataatgtgacgtttccttgaaattatagagttcccgaatttgccaagtttagtggtgaggatggtaagaccacatgggagcatttaggtcaatttttggcgcaatgtggtgaggctaatagtgatacttttaaattgcgcttgttttctttatctttatccggtaatgcttttacatggtctacttctttaccggcaaattctattcatacttgggctcaattagaagaacaatttcatgattattcaatttcatgattatttctatactggggaaactgagcttaggttatgtgatttgacatcggttaagcaaaagtataatgaatctgtcattgattatattaagagatttagagatgttagaaaccgatgttatactttgaatataactgatagagatttggccggtcttgcttttaatggtttagttgctcctcttggagaaaaactagatggccaacaatttcttgatgttagtcaactcatgcaaagggctctggctcaagaaagccgggttaagaataataaaaaatttgctagaccatttgacaaaaagcctaatgttaatgtagttgattaccctgaggctagtgatagtaaggaggagggtgatcatgatatttatgttgccgaatggtcgtggactaataaaaataaaccttttgtttgttctaacctgatgccgactcctcgcaaagatcggcaaagtgaggttaaatatagttttgatgtggccaagtgtgataagatttttgattatcttttgcaagagaaacaaattagattacctaaaggccatgtcataccttctcaagaagagttgaaacgtcgagcatattgtaagtggcatgattctcattctcactctactaatgattgcaatgtgtttcgacgacaggttcaatcggccatagatgaaggtcgattgaagttcaccgatggctctaagatgaagcttgatcatgatccttttccggtgaatacaattaatttcaatgataagaaggtgttgattcggccagagcaagccaaatctactaagggaaaggaagttgtcattggtgaaccaagatccaagatgatggtgccaaagaagccagaggttggcctttggaaggagaataggagtggagcttcaacttctaaggcccctaggaagaccaaggtgacctttgatatgcttttggagaagtatgagaagtaaggtggtgagaaggttcgcaacaaagggaaaagaccaagatcacctcctagggagcgatttggtcattcaccaagacggtcgcattcgccttcatatcattatccacaagacatgtcatggggttcctatccaatgccgctgccgggttatccttatccttgcttcatgccatggggggcagcgccgccaatgtaccatcatatgcctccaatgtaattcaaccaggggtggggaggaccacagaggccaattcatgagcatttgtcttcaccaaataatagccgattttgtaagaatcgggctaatgaagaaaagagggaaggaaagcgcgtcaaggtggaggaaaggacttcggaagtgattactatcaaagtggggtcccatgatgtgcctataccttctggagatggagttggagagtccccaaacaaaaaatccgaagccggtgccagctcttcgcagtcggccggtgtcacgccctaaaaatcgcctaaattaataatgcatattttaatcatttttagaaattattttaaaagcctacaagttaaactctaataatctaggaaaattttcaacataaaattgagctagataaaattttattaaatactttgcttgttcctctattttctagatttttctgggaattatttgatccagggaagtatttttaataaatgaaacaacatttcacaaattattttaattaaaaaagtttcaaaaaccctcccctaagccgttgggccgaattcggcccaacattctctctccccgcgcgcgccaaagccggcgcacgccacgccatcctgccgccgtcccccctctctcttgcgggacaccgacatgtggggcccacatgtcggatccatccccaacctccagccggccagccggccaagccgagcccgagccgcccctttgcgccgccaaattcgtcgcacccggtcaccctcgagttcgattagttgaggggaaatactctcctccttatcctcttcctttccctaaagtctccgagaccaatttctcccggataaaccaaatcgagtccgtttaagtttatctctccaaaccaactcgaagatttttccagcttcgattcctctcggttggagtccgatctcttcaatccaagcctataaatagcatccccttggcgtcctctttcgtttgccccaactcctgagccctctcgtccctcgtagcgccgccgccgcgccgctatagtcgccgccgccgccggccgtcgtgcagccgcgtcgcgccgcttgccgccgccgccgttaggtgtgcacggcggagtgctagctcagcagccccctccccgccatcgccggacgccgtagcaccaccgccgccgtcgaccgagccgccgccgccgcgccatcccgccgccgatcacaatccgtcgtcgtcttttgttttggtgagcaccgttaagttcgtatcgttgccctctatgcgtaggtgccctctaatcgtccggccaaagaccctagcgccggcgaggtcgtcgcccgtgccgtggctgccgtcgatgacgtcatcatgacgtcataatccctctttttcagtttttttaatagatgaaatagattaaaacttcggaaaatcataactaattaaccgtagctccgattctagtggttcaagttgctaaatttttctaaaattgagatctacatgttaaaaatatccacatgtactgtttatgcttgtttttgtactgttttgttgatttagtctttttgctttagtttccgacgttccggaggagagcatttcagttgaggaaggttcagaggtttttgtggaagcccaaggcaagtcacacagatcccaaacaaccctttgagcatgttgaacccgtttaaagctattgttttatttcaacttatgcattattttcgaatgtcatcgggtggtgaaccttttttcgaataattaatggccgaagatgacttaattttcctatgggttataatttgattagcatgaaccttatatattggattggttcagctaaatgtcatatgtatgtttgcttagccatgcttagaaatattagctaactaaaggggattaaagatatattatattatattattattattaattgtggttatatttaatggtagctcacgatggttaatcgtgtgatgttaattaattgataattaaaacctggttaaggtgggttgtgagcatatggttttgatggttgtgctcatgacaattaaggaccggttcgcgagctactgttgtgaaacatttaccgtgccaaccacaagccagcatgggaaacgactttatcttttgtatagcatgattcattatagtgtgccagactgtgaagcggcgagaagtccgtgggggtcgctggggagtccattgcctctggttttgaggtggagattatgatccaggaacggtgcactatggtgagttgtgttgtgcgaggggtattgtcacagttcctttccaaggtatcgtggtggtactgaggcgcatggtgacatgttgtgggattgtgtcttgtgggtatagtggtacacctctgatcagagtaaaactattcgaatagccgtgcccgcggttatgggtgagttgagcaatgtttttcgtgattagtctcacactattcattaatggtaattgtgataattaatttgattcctggtttggaatggtatattcctggtatggaggtttgatttgtacaaccgggggttggttgtttagatgaggttgggcctatgcaacacgggagtgttgtatgttgtttatttaatattgattaattattcaactgttttactattctcttaaatatttatcaaatgctgtttacgcaaatgagatacattatgccatcctttgttatcctatgcacttgcatatttgctatgtggcttgttgagtatgtcatatgctcattcttgcaatattcattcatcagaggaggagtacttcagtgaaggtgatgatctggaggactaggcttggtccgggttaagttgcttgtggagtggagtcgccatagttgttccgtagtttgctttagtttatttttccgctgcgtagaatgttattctttgagaggaactatccacctctgtaataatttattatttgcgaatattaaatagctgtttatttgtactctattatcaatttgttattgcgtgcctcggctgattcctggacgagggtttaacacacatgtaagcgtttggaattttggatagaaattctgggcgtgacagccggtctgaccaggcctcctggccggtctaaccgcagccatgcggccggtctgaccgagccattaggccggtctgaccgccgaccagacagcggtccgaccgaggcttcaggccggtctgaccgtgtgcccaacgtcggtctgaccggtgcatctggccggtctgaccgggctccagcgccggtttgacaggaggattgcaaagggcgatttaagaacttcatcatcttcaaacaaagttaatagaggacattatttacctcctggaacagagccgaatcctaggtggatgcctaaggatttaacggctactcaaaagagaagattgcaacgtcttcgggcccaagagttaagagagaaaaaggccgaagaacacagggataaaaggttcaataaattgagaccaccaccgatttggaggcctaaatccatagagaaggcacgaccgattgatgtagaggagaaggaagaacaatcagttgctaaaagtgaatcatctccaaaagaagacatggataacaacatggtatgtatgttgcctatggagttttgtgctatggatgaagccgaggttgctcaattctcattaggtcctaaagacgcggtttttgagtagcccgatgaatcaaaccgtcacatgaagcctctctacctcaaaggccatgttgatgggaagccggtctctatgatgctagtggatggaggtgccgctgtgaacttgatgccgtactcgttattcaagaagttggggcgcgaggatgatgagttgaagaagagattctcaatggcttcaacggtaaaccaatgaaggcgaggggtatcttttcggcggggctcaccgtgggaaacaagacgctaccaaccgctttcttcattgtcgatgtgcaaggtaactacaatgttattttggccggttgtggaattcatgccaattgttgtgtgccttctaccttgcatcaatgttcaattcaatgggacggcgatgatgttgaaattgttcaagcggatacattggccgaggttgcaatggccgatgctacttttgagtggcgtcatgggaatatccaatgtttatcggagagggatctttctagctatgattttattagtatctccgttggcaaatttgtacctatctctgtaaagccggctagcgtagcacggctaagccatataaatttgtataatgagtaaagaggctagtttagaatggttacaaaaaagggtgcaagaatatcggtctacaaagaatgatattggagaaaccgttgaagattttaataaataaaaaaggtttgaccaaggtttacctcaaccgattccatggaaaaagttaacattagttaatggaattaaccaaggccgacttttggtaaccaaaacattaaaaccgattaataaggttaaaatattcgaggtacttaaaaagtatgttgattgttttgaatgggaggaccatgagacgccgggttttagccgtgagctcgttgagcatcggcttccaattaaaccgggttttaggccttataagcaaccacctcgtcattttaatcttttact

SEQ ID NO: 26461 - DNA, 1384 bp, Oryza sativa
cggagggagcggctggccgggtcagccgatccggtcgtgccgaggtggctccgacgtggcgcctacgtggctgccacgcgggccggctggaggaagacgaaggcgccggcctcgaatggacggcgggcggcgacggtttctccgggacgccgtgcgacgacgaggggcgacggggcgtacaccgggatgacgagggagaacgagagggagcgagccaacggcttggattcgccggagggagtccgtcggcggcggattgcggcggcggcaaccggcggagagaaaagggggaaacggcgacgaggtcatgagggaccgattcccggcggtgagagcatctacgcggctacgggaacccaccccttgcgccggattaggaggaaacgcatcgagggaggccggcgacgagagacgcttccgagctcgggcggcgatggcggcgagcacacggcgagcgacggcagcagtcggggcgacgccagctagctactggggtactacacacgctactaaccgagtctaaggggaggagatggatcgaggagggagaatgggggaatgcactaccgagatgaggcggggcgctgtgacgagaggctgacggcatgggagcgatctctccggcctcgtgccggggaagaggaagaagagagcgcgcccggagtccccttcggtgtcctcgctcgtgccggctcctccgacacgcgcgacggcgaatggcgaccagagcatggaaggcggcgacaatgaagtggaggcgatgggacaaaacgagaggagaagggagagaagggcgcttgggctttataggatggcaacgtcggtttgggaaccgacctaggctgtcaagggagggagctagcgctcggcggtcgcggccaaagcggcgacaggggggaaatgacgccgacgggagagaaaagggaaaaaggaggagggaaaaggggcttgcccccttgccactttggggaagaagagagggcgacgcagcagagggggggagctctgcctctgtcccttggaagctagcgcgcggagtggcggggctgggttgtgacgacggcgatgacggcgggggtggtgtggagcggagcggcgacacggacggcaggcgcggacaggcacggcagaggctgacggcggcggcgaccaggcggtcggccaccacggcgcgcgcgcgcgcgggaagcaacgggcggcgcgacgatttgggcggcgtcggcgggaagcggcagcgagagtggagggcgctcggctcggcgcggctcacgcgcacgcgtgcgcagcgcacgggcagagcgggggagagggagagagagagagagagatggggagggagggggagatgggccgagaggaattcggcccatcgaacctaagggag

SEQ ID NO: 26462 - DNA, 684 bp, Oryza sativa
gggcccaaacccatagttttttaatactctatgtcggggcagcatcgatctactgagagtcgcagggagtgtggccaccggaggccctgttcattttctttttcagtggattgggtctaaccacgggaattttttatggggattcctaatgggtgagtctgtgccagcacgctcccccacgcaggttgctcgactaacggcgctcttagcactgtcaggattatggataccacatacctaatagtagttgactaaatctcggcaggacccaccacataccatgtcctatacggaagcaaccttcggatataagaggagttccggataaggaaagacaaccagagttctacatggaaacgacgaggactacttggattgtattcatattgggttccctagttcaacttggacaaggagatacctacgggtataaatacaagcccccctaggaggagaggggacacgagacaatcaacacccaacacaatcagcatagaagcctacatacgccaagacacgccgccggatatcgacttcagggataagcacggctagtaccctacggtgtctccggatactgtcaggagaaacgaaagcgccatctctgatctcgccgggcacggattcgaggagaaaggctaccctattgtcgactacgagtcagatcgtcagaccgccatgttg

SEQ ID NO: 26463 - DNA, 1124 bp, Oryza sativa
cgtcccgtgctaatattttcattctaacgtatgagtagtgtataatttcggggaggaaagaatgcatgatttaatttctactttctagtaataggaaatctcagatgaagtcatgaaacctacatggttcatctagaacttgcgtggaattttaatcataagaaagttttggttttccatctccagttttcctctttctatgggggggggaaaaaaaaaaaaaccccagccccagccccaacccagctacgttatgtttgttccaattctcaccaaagcagcaaggtagtataaaacggcaatctttccgtgcaatgcaatgagctgaatgctttacacaagaatggaatttcggaacaagctctactaaggcctctagctcacctctcttcgcttccaatttcaaaaaccagcttcacaaaacccctccaaaatttatgtaattacctcccatctctccatactgccatatctaacgcaaagccccaaaagcacaagggctaaaatgcaaaaacaaatagcagtaaaattgtaaaaagcttggcagtacactaatcatgggtggccaggtctttccctttacaacccaaaatcaactcaaatcaaatctccactgcttaagagcttcaagcatcagcaaccttctcctcctcttcgcttggagaagcaagagcaggagagcagaagcagagtggagtttagctagcgagcgcaagccaccatgcgcgggccaccgcatgctgcggcggtgctcctcgtcgccgccgccgccctctgcctcggcggccgcgcggaggagctcgaggcgtcgtcgccggagttcaactacccggcggtgttcaacttcggcgactccaactccgacacgggagggcgcgtggccgccgggttcgagtccatcgcgcctccctacggctccaccttcttcggctccccctccggccggttctgcgacggccgcctcatcatcgacttcctcagtaagctcacctctcttgttctcacccatttccttgtagattcttcatgtgggtggcagtgcgtcgttcacattgcttgttgcaatcttattcccacatggtaaccgggggcatcggcgatgtggcttctgtatgcatttgatg

SEQ ID NO: 26464 - DNA, 13061 bp, Oryza sativa
atcatgagtaatctaagcataaaaaggggcagtcccaaatcctatgacataggacatcgtacgcaacttctggaacaaatcccttaacaaccaaacaagtactcaggcttgtaccccgcattttaaaaacaagtggaaaggaggaagttaaaacttttttccaattaatagcacaagtttttggattaattggaataaagttaaaaaatcaaagtaaaaggtaagtaaataaagtaaaccaagcttgcaagataagttgaaacagttgaaatcaaggtcacaaattttgtgcttttgaataactggttccaaaagaaataaaagaaagttataaaatcaacatgctaaatttattttattgcagcaagattaaataaaacaatgttgtaaaacttttgctggtaaatgagccattagtacagtaatagatgtacagtactaataacactggaataaatttcgaatgagaaccactaaaagagattatgaagtgcatgtgctattagtgtggtttaattaaaagagaaggggaggagaacagttctacttttccaatatttttagagggcttctatgggtaaccatttggcataacctagggtcaacttggctctgataccaacttgtcacgcccggaatttctatccaaaattccaaacgcttacatgtgtgtgaaccctcgtccaggaatcagccgaggcacacaataacaaattgataatagagtacaattattactctaattaataagcgaataaaatgtcattacagaggtagatagttcctctcaatcaataaagatctaagcagcggaaagataagataaacggcgcagacgactccactccacaagcagcttgaccagggctacacctaatcctccacaccatctgcatcactgtagaactcctcctctgatgaatgattgcaaggtgagtatatgacatactcagcaagccacgcagcaaatatgcaagtgcacaggataacaaaggatggcatagtagggtttcatttgcataaacagcatttaataaaaccgttaagtaataaataaacaatattaaaccaatgctatacaacataccctgttgcataggcccaaccattccgaacaaccatcccggctgcacagttctaactccaaaccaggaatataccattccaaaccaggagctaatcaaattattgccagttatagcatcttttattatgatgagaagtgtgagactaatcacgaaggacattgttagacccgcctataaccgcgggcacggctattcgaatagttttactctggccagaggtgtaccactgtacccacaagacacagccccacaacatgtcaccatgtgcctcaataccaccacggtacctcggaaaggagctgtgacagtacccctcgcacaacacaatccactacagcgcacctttcctggatcataatcacccccttataaacaaggcatggactccccagcgacccccgtgggcttatctccgccacttctcagtctggtgctccgcaatgaaccatgctatacaaaaggtaaagccgttgcccacgctggcttgtggttggcacgattaatgtttcacaaccgaaactcgtgaaccggtccttaattgtcatgagcacgactctcaaaaccatgtgctcacaacccactattatcaagttttagttggcaagtaattaattaaccaatcacgattgaccatcgtgaattatcattaagccatcattaaataatagtgagtcataagttatctcaataatgtgctaatgtttctaagcatggctaagcaatcatatctaatatctagctgaaccaatatataaagcccaactagtcaagttataataacccaaggtatcaaggaataaagtaatcaatgcaaacaggccataacaaaggaatagattcacaccacccagtgacgttcgaaaataaatgcacagttgaaataaatagagaatttaaatataggatcaacatgctcaaaggattgtttgggatctgtgtgacttgccttgctggccttggaactcctcaaattcttctcctgcgaaaacggactctccggaaacgtcggaatctaaacagaaaagagcaaaaacacaaaaacagcacataaacaagcatgaacagtacatgtggatatttttaacatgtaaatctcaattttagaaaaatttagagacttgaaccaactaaatccgagctaagatgaattagttatgaattttcaaagattaaaccggattaaagcatttatatggattttaattgaattatgacgcaataataaattatttttgaaaaggaaaaaggagttattgcgtcagcggctagggtttacggtggaccgggtgcacggcggcggctcacggaaacgaacggccgagatcgatcctatccaaaacggacggccgagatcgaacggtccatgaccgggccacggcggacggtcccgatgacgtcagcggtgacgtcatctccggcggcggctcgggagcacaagctcgccggcgaacgacggcgctacggcacaaacggagggcaccaggacgtagagggcgacgcggcgaactcaccggtgaccaaaacggcggcggaagatcaacggacggcgacggcgtcgaggaagaagcggcggcaaccttcggcttgatgacgacggcggtgctccggcgacctacggcgacggcgaaggggcggactaggacggcggcgacttagcgaccacgatggcgaccttcctgagcgacggctggagcggcggcgacgacggcggcgctaggctgcacgaggctagggcgctacagacgtcggcgagcgaaggcgagggtggcggcgggtagaggagacaccaggggtccttttataggggcaaggaggcggcggcgaaggcccacggcgaccggcgacacgaaggaaagtttagggttcggaggagagagaccgatccgaatcgacctcgaatccacggatttccaaacaatttagacgaagattccaaaagagaaaaggtagaggagatctcgggaaacatttcccctctattgatttcaccggagaaggaaagacgcggccgaatttggaaggagacggcggcacggctcggctagggttcgggcggcggcggccgaagaaagacgatggccctgacaggtgggacccacctgtcagcgggcggacgcgctcgcgcgggcggctgcggctgcggactgggccgacttgggccggggagagagagaaaaggttttgggccgactttcggcccaaagccaaaagagacttttaaaaacctttttcaatttaaattattcatgaaatgcaattccatttattaaaaatacttccttagctcaaataaatcccagaaaaatctaggaattatagaattaagcaaagtatttaatgaaattttatctggctccattttatattggaacttattaattaaaattagatcttctcttctaggcttttaaaataaattctaataattccaattaaacaacaatttatatattttggatttttagggtgtgacaaacctaccccccttaaacagaatctcatcctcgagattcggaagaactggcgaacagatgcggatgggctgacttcaattcatcttctcgttcccaagttgattcttcttctgagtgattactccattgaactttacaaaaacggataactcgatttcgggttcttccctcatcggtttccaaaatacggattggtttctcaacatatgtcagatccttttggatttctatctgttcataagctgcatcatcatgttcataagctgtgcctgttgagccaggacttgggcaagtgtgggattctctccattggtgttggtaatggtgttgttggggccattcccgttgctgggagtgagcaccatctggcatgggcaggagcacaagaagagaaaccggggaaaactacttaggacagagaattaatttaacttttattgatcttaagtgagtttcattattacaaaactgaagactctcacaccactaaactcaccaactacctaacactcgaaagcaaacaaacgcatgcacttacatcccaccactgatgtaaatcacatgcgagacacacacaaccaaacttaaaacaaacaaactaacacaacgatctaagacaacgacttgacaaggcattctagttcttccgagcatcggagttgattgaaggctcgttcggctcgtcttcatcatcttgagtagctccccaatcgacctttgaaggggtgcgcttcgattcttctccttcatcatcacttacattgacgaccggaggatccgctagggctggggtaacttctttctccaccacacggacctttggcgccaattggtagcgagggacaaatagagctctcttccttgcggtaagacgaatcctggccttctgctatggtgcttctcccttcaacgcggctagttccttctccaaacgatccactttgtcctctagcttgcaaatcttaccacgattccggtcttcacgatcttgagctgctaacacagtctccgcacgggtttcattcatagcccacagcatctcaaccaaatgctttgtggtagcatcattctcaattccttgagtctcaaggtagctgccacgaccacttccctatggttggcgaggatggtagcgatactcagtgtcggccaactgatcactatagcgatcgcggagctctcctatggcgatccttgccacctcctgacatgcatggatgtagtttcttcctccagcttcgaacatcactgaggggatatcttcactattactgttcaaggtgacgatcatgaggaatctgggcataaaaaggggcagtcccaaatcctatgacaaaggacatcgtacgcaactcctggacaaattcctcaacaccaaacaagtactcaggcttgtagcgcggcatctaaagacaagtgaaaggagggagttaagacatttatccaattaatagcacaagtttttggattaatttgaataaagttagaaaatcaaagtaaaaggtaagtaaattaaagtaaaccaagcttgcaagataagttgaaacagttggaaacaaggttacaaattttgtacttttgaataacaggtttaaaaagaaatgaaagaaagttataaaatcaacatgctaaatttattttattgcagcaagattaaataaaacaatattgtaaaacttttgctggtaaaataagccattagtacagtaatagatgtacagtactaataacactgaaataaattttgaatgagaaccattaaaagggattatgaagtgcatgtgccattagtttggtttaattaaaagagaaagagaggagaacagttctacttttccaatatttttttagagggcttctatgggtaaccatttggcataacctagggtcaaggaggctctgataccaacttgtcatgcccggaatttctatccaaaattccaaacgcttacatgtgtgtgaaccctcgtccaggaatcagccgaggcacacaataacaaattgataatagagtacaattattactctagttaataagcgaataaaatgtcattacagaggtagatagttcctctcaatcaataaagatctaagcagcggaaaaaaaaataaacggcgcagacggctccactccacaggcagcttgaccagggctacacctaatcctccacaccatcagcatcattgtagaactcttcctctgatgaatgattgcaaggtgagtatatgacatactcagcaagccacgcagcaaatatgcaagtgcacaggataacaaaggatggcatagtagggtttcatttgcaaaagcagcatttagcaaacatttgaaaaaacaaggcatggactccccagcgacccccgtgggcttatctccgccacttctcagtctggtgccccgcaatgaaccatgttatacaaaaagtaaagccgttgcccacgctggcttgtggttggcacggttaatgtttcacaaccgaaactcgtgaaccggtccttaattgccatgagcacgtctctcaaaaccatgtgctcacaacccaccattatctggttttagttgccatattaattaattaaccaatcacgattgaccatcgtgagctatcattaagccatcattaaataataatgagtcataagttatcccaatagtgtgctaatgtttctaagcatggctaagcaatcacatctaatatctagctgaaccaatatatagagctcaactagtcaagttataattacccaaggtatcaaggaataaagtaatcaagtacaaaagggccataacaaagaataggttaattccacccaatgacattcgaaaatagatgcaatagttgaatagaaacaatagctttaaataggattaacatgctcaaagggttgtttgggatctgtgtgacttgccttgctggccgtggaactcttcaaattcttctcctgcgaaaacggactctccggaaacgtcggaatctaatcagaaaagagcaaaatcaccaaaacagcacataaacaagcatgaacagtacatgtggatatttttaacatgtagatctcaattttagaaaaatttagagacttgaaccaactaaatccgagctaagatgaattagttatgaatttttgaatatttaatcggattaaaacacttatattgattttaattgaattatgacgcaataatgaattatttttgaaaaggaaaagagatttattgcgtcagcggctagggtttgcggtcgaccgggcgcacggcaacggttcacgggaacagacggctgagatcgatccatccaaaacggacggccgagatcgatcgggtctacggcggctcacggcggacggtcccgatgacgtcagcggtgacgtcaccaccggcagcagctcgggtggcgcatgctcgccggcgaatgacggcgcttcggcacgaacggagggcaccaacgggtagagggcgacgcggcgaactcaccggcgaccaaagaagcggcggaaaagcaacggacggcaccggcggcgagatcgaagcggcggagaagatcgggtcgacggcggcgacggtgctccggcggtctacagcgacggcgaaggggcggacgaggacggcggcgacttggcgaccacgatggcgatctccccgagcgacggcgacgactggaacggcggcggcgcacggctgaagcgacggcgacgacggcggcgctaggtcacacgacgctagggctctacggacgacgagaggcgaaggcgagggtggcggcgggtagaggagacaccggggatccttttaaaggggctaggaggcggcggcgaaggcccacggcgaccggcgacgcgaaggaaacttcgggttcgggagagagagaggaatccgattcgatctcaaatccatcgatttccaaaccgaaatagatgatgattcctaaagggaaaagatagaggagatcccgaagattgtttcccctcaatagatttcaccggagaaggaaaggggcggccgaatttggaaggcgacggcggcggcgcggcgctagggtttcgggcggcagcggccggaggttgacgacgacctgacaggcgggccccacctgtcagcgagcgagggcgcgcgcgagggcggctgcggctggactgggccgacttgggccaaggaggagagagagcggttttgggccgactttcagcccaaagccaaaagaggattttaaaaacctttttcaatttaaattatccatgaaatgcaattccatttattaaaaatacttccttagctcaaataaatcccagaaaaaatctagtaattatagaattaagcaaagtatttaataaaattttatctggccccattttatattggaatttattaattaaaattagatcttcttttctaggctttttaaaataaattctaataattccaattaaacaacaatttatatattttaggatttttagggtgtgacatggagtgagacataaaatatgtttcatttagatgaaaccttgttttcatgacagtttgtttcttgcatgtatatattacttgtggaaaaaaaataaaaccatgtaatatatgagctactttaatcatcaattaaatgtcatgttgcttatgtgtcaaccttttggaaacataaaaataatgcatcccattaggaatggccttcctagtagatttttattttggattgccctcgattttacaatattactgttggcaacttttttgacaagttgacaagcacgatcgcagcaccttaagccttgcggtgatcctagagtcgccaaccacctcgatctagcaaagagctaaacctagatgggttttgataattaaaccggctagcggagccgatttctaaatagctacccgtctcgtgggcaaaacggaaggttttcaggacaaacctacaaagagatgtcgcactctcgcagcggcggcggacggtttacggcgcaaaccgacaaagatggacaaactaagagaaaactaaaagcaatatgaaaaaacgattcgattgattgattgtagattggttttttacaatgaaccggccatgtcccttatgtaggggttggtcttgccctctacaggccctcctccacgtccaactcggggtagaaaccaaaggaaacccgaaacatgccttcccgagcaaggaaacctcgaaacccgacgaaacagagtcggactcggacttgccggtcagaccagccacacaacgccagtctgaccggccctcaaccggcagtctgaccgcccaacacacggcggtcagaccggcccactcggaggaaaccggtagacttccaaattttggcaatatttcctattttaatcctaggtgccaaatttgggtgtaaacacatgcccccctgcctttttgatgaacaacgtgaatctaaaagcatagaacatgtttttggtcttaggaagataactcaattaccggccgtagtacctcctaagtgtcttgccaaatgctcgggaagtatttcttcaagtatttcccgttgattgctcgctgaaaacgctccccttgaagtgtctccaaaaagtatgcgctccctcgaacaatgtcgcacactcgataaggaccctcccaactaggagaccacataccgaactccttggatcgagtacccaaaggcaaaattgtcttccaaaccaagtctccaacttgaaacaattttgctttcaccctcttgttgtacgccttggccaccctcttcttctctttctctatctcttccaatgccttcaagctgtcgcgtcccaaatcgactctaaaattcatcctcaaaattgtgcaaaagaataagtaaaattcaatgtgaaagcctccaacaattaaaatgtgcaaagataaaagtcaaatgaggcttggaggatttttgtatatttcctaaaagcctaaaatgcttaaacaaattttagtggaattttcagagcacaaataataattgaaaagaaatgaacaaagttgaaaaggttttataaaaagaaaaccctaaaagaagttcttttccccccccttccttcttgggccggctcggcccattccctccctctctctctctttccccccccggcccatcggcctccccgcgcgcgcgcgccgctgacaggcgggcccgcccgccactctcgctgacgggtggggcccacctgtcatcttcctcctcccgccgcgtccgtcgccgcccgtgccctagcgccgccgccgccgccgaatccgccgcatcccgccttccccgcgcgccttaatgaggggggaattattccccgcgtttccctctcccgattccccctcttttccctctctctctccctcggattcgctcggatttaatcccgcgaagttcgccggcgcatctatggcggccgagatctccgcgagcggtttcctctctccccggccgcgctctccccctcccgttgctatatattcgttgcccgagctccgctcttccgtttccgccgctcaccgctcgctctcgccgtcggaatcgtgctagcgccgtgctcctctctctccgccgtcgccgtcgaccttcggttcgccgccgccgtcgctccggtcttcctcccggctcggcgccacctccctcggcatcgccgcatcgccgtcgacctcgtccgcgcctccgtttcgctcgccgaccgccggagcaccgtcgccctcgtcatcccgagccgcgccgccgtcttcctccgctccgtccgccgtttccgccgccttcgccgtctcggggtgagccgtggaccgtccccttcgtttcccccttccctcctctctctcgggtgccactccgccgcgccgttggtcgccggcggcgaccatcggggcgcgggtgcgcgccgctcccgtcggccgcgccggcgaggccgccctcgggcgcgccctcgcggctgccaagtgggcccggccgtcagccgcccgcgcccgcgggtgcggctgacgcgcgggacccacggcgccgaccgccgccagccgcgtgcgcccaggccaccgtggaccgagcggctgacgcgtgggccccacttcccgtggacccggtccgcgcgcccgcccctaggctgacgcaataatccgtttattaattgaaaattaaatgaagaaattcgtaaatatccatttaaagagcatataaacttaaaatggccatatctttgccattttgaactcgtaattggaccgttcaagtctctaatttctccttaagatgtaaagaacccatttttgtgctttgtttctgctgttatgtggagttatttagtgttaaagcctttttcttttccgttggtcgtgtagacgctgcagcttcggaagatccgctcttcgtggaagtcgaagccgtcgattgggaaaacgagcaaggcaagacacatcatcttgatcatattgaatcccattttataaaattatgttgatttaaattattgcattatcgctttatttaaattcccgcgttatcactgttttacttagccatgcctatttacctttgttatgaccatattattattgtcattgttattattattaccttgttcaccctagatcaaacaaaaccccaactagtggacactctactcacgacaccactagtttaattctaggtagatgcttcgcaatttaattaggtaacattaggaggttttacaactttagactttgggaatgctcatatcatttggacactatggaattgttggtttatggtggaattggacatacacctctcttcccctttcaaaacccctaaaacctgttttcggtggggtttgggtgcatgccagttgtgggaagtagcaccccggccactataaggattaagctcgggcctctgttgcaaagcactaccgtacttccacatgtctaatgggtaaggcttagtttgtggctcagtctagtcataaacaaaagtacacggattggagatggatgaagtcgggcgtcgatggacattctccagggcaaatgaaggctacacgagctgcggcccggtagtcgagatgtcatacggcggagggttggtgcccaatgctaggggctcagttctgcctgcctgtcccgggtatcccggccgtaggtaggattgggtcggtactcttgtctaaggctaggatgggttggaaactatgtcacgtcttccgtccgtataccgtggtggtatgtggcacgtggcaacacgtgaggaagatgtgtcttgtgggtaaagatgtacacctctgatcagagtaaatctattcgaatagccgagccctcggatatgggcaagccgagcaatgtacccaagtcagtgttttaattcttaaaatttgctcaacaactaaaatatggaatggttggcctgggttggcttgggacgagctggaacccaggtcgggttgccagttcggtccgaatcatcgtaggccttgggttaaggcaggttcgtgagggttcacggccttgtttaataatattgtgtagttctaagatcgtgtttacaaaatagccctgagtaactaaatgtctttaaatgctgtttactgcaaccctaaccctttatgttataattcccttgtactcccttgcatttattctgcattcgtgggtgtgtcttgttgagtacggtggttgtactcagtcttgcttaattttcccaagcccagatgaggagttcctggaagatgaaggcttcggtgtctagctcgtgcctgccgtcaagcgcctgtggtcgtcgccctagtcttccgctgtttttcgttgtctttgtgtgctgggccgttgttgcccgtgtaataattatatttacgcttccgcttgttaaactctgaattgtatcaacttttggtgtaccttgcctcctgggacaaggaataatacacgcacgtcaggaacgcctgttgggtgatttccggtcgtgacacaagcgcttgtcgatgacttcatcaaggttgtctcccatcaacatgttgtaatcttcacttgacaaatcatcttgcttgatataacgaagagaaccaagatttacctccaccagtaaaacggcttcttgaccataaaccaactcaaaaggagtgactttagtggcaccatgtttggatatcctatgcgtccacaatgcttcagaaagcacctcatgccacctctttaggtattcctcaatcttcttctttaccaacttcaacaatgtcttattactcgactcggcttgtccattagcctccgtatgagtcatattcttcaaaggcatggcttcggcccacttggtgaagtaatccgtagcaactagcacgaacctatgcccctttgatgacaaaggataaatttgaccaataaaatccaaagcccatcctcggaacggctatggtttgattatagggttcaacacggcggcgggcgccaattgaacattgccgaaccatttacaagcctcgcatcctctataatatttgaagcaatcatcaatcatcttcggccaatagaaccccgctcttctaagc

SEQ ID NO: 26465 - DNA, 1801 bp, Oryza sativa
tagttttaggatcgtgttacaacatagcttgagcgactaaatgtctttaatgctggtttactggaaccctaaccgtttatgtcataattcccttgtactccatggcatttattatgcatttgtgggtgtgtcttgttgagaacggtggttgtactcagtcttgcttaattttcccaagcccagatgaggagttccttgaagatgaaggctttggtgtctagctcgtgcctgccgtcaagcgcctgtggtcgtcgccctagtcttccgctgtttttcgttgtctttgtgtgctgggccgttgttgctcgtgtaataattatatttacgcttccgcttgttaaactctgaattgtatcaacttttggtgtaccttgcctcctgggacaaggaataatacacgcacgtcaggaacgcctgttgggtgatttccggtcgtgacaagttggtatcagagcctcccttgaccctaggacgagccgtagatcccaagccttagcaatattttcaaaaataaaaatcctttgttatttgtgaaaacccgctattctctctctgtcttgctgcttcatttatcgtcaaaatctgatcttttaaaatgttgcttttcttttgtttttgtttgtagatggccggcagcgttacccgtcgtggtttggacatgactggcttcgtcttggagttgcggggcatgtgcgtggttttgggatatccacatggagtggattaccaggccaggccgctcccggagcaggagggtgaggatgcagagcctcacgctggatgggaggtcactgcagtgatcctctccggctctcccgagcggacttcgctggcagtcaccgcgggtggagactccttccccgccgcttgccagaacgccgctctcctcgccatcggcactcttcaccagcgctacccggacgagttgcagcactcgccctaccgctaccaccctcgtcgcggaggagcccgcgacctcgccaccttccgagacgccagctcggaggatgacgctaccgtcgtgcatctggcacgcatggtggaggcgtacgacgcggctcgtatcgacttccatcagatggtgcgtcgtggcatggtggagaacaacatgaagatcctggagctgcgtcaggagaatctgcagctcaagaaggacctcgatgcgttggaggcgcagctgcatcagctcaagatcgcccagggagagggcagccgccccaagcgtcgccgcgtctgccgcagccagaagatcaccgcccgcaagagcacctccaggcctgagcttgtccgtcagtccttggcgtggacttgcttcgtcgagacccctcgtgccgagcctgcgcccgtggttccccaggagggggaagcctccggcgttggtagctcggagggtgcgctgttgctcaccttccgtcctggcccgtcgcagcggtagacgagcagttagtaggcttgcgcgtgtgtttttcctcgtttgtctttttgagttgtgtggggcatggttacaccggtgtgtggtgcaactatgtcggagcctgtcttattttgtttgcctaagcaacttgaactttaatgaaccaatttaatagcagtgataaatttaagaataatagtagtcgtgggtggttagttttaatcgtcagctctccttctctgtttgctggttctgtgtggggttttcagatggtgacgaccaggagaaatgttaacaccggtgaaggcaaccaacccgagggcagcaaccccaacccccaaggcaacccacctccaccaccaccaccagacaccaacgccattctca

SEQ ID NO: 26466 - DNA, 733 bp, Oryza sativa
ttcacaagcagtaggcaaacaaaactacgctaggaatcacctcacatccgcccatgaccgtgggcacggctgttcgaacagtttaataacctctgcagagggggtacactttacccacacgacattactaacccgaatcacccagcccgtgcagaacggccacgtctggtgacataaaggttttcatgacaaggcatttcgagagcagacacagggttgccatatgccgacgagaggggtcccagaccaacaacaggttaggtcccagaccatactgtgccaggaagcccgggggttctctccgacaccaccccgttgaatccacatgtctgtcagcatcaaggctcccccgcttagcaatttactcagccaggggtgtcccattccacccatgtggtcgcacttgtcttatgatcggatgaaattccaaggaaacggtccttaagtgcaagagcgggaaaccgtacacccggtacgttccccggtccgcgattttggaaattcatttagttcgcaagcaccgacccaggtgtcgggttttccaagtcttttgtaaaacccaagttttacccaagatgtttctcagattttaagtttgaaggcgaccgtcgatactcgtgcagagtgcacgattaccgaggcacaactaggtggttacaagggaacatgatataacaattagcaatagaaggatcagatgcaacaagttaggtaggcccaccggtctgccttg

SEQ ID NO: 26467 - DNA, 746 bp, Oryza sativa
gtccgcgggcgtggtacgccttgccgggcgcgcacggccagcgcgcgttgggcacgcagaagtctgacgtcgcgcccttcacctccttgtagcagtagccccacgagtagggcccacctgcagggacacatgcgcactcgtgcataagacatgtgtacgtacacgtgagttccaacgtgacaagtaaacgttactacgttaccagaggtcgcgtgggaagtctgggccaggaacgcggcgacctcacgcttgcgggtgtcggcgtcgcccgtgcaggcgaaggccgggaacgcgccggccgcggcgacgaaggcgcggtaggcgtagaacccgcgggcggggcacgccgcgtcgtcgcggtggggcagcatgcgctcgaactggtccgacgtcacgacggacgccacgccggcgcggccgccgcccggcgccgtgagcagcaccgcggcgacgtcgtcgtcgccgccgtcgcgggagacgcggcactggctctgacagccgcctttgcagtagtcgtcggtgagaccgcaccacccccacttgttgcagcagagcctgttggggcaccgggcgccgccggcctgcctgccgcactgctcggcgcgcgccgtcgccgcggcgtaggcgagggccagcacggccagcgccagggccttcatggccacctgcaggtttgcagcccttgctgcgatcatggcaagatgcttatttcttcaacaaaatcttgcttttcagtggtgtgttgg

SEQ ID NO: 26468 - DNA, 711 bp, Oryza sativa
aactttattagtgatggaatcttatttatttactttgcaggagatacgtacaggagatatattcctcagtcggattacttttcgcggggactttacacgtttgacataggctaaaatgaccttgctggtgaattctactggaaaacagaggaccaagttgctgcatccattccgactattttgttggaattcgaaactgggctgaaggtttgtatacacagtattttcattcttaagcttttgcagtgcatggaacctttttttttttcttcaatggtcttcagtagtttgtagaatatggttttcagtcttcaaaaaataatctgtttgccttggccaaaaaataatcagtttgccatttttccatactggtccaactatgtactgtttgattgggaaaggacctactctaaacgttttccttctttttcagaaattatatgagcaaggtgccaggaaattctggattcacaacacaggtcctcttggctgcttacctcaaaacgtagcttttttcggcaaagaccgatcccagctggatgaacttcgttgtgtagcaaagcataatcgtgttgcaaagcttttcaacttacagctgcatgcactttgcacaaagttaagaggtgaattcgctggggctagtatcacttatgttgacatctacaccatcaagtacagcctgatcgctaattattcgcgctatggtatgca

SEQ ID NO: 26469 - DNA, 1562 bp, Oryza sativa
gtttatgctgttttgtgtattggaaatttggttgcaatggcgtgggttggattgtgattgggtggatgggattctggagccggataaggcgaggggcaagcgtgaacagccatgtctggtcgccatactacaagggcagaactgcacaagggtttctgcctccaggacggtcgctctgctccctcttactcttctctaaccagacgtatatttgtccttttatattgctagtaaattacccatggcataggataaaaaaataaacctctttgccgtgtttttagtagtagttatgtttatttttccggatttgctataaaccttttttcggatcagctgtatggcaaaacattggttcaatacccaaatccattaccgcatacaattccaccgatacaaatttgatggactataacatctggcatatctcttctctatctctatctctactattataaaaattaaatatgtttttaccgatactttgttacgtcatccatgtatgagtcaacttttaagttcgttcgcttttagaaatacaaatctgtatttgagtcgggttttaaattcgttcggttttgaaaatacagaaggagatgtataagaactttctttaaaaaaactcacatgctaacttgagatgatcggactcataattatagctcatgattttctagaaaaatatatatctaaacgaatactacagtgaattttaccttaactaaaccgtaaaataataataataagattaaaataatcttcacccgttgcaacgtacagatatttttttctagttaataataaatgcaactactcccttcgtttcacaatgtaagtcattctaacattttccacattcatattgattttaataaatctagacatatatatctatatagattcattaacatcaatatgaatgtggtaaatgctagaatgacttacagtgttaaacggaggaagtatataagaaggtaaactcctgcgtattgacttagattggaatatgccgtgttggtgttgcattaaatcagccttttttatacatagtcatacagaagtacagagtatatatactgtgtacatcattcttaaaaggttaattgcatgttctaatattgtacatcatagtagtaggtcttgtccctctaaaatgtatcaactaaatctacaggatccatggagcccaactcatggcctccctgagggaagcactcactatttaggaccgctagtttccgaaggtccagcacgctccaccatagcatcataaagctgtcggccgttctgtgttgcaacacgccaacaccaaatcaaattccatatgatacaacaacaaagttagtaaaattagtggacttacaaaaatcacagggaagaaatgaatttgcccttcgggttttgtttgggtctccttgaaataaaccaagataggaaattgtggccaccacagttcccaattcacaaatgttgagtacctgtgggtgcattcaattatcaggcattactactgttaccatgatcaaagcgatttatcgagcaagatagcccgacctttggcg

SEQ ID NO: 26470 - DNA, 35993 bp, Oryza sativa
gcgattaaattgatataaaacctgtagttttgtgataactttgttactaaatctgtagttttgcgatagtccaccttatatttgtacttctgtgataaatttagtgttaaatctgtagttttgtgatacatcataattaggtcatctatcaaatggtgttcagtacaggattatattaagatcttttcactaggaccatgcaattggtcacaggaaaatggaacacatgaatcagagaagatccaagtaatcaagtttccaacaagccagaaagctagaaggcataacataaattggcacatattacacagttcagaataggttctgatgtacctaaaatgtaggggggaaagagaataggtcgagtagatggcaacaattgtctaacaaagatagaatatcttacttgtaacctgaaggtgcatgtgcaagaacaatgcgctgtttgttctcaattattaatcttaagtctcgccgtgcagcttcaagatgcatataatcgcggaactgatcctgttaagatatgaagagaaagtacaagaagagaattgcataagttgatatttttgtttgtcatacaagcatggttctgaaagtaccaacagcaacaaatggactaacaggataccaggctttactgtagtttttttctcactaacatgcacatgtttagaatcagaaacatgtgcaaacgataaacaaaaactaaattcataaaattgtatcatcatgtgcttgacacatggataccaaaccaacttataaaaccaaaactgtaagtacgtgaggattaccttagtaaaacctgggcttgcaattacagcacattggactacttcaaaatcaatatgcttcaggaaagcctgtaggcaaattaagtaatgcatcagtccaaattggtttcattaatattatcatttccttgaggaaacatttttcatttacttgcaaaacatgttcaaagaacttcttgagggcctacaaaagagcaaaacaaagtcagttgggaatagatagaacaattagattacacaatatcagaaccagtttccataccgactcataaccagcaatcgcagggccatgcttccgaggaatagatgtttcaatacgtgctctggttactgttatgctgtttagataaccatagctaataagtcaaatacaatcaccgcaagaggtaactcaagcctttaaaagaatagggaatcaaacagggctactattaagataatactctttcatcatcacaattagcatgctatcatgggaagtacaataaaaattatcttggtcgtgccatggcacaatgagtcaatgactcaacttaccttctaccaatgaggaacaaatgtgcaagtccttcttgcatgagaataactgctagatcagcacttgcagttgggtctaatagaggtttagatgcactcagttagaacattgcatttctcaagaaagaataataacagaaaatatgataagttgataaaacaaaagtagaagtttatgtctcaatagaaatcacaagatagatatcactaggggtctcaatgcatattcaagatgatggatgataaattgattaattatcaatagttctcattaataggtcaaagtaacaagtttgcaaaggttgtcaagcactcctggtatccgcggtacaaccataccaataattttgcagagcagaagatggaacgcaaacaatatataaacactggacataatggcacatcaggtttgaaagaaaagagatactctatttatgagtgagtttctctgcattaaaatctattcataagaaggggagcaatatgttcaaaatctctgataatcaaaatatctcagaggtgatggcagaaaaaatggagatatgtgcaatcagtttatactgattattatggttggaagacagcttgaaattagggttaatacttcgagatatttaggccctcctaacaggcaggacccggatgggctttcctgctaaacttaaggtcctatttgtaagcttaggcctcttcccacaaattctccagaaaaaaaaaacagattatgagtttcagtgagtaactaagtatcattgtacaatcaacatagtgccaactttgttggataattcatcaggactgaaaaaaaacaaccacatgtttttttcccagtggcttaagtaatctagatgaatgggcatatcaagcattagcaggctaaaatttgaggtacaggtagcattcctaatgtgataaccatgtaaccattcagatcaatccatcatagaatataagagcaataagacaggaaaagacagatggaatgtacagaattagaagatagtaacatttcagttctcacataccacatgcttgttggatggtatcaagagctaaccaatcccaaagttcctgcaaaagtagaaatagcaatctctcctcaggtaagctacaacagaccaaaagaaggtacattctaaatggactaccacaatttacaaaaataaacaatggtgataaaattttcaacaacgatatgtatctgagaatagttggggaacattatcatcagccactgaaagaaggaaactatattatgtcaataatcgttatgctttccaactcctaagtagtcatcgtagacactatgaattaccagaggctggaaaagatacaagttccatgggcagggacaaaaaaaactcatatgcaagtgcaagattcattaagaaaattagggaaagaaaaggatagcagtctgatgaaagtgccaagtttttttatataactgagtccatagtaatgtttaattgcaaagggatatttgtataatataaatattgcaaagctaaggaaaggtcccattgtcaagtgctattaaaagaaatgaaccaaatttggccaacctagttgttcaagatatatgacagtaaataaaaaagcatgtgcacagatgcctgcatatcctatttcacttataggttcagttaaaaaaagggcaagctgcaaatgggatagaaagtttatctattaaaaatctactagctcaaagcaccctgtttgtagcactctcaggtaggcctgttcacaggttgggctcaaaccgatgaacataccaaaccaaaccaactgaaaccagttaatctcttgtatatataggtaggttgggtttcctccacaatccatcaaacactatgactccttcatcttcttcaggacctcgtcctcgcacgcaggcagagccatctttgcaatctcaagcggtggccgtgtccacccaccggcaaagaccttcacagaggccatgtcccccaccgatgtccccgatggcaatgtcccccacaagcgacgagttctccagagccacggccacatccccacacaattgacaagtcccaatagtggccatgaccccaacccctcgatgggccttcaccgtggccgcgtcatctcacactcgaaggcgacttcccctcacatgcgacgatacatcgcgcgctcgatggctgcacctctgtagtcggggcgtcccttgcatgttcaacagcaactcgtggacgtggctgcgtccagtggcctgtcacaatctttgtgtgctctgctgtgcttcacaggaaaggaatgccatggccatttctagctcctctgcccgaaggactcttgatctgcttctttctcttgttgaggaaacagtttaacccgtgaaaccagaccatctaaaccgtacttctttgggctgggctgggttaacatgctaaatcaccttaaaccatcgatgaataaccacacttttcaggtaaggcttaacaaatcccacatcagcttggaatgtgccggatattggtgccatattttaaccatttagaatcatatccaaattttgaaccattagtgtagtgtttaagacaatcctatccatcattagctgaagactataatgtggtcccctagtaaacaggtaaaggcagtttgatcaaattttagggcataccttcgtcaaagtaaattgtctcttcagctcaagctccacagtatgaaactgtccaatcttcacatgatcgttctcagttatattttttccacgtacacgcaagacagatccctccttatcataatctacagactatgtgcaaaacaaaggagcatgtcagttatcatcaagaaaataggtaagttttgatttggaaacaataaggaacaaaactaataagagcatcactggctaaaaaactaaagacagcattattttttagtatgcaaggagaaatagatttctcgacctcttcggctgtggtgccacttagctctaagtaattcaaatgcttaagtgacgatgcttgttgcttgacttggggggtcccattactccattatgcaactctaaattattatttttctaaggcagaggcagaaattttgcatttaaaaagtacagaatttcactccaataatattatgtttaggtcacccattgtacagcctttgcggtttgttagattgtcaatctctttccagttcacgcattgtgtaggtaaactaggctctcttcccaaataatcaaacaatgacagtgccactcaagtctcaaattcacaggttgcaatccacataggttacatctgactgtaatcactagtataagcactcagtgcagatagaaggaagacagatgatatatcacctcgactacaatttccaactttaacctcacacgctcagcatcacgtcctccagatgccatctctctcagaactttcctgggaatcaacaggataaaaatatgtttaaggggattatgagttctcactgtgcactgaaggatctagatatattttgatggagaaacatagaagttcacaagaataaaggggacagaatcttcaagtaacacaaactacattaccaccaaggttgaagtatgagtatgatcaaagcctttcaagtaattttacatatctaatttttctataatcacataaaagcataatggcattgagaaattgttaggtttagtttttttaataaaatggatgtttaaagtaaacgaaacagtaacactaattccagcacttccttttcttcccgcaatcccaattcttaagtcccagtccaagagccaaaaactatttatcacgtagtgaaccatgccttccctaagtttacgccaaaattggaagtttggttgaaattggaacgatgtgacggaaaagttggaagtttgaagaaaaagtttggaactaaactcggcctaaatctaagtgccctaattcctctaccagggtaggactaggacatcgaggatagttcgaaattaacagctcaaaattgctaaaccgaaataaattactctggttactaactgaaccaacactacacaatcactacataaaacggaggaactcacctcacagtgacggactggagggtatcccccggaacaataaggttgtaggcatgccacaggtcgtcctcctcctccggcaccagctgcgctttcacaataaatcgatctaagtcatccaatcagcacacgaaccacacaacccccacaaaaggggatcaccaccgtacccccaaacccaaacaacactagacctagtgcaagcgatcaaacggagagcgagatggggaggggaggggagggttcacaccttgacggagccggggccgttgcgggcgaggttgcggtagacgagcttcatcgccggtggcccggagctgtagaacgcagagatgcttggctcctcgtgcgggtctcgctctcggcggcggcggcgcgagcggcgggggggattttgcgacggcgaggggagggatgcggcggaagctgtgtcgacagcgtgggatgggatgtgaaaccggacacggaatctgtctccctttctgttacgacgttatatacatggggccccaaagaccggattagctgccggcccagccgcgtcgacgtctataatcggagtccaactccacattggactcgagttcggcccatgattagtaccacctcaggtctggcaagtgttactctctagttttaatgcttgaacgccgttaacctctagttctttttattttaaaaagttcatgtttttttgttttactataattttttattgttaaatatactcctaccatgacttatatttttgtatttttaaaataaaattaataagacatatatcgaagacaccaaaaatcaagcgcgtcaaacgttaaaaaccagagagagtaggcgttcacaactataattgtgtgtgttttccacgtgcgtgcatgagtacatcgatcgaatttagcccctacatattttcaaagcggtagataatactttgactttggtcaaacttaaaaaaataacttaaaaaattaagcgacttacaatatgaaatatgaaatgggtataaacggaagggacagtaacaaacagctatcattatttgtcagaatttctgagtagctgatactttggcaccccatctgtttctaaatgtttgacatagcacatatttgatcgttcgtcttattaaaaaaattgcgaaatatgtaaaactatatgtatacatgaaagtttgtttaacaataaatcaaataatatgaaaagaattaataattacttaatttttttaataagacgaatggtcaaacatgtttaaaaaatcaatggcgtcaaatatttagaaaccgaggaagtaataaccaacatcttatgtttatcattttttctgcatatgtattgtacagttcaccgcgcctttttacttcagatgaaatggcacactgagctagctttacatttcgttctcgatgaccaggctaaattactcgctactagctagctagctagccaagcctctttctgatgacgccttccaccgagccgacgaacgcgaacgtgccgacgacgaagcagacgacgctgaacgcctgcagcgcggcccaccgcggcgtccacggcgagatccgccgctgcacgcagtacatctcgacggggaggtagatggcgagcggccagaacacgagcgcgccgagcacgcccagcacctcgttgaagtaggggaacaccagcgccagccccgtcgtgctcgccacgtacaccgtcctgaagcacacccgctgcaggttcacctcgtacctccccgggccgccgccgccgccgccgcgccgccacgggaggatcttgacggagtacgacctgttcacgaacgcgctgttcggaaagctcgccgcgaagcaccggtcggcgaacgtgaatatctgctggctaaacatctgatgcatcgagttcatgcaggattcgatcaggatagttttttcagagaaaagcaatgcgattttggagaagtttgagtcgcagcttcacctggtagccgccgaggaggtggagcacgatgcaggcattggcgaagtctatgagccagtagggctcgtagaagccgaagccggtgaggaggttgcccggcgcggcgttgccgaaggcggagtagccgaagcagccgacgcagaggtagaagaaggtggtggcgaggaccgcgatcacgttgcccttctgcatcgtctcgctctccggcggtggcgatctcagcgtgtcctgttcggtccatcagtctcagttcagatgaatcttgactaatttcagctaaaaagtgtccaaaaaaatgtctgcttttcgtgttctgaaattggccgtgcgcacctgtatctccaggagaacgatggtgtacgggtaggcgaatgcgatgtcgccaattgcttgagccactcgccaaactttctgcattggggtggccatcgcaacaccggcaatgttccctttgacagttccatcacctgacacgaagcaaatgcaccaagatttacacagtttccggctaattaattaagcactgctgaattgtgacatcggcatcaatcaaatggaacaatcaagctactataccaatggtcttggcgaggccgaggccgaggccgatggtggagtaggcgaaggacatgatcgccgcgacgacggacagccacgccatcttgtggaaattgggtatgaaggacagcagcagctgggctgctccgaagagcagcatgtagaagtgttcaccgttcgagtcgcagggagcgtcacggccttcgctgtggtagcagttcgccctcttaattgccctgtcaacgggaacaagttaattaagcacaggttgaacaaacaacagtttaatcttctacttgaagatctgtatgaaaaaaaaactgtaaaattcacctcatacaagttgccgtagtgattgtgtaagcaattcctatcccgtacaagttcaggtactgcagcaacccacataaccaagtgtgcttcctccctaaacatattgccaagttgccacaaaaaccataccattaatttactgctacccaatatacaatccaaaagtggtatctatatttgaccaattggacttcctgaggaaaagattggctaactaacttagctgaagtaggattaatcaaggtacttaattacctaagtgaactctgacggcgtccatgtaggagtagttcctctgcatcttctccgagccaggagacctgtagcagtgcgacagcaggaaggccgagatgtaggtgacgaaggcgaagcacaccatggcgatggggccggccacccagccgagctgcgcgacgctccacgacagcgccagcacgccgcacccgatcaccgcggtgataatgtgcgctacgcacgtccatagattccctgaaagttcatcgaagaagaagaagacaaggaaaattagaagagaagagctcaagagcaccttactacttgccggcatgcctgaattctcgtcgatgaaccaaacagatcgaacaaatctcggcgacagagagcgtaccggtgcgttgtgggtggccgtcgtcgtcgagcttgggagcagaggccacctcgagcggcagctgcggcgccattgtcaaaggctcagtgaagccttcaaatttgactcgttggactacagggaggactgaggagtgaacacgcgagagctatacagtactactatatactagtccactaaccaattaagctagcgttgtcactggattggtgagtgatttggataaagaaacttgggggataactctgccgtatcgacagccggaatcgcgccttgttttaagtacaaaatggcacgagcagacgaggctgctgctcatgttcgttgaatcattgtatagtagcctcctgacaaatccaactgcagcacagcctgtatgtactacaagaacacacgtcaaaattgtcggtttctaggagcgcctgtagtttgccaaggcctctaaactgcatattagtactacctccgttttttaataggtgatgttgttgactttttcttacatgtttgaccattcgtcttattcaaaaaattttatacaaatatataagatataaaccacacttaaaagactatgagtgataaaacaactcataacaaaataaattataattatgtaaattttttgaataagatgaatggtcaaacatgtgagaaaaaattaacggtgtcatctattaaaaaatgaagggagtagtactgtagtagtattatgttataatcgagtcacaggtttaataccaaacctagccaaccaaaaatttatgttgattagaaaggatgcacaatataccacaaacattttgacagtgactgactgggaattagcggcacggttatggatcattttcaatgcgcatgttgcttttttcgtggatgaattgaacattgcttgcttacaagtcactgggctcgttttcatggattacgggtggggtcaacggcacctcttcttgtcagctgctttgacaacttttttctgtatacgggttacgagggctgaataaagccacggtgtagaagatcagggtttctttttttgtgttcatatatgatgtcttcacatctctgggcataaaaacaggctgggagcaaatctcctttccgatgacgatgaggtggttggtacttctacgtggtagtgatttgcggcctttttctttgtttatttcctcgagattattattatttgcctatatagattggttctttgatatatgtgaaaatatagtatggtacaatgatacatgtggtgcctacatgagaattatgtgatactagtctgttaaaaaaaggtaaactctagctatgagcttaggcacgagattcgtaactaggattggacttttttttttgacagaggggtagacggtttttgataattcgggatatgctcctctctggacatccgctatttatgttgtgacatgctcattattgcaaagaaactagagaaaaaatgctcactatatactatacagagaaacctgacatacatattggacagataaattaacaatttttaagaaaatatttcctccatctaaaacacatttttttaagtactacgaatctaaaggcattgctaattttggagggtttcttggaagtgtagtgtggctccgctaccgccctctcttttttttttggtagtttccctttctttcaccagttgcagctctgatttttccttttctttccccatgacataggcatgtctggccgtttgtgtgtgtaacaaaaactcttttgtttttaatatattgacgtgcaatccttttgcacgttcgtagtactaggaagtgtcccatctgtccaaaattcattatattctgggatggatggagtacctaaaggtacgatattttctactgtaagaaattctgatataaatgttgatacctcttgatattttgacatataaaaccgtatcttctaatgtaaaaatttatggtgtaacttttaatacctcttagtaatttgaggtaccaatagtggctcggtggacattccctcgttgtttgcatgtcatccaaatggctataaaaaatttaacaagatagattaataggtatgggataaatcacttaacaaacatgcaagttaaaatttaacttttacaggttgcaacgaaaaaacaaattaaactatggcttaacatatattcgcactcaaatttataatctgttgtaacatatgtaaattaaatttgagcttgcatgtttgtggagtgatttatcacatattaacatgcaactagcgaaaggataaccccttaagagttaatagtttcccatatcagggtactaaattttacattaaaaagtgatacctcccggtatttctcgttgactgcaataccatttttgttcattctggattcaaaatcatataattttagattcccctatttagcttactagtcatataaactggtaacagaacatatataatcactctgtcaatggtggaaaaataaagaaagacaggtatatacagaacaatgcttaaacagagtcaatttttcttcttgataatcagttcgtggcaccagaccagaacctgcctgcaaaactttccccaaggcaatgggagctatctagtgggtgcttagttcagctatcagggttgaatggaatccttctgcgtttcatgtaattttcgcacgctttcttgagcggatcgcacgagtgcgcttttgccaactccatgatgccgctcgcggtgtcgtcgccgatgaagcggcacaggttgctcgcgcacatcagcttcagcctctccatggcgtacatgtcggcggcctcgaacacctcccgcgccatggcagccgcgttccggcccttgttcgcctccggcggcaggctgtcgtggtagacgtagtggagcacggcgccgaacgcctccgggctcatctcccggaggcggatcgccggcgagctcgcctcgttcccgacctggccgtagaggagcttccggaagtagagcgactggccggcgagcgcgaggcggtgcgccccgaacgtcgcgtcgccgacgtggatctccaggtcgaacggggcgtcgccgctgaggaggaactccatggcgttcctggcgtggcacgacggcggcacgggcacgcggacggggccgccggcgccggtgacgacgggccggccggcgccgcggcggcgctggatgacgtgcatggtgcagcgcaccgtcagcgcgtcgtcgtggatggcgcccagggcggcgccctccagctgctcccgggcgatgtacttgcggatgccccacgagttgttgcggttgtcgaacctgcacgggcgatcgatccgcacgtcgtggagtacggcgccgccgccgccgccgccgccgagcagcgcgaaggagaactcgacgtggtacacggagccgcacgatggccggtagagggactggaggaagaaggcgacgtggtcggacgtgtcgctgttgtagccgtcggggtagaagcggacgaaccactcgcggccggcgacggtgaagttccgggagaggacggaattgccgacgcccttgcccttgacgccgctgtactgccggatcgtgaactggtgcacgccggtcaccctcggcacctcgttcaccgagcccgacacggcgtcgtcgtgctcgtagccgtcgtcgtcgatcaccgagaagcagcaacccatctcgccgctggtatagtcgcgttaattagggttttagccgcccctggccggtcgtcgatcgtttcgatatcggtaagggaaaaatagcctgatggagatcgtaaaggtgcattacatgcatgcagaaacggaaaagcggaaacgtcgccaagacatagtagtaagatatatatattcctagtataaatacggatcagatttcatatagagaaattaattaacgggctccttttctttctctgcataggctctgtcacgttcattgcccacgtcgcgcacaacctttgtcacgttgacgtaatacgtagtatatatattttttttgttattactccatccatttcaaattgatctacatatagtatttttgaggttatttttaaatgatttacatatttgaatttatttattaagtctattcgttatttgtgcattgaaataaatggacattgatgcatctatccatgcacacaagtatttataacccacatgcaatatcttgatttgcaattggctagaaaatagtggggatggtgtatacattgagtttgttgctagagtaaatatggtatgagagagttattagtttttttggtcttggtgtatctatgaaatatgtagatcaatttgaaatggagggagtactgcgcacaacgtacatgaggtgaggcatgaaaacgagtcggctcggcaccgtgaaccgctttgtatcgcatcatcagattaattggtgtacgtcttgacatcgacaaggtttctatcagcctaccaggaaaacgaacttagctttgtgaacagtgcgaaggctgatgtgagaagctagttcagtgttcgtgcgcgaagccgcgaaccccgtgtgaccgtgtccggtgtccccctgcacgcggctgtccacacgtacgattgatggcgccgacagcgagagctccaccagattaccggccagagagacaccggctgatgatatgagcaacacggcagcctcatcgtccggtgcgtgtcacctcggcgtacgtgatcggagccgacggtgtacgtaataacgacgtccgccatcggcgacccacgcgttggtgcatgcgtcgccacagcgaaatcggcggcgttgattttcggccggagttggaggatcatcacgacccaagctaggggggtggcgcgcgcggtacgacgtacgtgtcggccggccggctcgtttaattcgaggcggtgcttggctgcatacgtctccttttcgccttgaagcgttacggcgcaacagggtgtccggcatattgaccctgacaaacaagtatacggcgctgcatgccgccccttctcacggccttctgcgtcgtcgagtttgtcgtgccgtgtcacctattccttccgtataaaaaaaataaaaaaaaaccttgaatttacgtttctgtccgtcttatatgaattttttttataattagtattttcattgttgttagatgataaaacataattattattttatgcgtgatttgtctttttattttttttcatatttttttcaaataagacggacggtcaaacgttagatatagaaacccagggtttgtcttttttgggacagagggagtacgggtgggacgctgaagcatctaggcccccggtgttaattttggtaattaatgacaagcgctaattgtggactaaccgttgtctttgagctatacattttaagttaggtccacgtcgaatgtgcgcatggatgattatcgatggattaaaattgacgtcgcaaagcaaagggaaagaagacggtaaaactagcgctttaatttagaattgatcgaggtgtagggcgatcaaatttgctagtttatttttagtttcgccgtactattaagaggggtaatgacctagcaaagagataattttaattgccacattaggtcattatgcatttagacttgtgctcacatttcacacacatacacacttcactgggttcgggctgaccaggggcggtcagaccggccacatagtaggggacttcacagggtagtggcggtctgaccggcgtgccctggccggtctgaccggccgcaagaaggcggtctgaccgacgcgtaaggctggtctgaccggcggcacatgcgcggtcagaccggccccctggaggccgggatggtgctgctcgggatggccgatacagagccgacggagccgtattcggtcagaccgagccgatggcggtctgaccgagccgaggccggtctgaccggctaccccatgtcggtctgaccggccaggccgatggggccctttgacagggctacaacggctagttttctagccgttgcagagtagcacggtctgaccggccacatacctccggtcagaccggcagagcacagagttaggggatttcgcccccaacggctagttttggtgggtgggagtataaatactcccccaccagcagcaagggggctctcttggcacccaattcaattgcatacaccccatgcacctttctcacactcacttgagctttgtgttcatccatctagtgtgttagaggattgtttagccaagagtcaagtgcatttgcttccattgtagagctagtgtggcacttgatcatctccacgccgggtcattgcttgttactcttggaggttgccgcctcctagacggcttgtggaggagttgcccgatgacctctccgagaagattgtggaggaggcccggcgccggtttgtgagtgggttggagttcaccaccttcggagtgaaggaagaactaccccgagtgatcgaggcttgggtagtcctctccgtgggccggctcccgccttgcccaccccttgacgaagggggcgtgcggtggcttcgtggttgagcggtggagttgggctcgtctcaacggggagtaggaaaccggcgagtttccgaacctcggtgaaaaatctcttgtctccttgtcttatttgattgtcgcatttacatttgtgcaatttacttttctagagacatacttgagatcatatcatcctaggattgcaaaactttgacataggagtgtgatttactttccttgagatataattgaaccactatcaccctaggtttacaaaacataacttagttgcttagttagagttcacccttaccaagcctagcaatttaggttagttttgattaggtgttatttagttttaaatcgcctattcacccccctctagtcgatatctcgatcctacagacgcgtgccaagaaacattcaaacaagtctgtgaatacagttcagtattacatttacacagcagttagcagtattgctatctaggaattttgctcatcctagatagcaatattctaggatgaaggtaggagtagcacgtagcagagatgagagttgagaccatcacttcgaatccaccgagacggccagtctgaatgtttgctagagagagtatttcatttcagtttgcattactgtttgtatatctatattcaaaaggattttgtatatattacgtactaattctccgctacttctatattcaaaaggattttgtatatattacgtactaattctccgctacttctatattcaaaaggattttacacatgctatttttccaaataatacttattgcactgttctttgatctgttatagattttggatttgcgacatgttctatttactcaacccaaaacccatgagcattatcaattattttgacaaggttgacaaaggcttcaaccaaaagagcttacgtagtactccatcatctgctctttttcctaaccagatacagatgatgatcgaaaataccccatcattgagtacaccattgttgaatttctgagcgtgagcctccgcaactcgatgtcgaagttaaacaatacggtacgctagtcactagtacggggcggcaggggataaatgaactagcggacatgcacgcaacgcacgaatccagtggcgccaccacacggggaggacggtgatccatcatcgatgttctcgaaggatcccgcagaaaaccacgacgagccatgttagctcacttaaaaaaaaaaaagcccctcaccccctcgacctcgcgcttttcgcatagccacgccacggcacggcatctcagggcccgtatacatcgctggcaaaaattttcaccaaatcacatcaaatatttaataaaatattagtaaatatataaaaaaataactaattacacatattgtgtctaaattatgagatgaatcttttaaacctaattattctatgatttggtaatatggtgcttaaatattattaatgacagattaattatacttaataaattcgtcttacagtttacatgtggaatttataatttattttgttattaatttatatttaatacttgtgtgcgtgtgtattcgatgtgacacgccaaaactttacatccatggatataaacactccctcaccctctatcgggtgcaaatacgcggaacaccaaggacctgggtgcaaaaacacccatcaccctcccccgacgaagcaagagaagcttccactagaaaatggcccaatcccgtcgcccccttcccctcctccgctcctcccaaacccaaatccgccaaatttgactcgcgcgaggggcccgattcgtggggcgcgcttccccctgctgctgctgctgctgctgctgggattcggacgagctggtcgcgttcgcgttcgtgtgatctaggggggggatatggggtacttgagctccgtgatccccacggatggatcgccggtcagcggcggcggcctcaggtgggagcgattgattctcgggacgcctctcctgtcctctttttgcgcttttttttttgggtctgattcgtgtttgctttacccgaattctgggttttttttttggagtactccatctagtcaattcgattgtctagcttagctctggcgactagcagtttttgttttagataatggataatctggcaactagtagataatggctgaatgtttagttctaatcaattcagtacggtccaggcgtgtgatacgttgcttgctgcatcgcacgaatttcgtataactgctcgcgtgggtttcctttgctttgaacacgctgtttaagctcaaaagcaaggctggagtatgggataagctatgcaatcccatttttgtttgttttattagtactttttggtgggactataaacaagataaatccagtttggagttatgttgtccgtttaagtaggatattcatatgctacatacctgatctgagcataagcagttgcgtcgaataaatttggacggttattctgaatacagactaaaatgaacttatgtgatgttacgttggagaattattaagtgtagcacgtcctaatgggcatgatagcaaaaggtaagaggccaccttagatgtgcttatacattctatgggttgagatcaaggaaactaatgagtaatgcacggtttgggcatttggtactgttagttgcaagctggaagttcgtctccctcatttctcaaatgcattttctatgaatatgacatcttgcatcatgccatgttagttctttcagtaacagcatatacaataggtcatgttgttgtagctcaccacacaacacaaccggttctagctttttgaaccagtgaactgtaataattgtagtgcctgcaatctggctgcgtctggaagtttaggagtagtgactttatgaataatattctatttccaattaatcaacgttgtcatggtagcttgattttatggtgtaaatgcagttattaggactgttgctctcctatttgctcaacatttctcattctttttttgccagccagaatggtaagtttagctatgggtatgcgagctcccctggtaaaagggcttccatggaagacttttacgagacaagaattgactctgttgatgggcagattattggtctttttggagtttttgatggtatgtatgaatttgtcacattcgtgcataatctctacccattgataattctttatcattttagaaaggaacatttctaagattacactcttccaagttttagacctttctcttttgtaccaaaagaacataccatttatgtttcctttgctaatcttgtatagtataaaaaagctcaaaataattcatttgccttgtaacatttcttatttccgcagttagagctagtatgacggtgagaagtccatggagaaagttttaaagattactcatactagggcacaatgctttaaattgaactagaagtgtggatataccaagctcttgagcttattttaggaaaaataaatgctaaacatacagttcattttataggtcatggtggtgctaaagtagctgagtatgttaaacagaatctcttcagtcatcttctaaggcatccaaagttcatcagtgacaccaaagtggcaataggtattggtttgttctctttccataattcactagatgttgagttttgtgtatagaattgacagaactaccacgtgatattgtttgctgtagatgatgcttataaaagtaccgacagtgaattcttagaatctgacagcagtcaaaaccagtgtggatcaactgcatcaaccgctgtccttgttggtgaccgtctctttgttgcaaacgttggagactctagggctatcatatgcagggggggaaatggtaattgacagttcactgtaccatctcttcagcttcctggttgcatttacttgatactttctgactttatatagcatgacacattattttttttcttttttatggtatgcttaaaaattcaagagagccgattatgtttggcatattctattattaatagagacctctcttaaggtacgaatatttttgcttgttttgttagaatgttgtatttaccactgagcatctgcattgtaccaggcatgagaatcaagatttgttggtgatgaaatgagtgccatgagaaataatctgtaggttatctgtgataatttatcagttcttcacatagaagctctgctggttttttgcagctatagctgtttcaaaagatcacaagcctgatcagacagatgagcgacaacgtatcgaagatgctggaggttttgtaatgtgggcaggtgctaagcactacattatcttattttgtatatgaatggactatgatcgtgttcctaatgatggtattttgttccttaggaacatggcgtgttggtggtgtgcttgctgtttctcgcgcttttggtgacaaactcttaaagcagtatgtagttgtggatcctgagattcgggtatgcaatcctgaccaatttaatgtttgttatgtctacttacctctcaaaatgcatatgtaggtatcaccatgacagtaggtgaacgtttggaatcatgattcccttgtgtcattggattgaatgtcaagagtgatattgatagtagttgccatcttaatcatgatatacttattgaggggatatttgtggcataaattttcgaaggaaaaattaaggatggctttctaccagcctgaacattttattgatcaaaatttgtaccaagttacatacatattgtgaagaggtacgggggatgagggcctgagtggaagctaaagggtcctatatattacaaagtgcgagaaatttgttcccccaatctagtatacattgccagctaaaactatttgtgctgcgatgggaccactggaggtcttccgcacagcgtcttgtcgtagttgctgaaaactttgttgttgaggcacttccagatattccatagcaaaactaatagggcggtatgataaacgaccagggacatattttgtcttcagcattgtttcatttttggcctttttgttatcaatgtcttacagctgcacttctgatctgttctactgccagcttcttagtcgacctgaagaaccatttcctaatatatgttgttaattttttaggcttcagaataatcatcctttatattcacctttcacaaatgatgaccttgttcagtaatgcttttgtgggtcataggaggaagttattgatcactctctcgagttcctcattcttgcaagtgatgggctgtgggatgtagtaaccaatgaggtaaattcaagaaaatgaaaagagaagatttttatgtatcttaatcgtattccttgtgcttgatgtagcccccttttgcatttgctcttatgcaggaggctgtcgacatgaccagatcgattcatgacccagaagaagctgcaaagaagctcttgcaagaggcctacaagagggagagcagtgacaacataacttgtgttgtcgtgcgcttcttgcatgggcaagggagtagtggatatgcttaaaaaacaactggtaaaagttacccaatgtagttgtgtaccaccatgtatacatgttttaattcaaatctcacggggttaaatggagagaaactcggagtaggatacgtgtattctgatggctgaagtaagctgaagggtgagtatgccttaggttaacaataagtttgctggtgaccgatcaccatagttcgttgcttttgaccctggatttgatggtcgtgttgtattgctacgggagactggatcgtttccctaggttcaatgtacgtggatattactcctctatttatttgtttgtatcctccacttccggtgagctaagtttgactttgtagccattcttgttattactgtagacatcagtgagacagtgacagcattatgtatctctgcagtttggtgggttggaagagaagtagagaatccatgctgttctacatggccgaaccagattcagattgcagagtttatggcagagcaaccacatctcaaactgcatgttttttatgtgtgatgctggacgccctggagctctccatcctgaccggccgtccggcggtgagaatcgagatccgacgagaattgcggcgtgtcgtgcccgtgtcgagggcagggaagccggcaccacacaagatatcatcgaagacagatcggagcgtttgattaatcatcaaagacagattggagatggtggcaaagggtttaacagttttggaatgttaataatcatttctagatgattagagttccttcaagtatgttagagggcaaatacagccaccgttatcattgaaggaaaggcgccctgcgccttgtgacctgaacttttcgcagcctaagaagaggcccttctcagggacatgttcagtacatccatttttggcatgccaatgccccatcgatgatttcttttgaccggtgatctacacaggcgctttcacaaacacaatcctcaaaatccaacactttgccagttgttactaacaagcaacgccgttcctgcccatgtgatcaccagcagaaaccatttgggccccgacggccatatcttctgtaatatacaatgactagttagaataatagctgaagagaagtagctgaaacaaatttgaaagactgacaaattttcaatcaaaacatactgagtcacatccaaaatttctcaatgtttgggcagaatttgaagttccaggtttcactctttctaattattgggttgtgtataaaaaaaccaaatatactaatgtggctaatactcatcacccttcaaagatactatttaacagtgcaagtagagtctgccagtaacttaccactttcactatctgatgcatcgtcaagtctggctatagcatcgagtaatgactgctcctggtcctacaaggacaccatttgacctcacaactctagacgaaggatatctataaggagcttttctccatcatacataattctgtagaaaattgcataacaacagacaagccaactcacttgcaaaagtttcttggccttttcgatctcacccatatttggattggacaaaaccctctccacctgggttggaacatacaatagtgaggtaaaaaaccaatatctgaatgcataatatctgatctcatgagataatttacctctatgacaacacttcgagtgttaggtacatcaatgtgaccaatattcctgttaattccattttggggaggagcactatccttagtaggctcatttcgagaaaaccttcctcctcccctacttgccattgccattgtaccgttgttgcctgggtgcctcctcatcccaggatgaggaccccaaccatctcgatttgagatgccttgatcatcaaggtcccatattatatcttcaggtgccaactgagaaatgatttatcatcttcttttgattaaatgttaaacaaacagtggcaattagccaggacgattcaacaattttcatgttctagctaaaaacaagtaaaacttaataaatttataacagatgacatgctattcaacaaactctatactctaataactaactaaattttagtactcctaccggttacactacagttcagcttcagaaacctagataaccaaaggttctaaaatttaggaaaaaaatacattttgacttctaaaactgtcccacctgacaaaacattaaaacccactatacttgaaaaaaataacgtatctaaacatctcctcaaggcggccctgacggtggtcttgccaccaaggcaaataatgtggcccatcacatggtaatgactccgcgaacaaaaaatacaaactcatcgcaaaatgggtgtaaggtgtcataaaaaccctcttttacatccagttccatgactactcaggcactagccatgctgctcaattccaaagtcctatctagtttttactctcccaaatcttatctagcttctacttaacccccatgaccctcaatttgttgaataattgccgcatcatcagctgcagtggtaagatactaagatcatattccaagttgctccaggggagttacttagaaggtatcacatagttttggtaggccatctaaactattgtaatttcctgcagaactactatcaacgtaattatgacaataaatctgcagcaacagaaaaatgtttcctgtttaatttctatgttattgggcacgcgagcagacagtcactagtttgtcattgcaacaaatcaaatgtaacataaaaatatgaatatcccacggccacagatcaagaaagaaaaactttattatggattagtaaaaaaacatctacagatagaaacaaggcaatggttgaaaatactgcttacatcactaagtctgactgactcccaagtctgggctactgtgcccatgtcatagacgagagcatgtttaccctgaaaagtatcaggggtgtccataagcttcgcttacttgacaaaaatgcaaatctgcagcaagtagcaaaaataatagtgaaattaaacaacaaaccgtagcaggattatagtcagttatagtggcctcatagaagttattgtcatctggccatcttgtataaattttccggttaatcaatgaagttggatccgcggatggcacagcgagtggtgtattctgtaatgcataaaaaaagaactcatgatattactactatgggaatgcaacaaacatgacttgtcgtattcaaaacacaccgtcctagtcttcttgccctttgttcctgaaaatggtccccactttgtagatgaaggaactgagggagaaggcatcgcaggggactggaggccagcagaatgtgaaggaatagaaaggggtgtcctttgcctctttgcagctgggccaggttctgtatcatgaaaaattctgctgccacgatgctgtgcactcagggatccacctccctgtctaaactccctgcaaaatattgcgaaggataaataaattactaacgaaaaaataaaatggttggtttaaacatgtgcatgaacaaaaattgaatgattgtatgaagacctcattctgcggatggccacatcttcattaactttgtttaatagttccctgtgttcatcatcagagactcttaattctttcctgagttcagtgatcaaactttctttttcctggacaaaaaatatacattttttattctcaacacaaaaaaggcatgtgcaaagaatggctactaaaactgttagcacaagattcttttttttatacatacatacccaggatatagcatcagattgcactttaaatgctctaagaacaccagtgtacgcctcttgctcaacctgatgtatttcactctccaaatcaccgtgcggcctaatgtaagaaaatggcataacagatgccctgccattcgcactaaaagatcgcactcttaatcctctattttgtgttggagggagatcgtcgtcagtccctgaaattttgatagaatgaacagacaagtcactataccatgaaattcactatatgagaaaaaagacataaatattttgtgaactacagggttcaataactgcccacaacaattgggcttcacaatttggcaagataagccagaatctagagctggccgacgtcatgtcatcagtctgcaccaagggtttggcagcaggatctttctctagttgatcaggaacgcataaacagaaacagtggtttccttaaaacttcacataatatcagaaagataaaaaaaaaaaaggtccatctttattagaacacagtaagcagatccacttcagaagcaactattgccaacctcgtctcaaaggctttcatccatagtggcagagtcttaggccatggttcataaaatgcatagtaaaactatgaaataaatgtctttcactgcattgaccgcctcaattacaaattcataataaccaataacctgccaacaaaacattttttttcttacaatacctacgcacctaatcaaccgatattactgaagcaataattttgaaggaaaaaaaaagacacatgttatcgaaacgaggcagggacgcagcagacaaccaatctgacggaaacaaaaaaaaaacatacaaactacaaatcctggagagggcttaaccgcgcgcgcccaaacctaccagcacaaaaatcctcctaacccgacgcaactcaccgctggaatcgtaggggttattgtaccccatggccttcatgaacacccgccgggacgcgcgacggtgtggaaccctagaaaacccgccgcggcgcgattcctccggatccgggcaccgcggcaacgccccccgctcgaatccggagatgcagcggccggatcgagcaccgcctcgaccgattcgggaggtttagggcttggaatcggatggggatttggggggcgatgggaatcgctcgtgtcggggagaggagaggaggagaggacgactaggtttagccacgcgctgctctgctcggctcagctcggctcggctcgggctcgagccggaccccgctcggctcccacgcgtgcaacgtcggctcgagcttaggtccgggccgagcgagggatgcggcggaagctgtgtcagcctgggatgcgaaacccaaagcccagattagctgccggcccagccgcgtccaactccacattggactcgagttcggcccataattagtactaccatctttagaagtaggcttttgtcggtccatgtccatccagactaatctcaggtctggcaagtgaattactctctagttttaatgcttgaacgccgttaacttctcgttcgttttatttaaaaaaagagagtataatatatgggcgggccctaaacttatagacatatgtcatctaggtccccaaactcagaagacacatttttgggtccctaaactcgcttagccgtacattacctgtccaaatagtatttgacctagtcgctcgccgacatggactgccagcgtggaggggcagggacagctagggtgtgaaatatgaaaaaaaaaatctattccctcatcatttcattcgccaaatatcattttcagtacatttcagataattgcacattttcaactagcctgaaggtagtacacatcttggtcaccacaacaaatacacaacaagctactacacatttcagtcctaacaagttgctctgcagcatgttcatgtccctatgaagtctgaacccagctcaaccaattcatttctctgcacatgcacaacaggagctggacattttgcatggataccagaagctgcaagagccaagatgtcctgtatttgtcaaatactccttatattgatcctcccaataccaaaactcacatccatttccatctcaatgaaaaaacttgcacatgtaaactcaaaatgcttgcaagacaccaatgctctacaacaggagagaagaaataacctgatgtaaaagatgatgcctttattctcagctgtattaagagcaattaatcaacgggattccatgtaaccacaccagccatttgcgcagtagttgtaggacatgtagttgcgctcgggctaggcgacagtgccgagcttggcgtcgtcgagctcctggtggatccgacgaccagggtttcccaaaccgccgggcccggggttaccgcgccccggcggtaagcatggttaccgcggtaatcgtgaaaaaccatacgaaactatgtaaaatttatcaaaaatttaaattattttttaatttatttgaatttaaggaggttaccgtggtatttttattaccgtacccccacggtaaggccggtaaccgctgtaaccgcgcggttaccagcggtattgtaaaccttgccgatgacggccacacaccgacggagttgttgttggtgctgtagccatggtagaacatgacgaatcgcacgcagctctagttgatcttgacgtcgtcacagcgtcactagggaatcaaagaaggggatagtgaatcgaccaagagcttgctagggatttcgttgctcagcatggtggggaaaaaatggggacaggggattcgatatgatttctaggatgagggaataggggggttctttgcatatttgacaccctagctgtccccgcccctccacgctggcagtccacgtcggcgagtagactggctcaaatgcaatttggacaggtgatgtacggctaagcgagtttagagacccaaaactgtattttctaagtttggggacctagatgacatagccttacaagtttaggggccgcccatacattttactccttcaaaaatctcgtgcttttttgttttactatgatttttattattaaacatattcttactatgaattatatttttacaataaaattaaataagacaaatggtccaatgtatatccaagacacctaaaatcaagtgtgtcaaacattaaaaaccggagatgttatacccagttttgcaccaattttgatagatgaggtggtataactggttttgcagttaagggggacgatttgatcaggggcaagagatgagggaggtaaaatagacttgttccattttttttattggcttcattatttagcaggccggtccaattcattcacccgtgctgaatcgggctctttttttctttttaccaggccgcctgttcagcccatgcttgtacacattcagggatgtatcagcaggcacctcagcttgacctcaaaagaaagaaattttggttcttttgattttttttattggcattaacaaatatcgctataatgttagacagatatattactagtttataaaatacatgaagtaagtcggaaactaaacatctctccttcaaagagggtgtgagagggatcaagagtatcctaattatcgcaattaggaatggatccaattctgttgagtctgactcattgtggtcatttctcttttaacaaaccttagttataaaaggattgaacttggatccatttatggatccaattctatttagtctgactcattgtggtcatttctctttaacgaaccttggttataaaaggcttgaacaatcgggatccaattacttattacttatgatacctagttgatattaatagctcgagatttacgtcttggtcaagcgtgtgtgtgtgtgtgtgtgtgtgtgtgtgtgtatatatatatatatatatcgatcgatcctgactccatgagcgtaagaatatgctataatttttaacgatgatatataatcatatagacacttttttttatttgatagtacaatagtataatccggttacagcttagatagatatcctgcatgcaggtttattcagtatacaatacatttattctggtggaacactcttaatttgtgccattttattctagcttcacgcatggccagcgcctactcacgcagcaccaccatcggggcgccggtgtagaacgggtacacctccgacctgaggaggcacctcggcccggcgatcctggcgccgtcgacgttcgccgggaacgtgtcccaccacctggcgacgaggccctcgaggcagccgcggcacgcctccagcgtgatgtcgaacgcgcactgcgccgtcgcgtacaggttggggaaccccgggtcggcgcccacccgctgccccgtcgcgaacagcttcctcgcgatgtcccccgccgcgtactccgcggtggccgccagcagccgcgtcaccgcgcggtcgtaggcggcgacgtcggcgccgctgctgatgttggtgctgctcatgagggtcgtcagctgccccggccccaccttgtcggcgaggaagtcgtccttgtcggagaggcgggcgtagcactcgttgtagacgagggcgacgtccttggcgcggcggcacgcgctcccggcgtccctccacacgctggtgccgcagtcgtagcaggcggcgcgggagatgtcgccgcggcagaggaggaggccgtagacggtgttcggggcggcgccgttggagcccgtggagaagaggatctcctgggaggaggcgccgtcgcggagggtgagggccaggttcaggaggttgttctcgtaggcgctcccctgctcgtacgtgccgtcgccgcaggtagcccacggctggccggcggcgagcgggacgaccgccaccgccgccgccacgaggagaacgagcaaagtgcaccgcgccattgcaatggcagtgatcgttaagctataggttgatggattagcgatcgatgtgtgtgcagcaaagcgtcgagcattgcatgcatatttataggtacggtaacgtactaaggtagttttggacgacacgcatcgccaacctatcgttttggatgaggctctaatttgtcgagatagctagctagttggcaatttggcgtgtgctatttgccgataactaaacacacagttccacaaaacaagctgaattggcgccgattttatgtacgggtttaactgtttaagaaaccggtcaaaaccgttggttctgatttcaacatcgatccagccaatgagagaaccacgcacggcagctgcgctgatctttgatagcactagttcaatgttgcctagtcggattaattcgctggtttcagacgaactatagaggaacagcattgactgttaggtacattcgtcgcactcgcacaggcgcacattcagtggatatttcgttactctactttaattaatttgtagtcaccaaactgaacaccgtctccgatgtactagaacaaaaggatatacttaattactctacttaatctactttttttgtttgaatcatgggctgcgtgcctgcgttctatggtctgtgcaaaggtttaacgggcactttaacaagggctatgtttctatggtctatgcaaaggttaaccgtgagagcccatttttactcaatcggaaccaggtcttctgatgaagaggatttctacatcaaaggggatatctgtgccggatcgttgtttacccagcattcaacgacagcatcaattcatagtttcctaccctctcctccgtcgtaatttggcccagaatcctgcggcaaaacgacggggtttcttgtagcggcgtacgtttccccctggttggctctgagctaggccgaacgactgaagagaagctaggaaccagtgctgccattggatgcggaatgaacggtgatcctacacggatatccttctaacatatagatatcctctatatactaaatgatctggttttactaagtggtctaaagtagagatggcaacgaactggattgtctcggtggaataggaatacgtcttaacaagcttaccgggtctaaaatggaacaaatatacctatgcctgctcgtcaagtacctaaccgaaagtccgaaacccagtcagtacttgtggatattttgcaaaacgtgacataatatatcaaattgatagttaaaaaccatcaacaaattcagagtttagaccatcttgcaagcatcagcattcaacagctagcacaagcaatgaacatgtcggggtcaggtgatcctgacaattttgacgaaatctgattgcttgtacatagaggataacgcaatggtttaagtaataagtatggtcaatatataatgacaccgtatctcaattttctatacaagccatcgcttgtgattaatattatacgtgtgttttgtttttattgtttcttgactggcccccctctcctatcatgcataatcctgctccgccgttgaggaagggaactgtacagtgtactgttccggaaactggatagctttccctacgttcaatgcactacgtggacatcattacttatccattcactctgtttcagcttataagaactactttaaatttaactaaaactaagtttgttgaaaaaaaataatactctctctgtcccaaaatataagaacttatgattacattaaatatttactagtattacaaatctggacaggcagcatgtccagatttatagaactagaaaatgtcacgtcccatactaggtttttatattatgggacaaagggagtaacatttttaagtcaagataaatttattgtgaaaatatattcaattatttattgatgaaactaatttagtattataaatattacttgtctataaatttagttaaaattttaaaaaattaactttgaccaaagttaaaacgtctgaaacggagggagttctcagtatggtcggtattagtatcttgccccaccacttccattgagcaacttgactttgcagccattgttactgtagataccagtgagacagtgattgcgttgtgtcctgtgtaagggtctgattttgtttatctattctaatcttgtcactgtagagtagacaactactccctctataataaaaacattggtaaactatgtcgagatttaaattcaaaaatagttttttatggaggatgtagacattagtaagactgattttttcattttttgtaaggttggaagagaagccatggcatattttttttgtctatgcatcttgctcactaaataattattaccgaaaattatagaaaaaatacatatacatataataaaattgaagatgagccaggacaaaaaatagtatcggattatcttattcagttggaccacactttaacgaaaaatttcgggctgctcatcgttataagctggtctccctctcaggttgaattggcgaggtgggattattttttgctacagtacatcgctgctgctctgctctctctgctctgcttgctgcgctgctgcttgcatgctactgtgggctgccttttgctgctgggccagctagctactgggctgcatgggctggcctgctagctagctttgctctttttccttcttctcttctcttctttttctttttcttttttctctaattatttgcagggcgttacaagatcttataaatagataatagtactaaaagtgcatgtacagtttatttattttttttaaatctttggtgatatttattactagttgatatgtatagtgtgtgcacacggacacgttcccagatccagaaacggtttggggcaaaaagtatagaaaaaatgtacttgttcgtatgtataagcagatgctggaaattggagcatttttgagacaaggcccatgaaaatatttgggcataatagcatcttatataatgtttttgagagaaataatctcaagcatacaacaacgtcgtcagctcataccgggccttggcagaatacacgagttccttcagaatcctttttttttttaaagaacctagcgagctggttttatattatagaagaagtaagaaaacaaaaatgtataaaagggactattcctgtctacacgctttagaaaaatagaagcctactctcttaacataatacattgcactcccttggcgcctgccatttcccacaaatgaagctcatctatgatcttgctagcaagtgccggcggcgtagactcagtgcctctaaaaatgcaattgtttctttctatccaaatctcccaaagcgtggccaagaatactgaacgcagccttttctgttgcaacttttctgcctcatctgtttgctcgcgccaccaattgaggagagtatcgtctatggtcatattgaggaaacgtgacagcctgatcttgcgaccaatgtcccgccatacctgctgcgtgaaggggcactccatgaagaggtgccgtactatttcaagatttctgaacacagagttggcaaaagtaattatttggccagcccctgcattgcaatcaatccgtcgtccatattctattttttgccagcaaccacacgaagaatttgtgtttacccggtgcccaagtcttccatacaagctcggctgattccgaaaatcgttttgcccatgaactgcatggcatatgctgatttcgccgtatacatgccgctggctgaccaccgccggaggattgtgtcatcagccccttcatggatcacatctcctgcattgtggagcacttcccatacacatatatattcctgaagcaactgtattgtcaccttccgcggatatcttcgatccaagcattattggttattgcctcaagagtcgatttgttcttccttttggagtgcttgaaaaggtttggggctagatatttcaacggctgatctcctatccagttggattcccaaaattttgcctttcgtccatctccaactgttaccttgatggcggccacgaacagtgcacaatcggtgagggcggcggggttcctatccaagatttttccgggcttgtccactcgtaccagagccaagagccaacatagcctcagcgatcgtgaaaatttctcgaagcaacgtagttccttcaaaatctgtttccatgcacatcacaacgtacggatcacgatcattactccagaatctgaattctgaaatttccacaaaatggatgaactgatgaagggaagtccagcctcgatccaagattcaatcacaatgtgccacatcggtttgttaagatggtcgtaaacagttgctggtcagaattcttgcttttccttttacaactttttttttggaacaattctgaagaatccttgtcccctgaaggcagaatccttgccttgccttgccaaatggtttagtcgatgacttgaggtccttctaactgttcattctgattctgaacagtctacagattaaggtgaccataagttttagatattattccaaggcatatcaaggaggcccaacctggaggatgtagaggccgttggtttttaatccataactgaaaaaaggactacctattgatacttcgacaaatttatgtcttcaaatcttacagaattttcaactaatggatatagctagttttaaataaaataacaaaaaagagagacaaatatgtcaaaaatcataaatttagagaaaagaactattgtaaaaatctagttttggtgaattgtaacaggatgcaagtgctatgtaactgagtataagtgcactgtaaatgagtataactacaagttagatatacaagaacacaaatcttaatataaagatcctatgaacgaaaaagtaaaagatagaaatataaaaatctgtcgcaagtgaaatactagcaaaaccgaaaaaaaaaatcaaggagccccaacagaatcctcactaaaaacaaaacgagacaaaggacggagaaacactgtcgggagaaaaactcggaagacagcactgaatgtctgaatttttggacttcttttatctaaccatcagataaaacaggcaactaaaacgaaacagcacaaatttaagagcatggaggactcagtgcacagtacgattgtgatcatcaagggcatgcatatgagcaaatgccatgtttaggttcggcgagcgagccttcgttgtttccatcactgtcctccatggccgtgctcacaaatagcgccaacttaaatcagcaaattaacgaaccactgaaactctgaaaacatacgaagaaaagaagaaaattctacttacaagccagaaattaaactcagactcaaaacatgaaaaaaaaacacaaaattaaacctagcacataagagaggagaggataatgatgaatagatggtaattaagcaggatgggtgatttattactccctgcttaatgaacagagcttagccttcttatatatagcactggtatcagcaggaaacagcaaaagggagagaagggttttaatttcttggcgcctacggatttgcgttaggtgagctaatcgtgttggacttttggtacaaagataagagtttaaaatcagagcatgcagaacacgaactattccatcacctaacctaacagtatgattgctaaagctcaaagtcgatatcatacagtattccctcttgctactaagtgatttctgccaattggttctgaaagatcaaattgccgttgttgtgttaacatcatccatcatgttgagactaattttcttagtattagttgccttttggaatagggtaattttatcatcttaaaaaaaatgccgggagatactacacatagtgtaaattttggtacctcgaagtattttttttggtgtaaaaattagataccttgaagtattttttttttcaaattgctattgttgtgttaacatcatccatcatgtactccctccgtccaaaaaaaaaagacaaaccctgggtttccgtgttcaacgtttgaccgttcgtcttatatgatttttttataattagtattttcattgttgttagatgataaaacatgattaatactttatgcgtgacttgtctttttaatttttttataattttttcaaataagacggacgatcaaatgttgtacacggaaacccagggtttgtcttttttttggaacggagggagtaaaatttaagagcaattttaccatccaacatttggtatcttgagatactctctggtgtaaaatttggtacctcgaggtatcaaaattttgtgtgtaaaatctggtaccttgaggcatcaaaaaattttgtgtgtaaaatttggtacctcaaggtatcaaatgttatatggtaaaattgatcataaaatttcactttggaatatgttcaattcatttccaagaatgcagttggcgtaaagtacaaaggcaggttcttcggaagaaaagcgtaatttgcttgagtca

SEQ ID NO: 26471 - DNA, 13155 bp, Oryza sativa
atttttttctctttaacttgtgcagaaattggcaatgcagctctgcttctgtggccgcgctgagctgcgaggtgctgggtgcagcggcgctccagtccatggaggctagcgagacgcttgcgtccgatgccgccattgccgattgcttggcacgggcgctgcggcgtgggagccagcgagtggcagaggctgcctgtaatgctataatggatctctctgcttcttctgctggcagggagcatcttgcgggctctgctgttctgcagagcatattgtaagcatatttactgattgatctgattgttttttcaaattcaatatgtatttcggctttagtagcttgtgctatactgatatatactactaaatgtcaagaaccgcttgactcttatgttcacaagatcaacttaaccaatgtgcccatgtatagatcaatggcaagtctgcagttattatgataaacttcctctggtagcatgttaatatgttatgatgaagatggcttgatagtttataactagatgggaagcattgccaggccttttaaatatgatgaatatcttcgactggttgaattcacttcctgtagatatctattttctcaggtggaatttatttctggagtcattgatatcagaagcactgagtgctcaaaaagtgcttctaaagcaaataaatccttctacttgatggttgacacattggtattcatggtgaattcctgtcaagttgataccttgcataatctgcaacaggatgtagttagaaaagttctgcctttgttgcataaaatctggaagaatgttgataaactgggatcgtcaactgactgcatcaactcgaagaatcaacttcaaaggaaagaacatgagatatctgaagctatttttaggctttcaatgaatattgcctgtccagcccacctggaacctgatgaagtcagacgaagcatttttggacaatcggtatctgactatgaaaattttctcctaaactactgggagaagtcgacttacttggtcactaggaaacagaagaatctgcatgtggatagtgtattcacttcactgcttaatgaatttgatctgaaaacacctgatactatcatccagtcacttgtaaatgggattgtttcttgccccgctattgcttcagatgaacttgacattagttcatttctccgtgaggttcaaggttccttgggtgccactgtgaagtataggcaagatatcagagttgtaagaataaatgaccaatgtgatcagacctcaataggttatgcgatggaggaacatttctttgatgatgggatgaccttccaggatgcagatgcattcgttgaaaaatgtaaggatgcatttaaaaatggtttctcagttgccttgcgtggtatggagttccgttctgaaaagattgctgctatagcttctgctgtagctgatttattcggtcaaccttctgtgggagctaatatatatttctcccctccaagagctcagggcctggcccggcattatgatgatcactgtgtacttgtttggcaactgcttggatgcaagaaatggatgatttggcctgacacaaagttacttttgcctagactatatgaaccttttgaacctttagatgacttggtggatgattgtggtgggaggatggaaattttgcttgaaggagacataatgtatgttcctagaggctttgttcacgaggctcacactgatgttgatgttggtggatttgaagtgaactcaactgttgattgctcactccatttgacccttgctattgaggttgagccacccttcgagtaagtactcttcatatctatgtaaaattctcagtgttccatgtctagtgtttcagcatctcactattactgttgttgcaggtgggagggatttacgcatattgcccttcattgttggacggagaaacactggagctctccatttgttaagtcccaagaggaggcacgaacttcgttatttgctctcctgttgcatgtggcaatcaggctgctttcgaaaaatgatgcaaccttcaggaaggcatgcatggttgcagcaaagcttccaccatctagttcatgtacgacaactcactcgaaagctctcagaagcaaccaaagatcattttttgatgagataattaagaaaatcgacaggagctgcaacttcaaggaggcattgatgtgcattgggctcgcagtgagagagaaaaacgatgagcccttccaatggatgtgttggctccggcatctgccgcaacacggaggcacaaatgaccaagtcgatttctgcaacattttgggagcccttgaagagcttcttgaggcagtcagctgcaaccttgagcaatccttaactgaatttacagacttcaagttgaaattttgtaggtgcgtagcgtacgaagacgcgtgtgagagctttgaaatgttgcttcagatgtatagaacgactaggaatcagtacacgaggggaatgctagcattgcacaggaagcatgaaatttaacttctggagtttggagaattccctcctgacagataaagttcagtgatcagctaggtgtatcatttctccctgactagaaaatctgtctggaaacatttgccccacctcaatcatccacaattctgattagattttaactcaactatcatggtcttttgtcttgtggtcttacagttctgattagttacaacttgagttcactattgtcatgatatgactaatgataaaaaatgaatcacttgctcatgctgcaaagctccacagaatctctctgctcaagtctcacactctcacatgaccacctgatctactgctacaaaactgcaagttgataagcaaacaaacacaatttgttgccaccgaccagatggaatccaatctatgacctctggaccccaaatcaacccgttggcgctgcacctgcaaagagatgacgtttctaaaccgctaatctcctcccccaattattgcaccatctgagggtcagtcataacctcagtgacagtcttgtattttctgaatttctggctgcatccccccccccccccccccaagattataaataacaaacaaatactaaatgtacaatttgcaggtcaatgaacgctgcacataaacaacaataaatgggtcgctgctgcgatcggaggtagacgtgacaaggagagccgcatcttccatatccaggagaagagaaaagatttgataaatcgaagaagaaaaaattttggggaaaattttatcctggggacgcttggattgtgtgctggttgcctccgatggtcgcaagggccagaaatctcgtccacccaaaccgcggggagccctatcccctcagcaaaagccaagatgctgctgttcccgcccgccactaaaaatatttatgcacctcctcgcattaaaaattccatcgacgtcgcctcctctcctcctcctcctcgtcgctgcattccggtgagtccgtgcaatgcctgcattttgtgttttcgtgctcggtttcgtctcgtttttgctgatgacaatgttgtttgtttgatgcaggttgagtgagttggtgattatctgtagggggtgaaaatggcgcaggcggtggtgccggcgatgcagtgccaggtcggggccgtgcgggcgaggccggcggcggctgcggcggcgacgggggggagggtgtggggagtcaggaggaccgggcgcggcacgtcggggttcagggtgatggccgtgagcacggagaccaccggggtggtgacgcggatggagcagctgctcaacatggacaccacccccttcaccgacaagatcatcgccgagtacatctggtactgcaaatgctgcatctcacagtgacgcttctgttcttggtttgacccacacaacagtagcagtagcagcagtttcagactttcagatttcagataagccaaatccgcactttttactagcaccaatttagtactactgctacagtttgtaggttttgcactgcaccgttcgattagggaattggatggttgagatatgaatcataggattagctgtgagcaaacattagtagagtacaagttttgccttaaaatagataaaagtttctcaagcatggtggtggctggtggtgactcacactagctgcttttcagttcccacacttgaataataatacttcaggagtgcgaatccccgatgcgttttcctggtgaaagcagcaatatattaacgaatctgcaatcctttttgccacattctgcagggttggaggaactggaattgacctcagaagcaaatcaagggtatgcacttggtatcatcattatcacaaatgttcttgttcttggataaagataccagtgctgtctttaggaagagaagttgcgtttttaggggattagcagtgtacacagcgcctcctttcgttatttactttctacctctttggcccttgaaagaaaaatcgaatgcctgtatttcagacaatatcaaaaccagtggaggacccctcggagctaccaaaatggaactacgatggatcaagcacagggcaagctccaggagaagatagtgaagtcatcttatagtaagaaaaaatattgcagtacatgtgattcttcagtaaagcattctagatttctaattctgtctcttctcttgcgctgtcccccctgatttcagcccacaggctatattcaaggacccatttcgaggtggcaacaacatattggtaccatcccttctccttaatgttttatccttttcaaatgtgcttttcatactaacctgcacataaaagattagctgtgcaatggttagtggcgcatgtgaaaaatcgcatgctagctgatacaaaatctgttgtttcaggttatgtgtgatacctacacaccagctggggaacccatccctactaacaaacgtaacagggctgcacaagtattcagtgatccaaaggttgtcagccaagtgccatggtaactaaacatcaagcacttttgtgctataaattacaatagaaaacatggtttttccatctacttttgtttacatgtgaagttgagacattttctatgcactatttttctaggtttggaatagaacaggagtacactttgctccagagagacgtaaactggcctcttggctggcccgttggaggctaccctgggccccaggtattatactgaacaagaatggagctttgttgatcagataataataaagataaggatggtttaagtccatgtgttgtgtatgcttaataaaacactatcatgctggatattacagggtccatactactgcgctgtaggatcggacaaatcgtttggccgtgacatatcagatgctcactacaaggcatgtctttatgctggaattaacattagtggaacaaatggagaggtcatgcctggtcaggtatgtgtgttgttatttgtcaattagttttctgaatcagtggatatgttttaacttctatgaagaacaaatcctagtgtttaacaagtgaaacttcacaatccttattcatgcagtgggagtaccaggttggacctagtgtcggtattgaagctggagaccacatatggatttcaagatatattcttgaggtatttcaaataataataaaatatttccctacataatgaaattttggttcaaataataataataaaatatttccctacataatgaaattttggttttctctcttaattttcaaaccatggtttaaaaatcaagctgcatgcatattattgccaagacgtttacatgtgcacattttgtgatccaccttgacattcttacaaatcgcttgttgaaagccatcatctttgttttgttcaaaacatcagaatgttgcatcctatgaatggctatacttttgcttatatcaatttctgcatcagtaaaagcacttctaattatcgtttgctcactgtaatcagagaataacggagcaggctggtgtagtgcttacccttgaccccaaaccaattcaggtatgtcctagtaaattgtccccaactttaaagccaatcaaacgttaaaggagactgaacatatataatgtactgacagggagactggaatggagctgggtgccacacaaactacaggtttcattatcttcttctgatgttaaagtatcctgcagcataagaacaaagcttagaacacttaacacagctttgctgacatttttcctttgagagaacaactttgttgaccgaactaatgcctattcagagacaaaaataaattccttgggaatttgataggaaagaaaacatatgtgtaagacctaaaataccaatccaaatacggaccgaatatcaagtgttcgtaggtgttaaatctattatatctataaagtaatagaaaaagaagcctccacgtttgctctcacggtctagaaaatcccccgttaatcgaaagaaaataagaaaaaaagaaaaatagaagggtattaggattaggttttgtgttaacggaaaaaaaaacaaagagtaaacggacaaaaaaagttggaaacggaaaaaaaaagttggaaacggacaaaaaaaaatccaatcggacaagaaagagagaaaaaagtgaaaagggacaaaaaaaaagaaattccaatgttaatcaagaaaaagagaaaaaaaataaccattgggtcatagtagatccagattataacagtttagatttaatatagggtgtgtttggattccaattttttttctaaaaacatcacatcaaatgtttggacacatgtatggagcaataaatgtgaacgaaaaaaaaaccaattgcacagtttgcatgcaaattgcgagacgaatcttttgagcctaattacgccatgattttacaatatgatgctacagtaaacatttgctaataacagattaattaggcttaataaattcgtctcgtagtttcctggcagcatctgtaatttgttttattattggactacgtttaattccttcaaatgtgtgttcatatacttcaaaatttttacacctaaacaactaaacacggccataatagttatataactaatataaatctttttttacggaagcttaaagtaactataggaatcgaagtaaaaaaagcttgagatggaaatgaccaaacaaaccacatgcacaagaaaaaaggaaaaatagaagggtattaggattaggttttgtgtaaatggacaaaaaaacaaagattgggtgtggtgtaaacagacaaaaaaaaagttggaaacggacaaaaaagaaaaaatagaaacgggcaagaaagatagaaaaagtgaaaacagacaagaaaaatagaaattccaatgttaatcaagaaaaagagaaaaaaaataaccattgagtcatagtagatccagattataacagtttagatttaatatagggtgtgtttagattccaaaaaattttggcgaaaaacgttacatcaaatgtttggacacatgtatggagcattatatatggacgaaaaaaaccaattgcacagtttgcatgtcaattgcgagacgaatcttttgagcctaattatgccatgatttgataatgtgatgctatagtaaacatttgctaatgacagattaataaggcttaataaattcgtctcgcagtttacaggcggattcagtaatttgttttgttattagtctacgtttagtacttcaaatgtgtgtccgtatacttcaaaatttttacacctaaacaactaaacacggccataatggttatacaactaatataaatcttttttttacggaagcttaaagtaactataggaatcggagtaaaaaaaacttgagatggaaacgatcaaacaaaccacatgcacaaagtttatttctaatttaaccaattggattaagaactaatgcattaacttatttaagtaataagggcatgtttagatccgctgacaagttatttcactctgtcacatcgaacgttttaacacctgtatgaagtatattatgaagtattaaatataggcgaaaaaataactaattgcacagattgcgactaatttgcgagacgaatcttttaagcctaattgctacatgatttgacaatgtggtgctagagtaaacatttgctaatgacggattatttaggcttaataaattcgtctcgcattttacaggcggattctgtaatttgttttgttattagactacgtttaatacttcaaatgtatgtcagtatatccgatgtgacatggcaaaaattttcacccctggatctaaacacagcctaagaaaattggactccgcgtttgctctcatggcctagaaattctcatattaatcgaagtccatatagaaaaacaatttacatagataattaaaaaataatgaatattggaagagaaggctagagttcatactggtgtacaatttataactaattgaaatacggaatcagagaaaaataataatagagtccatatagaaatacaattttaaatagcttaaattcgaaattaaaaaaaggaatattgaaagaaaaaactccatatcagtatacaatttagaactaactaaactttggaattaaaaaaagaaaatataagtagaagtttgagtctatattgaaatacaatttataaccttaatttataaaaataaaaaataaaaaatattgaaataagagtttacaatctatataaaaatacaatttagaaaaaaaaatgaaaatttggaatagaaataaggaatattggtagctagccgcgcagtttgcgcgggccaccatactagttgttattgaatacaaatccagaataagcctgtattcacttcgattgactgaatgaatgttctttgtttctcaaacaattgaaatatactgattgtcttgcaaatgtagcaccaagagtatgcgtgaagatggaggatttgaggtgatcaagaaggcaatcctaaacctatcacttcgccatgacttgcatataagtgcatatggtgaaggaaatgaaaggaggttgacaggtttacacgagacagctagcattgacaatttctcatgggtatggtttcagcggcctttttatatctttatgttttaatttctatttttaagctatactaacgaaacatttcattaaagggtgtggcaaaccgtggatgctctattcgggtggggcgagacaccgaggcgaagggaaaaggtatatgttcttccatgtcccctgaaattgttgtgtttgggattcagaaaacactaacatccactggtatattaagcaaccaattgagccctccaaaaccagagtaacatagtttttatagcaaataagcacatcatgtagtaactgcccctattgctcatttgtacttccgtaattcaatacttcgttgttacgctccaaatatttcaggtttgagttgaaaatacaaacatttttttttctgaaactatgaaagaacacaacatcagcaaatgcatgtcttgtaatgttgttttcacaattcacaaatgtgcaacttagtatttgcatttttcaactcaatcttattaacttgcccttacaatgctaaatctccttgctgataggctacttggaagaccgtcgcccggcatcaaacatggacccgtacgtcgtgacagcgctattggctgaaaccacaattctttgggagccaaccctcgaagcggaggttcttgctgctaagaagttggccctgaaggtatgaagaacttggacgatgaatcggggcaaataaatcccagcaaaatttgtttgctgcccaccagtcttgatcttgtatttcttctgtctggggattggtctgtacaaatctgcagtttctagaaaaccacgccaccttccattcgccagttaacattttggttgaacaccacacttgatctgggtctgtattttgagtccatttgtgagtgacagaacggatgatgaaacacatcagggacacttttaagtttcttcagtcctgcgtccttccctcgaaataaaaatgtttccttgttttttatcccgggctaaacctgtagttgcgatgaaaacgtcactattggagacttggagaatataatttgacagttgacactcgaccatcatggactggtgttagttctcagctgtggtcagggttcacctttctgatcgagtgcctgacctgaatccgtagcggaatgacatttttcaccaaatttcgatcaaattttggttgaattttactgtttcaaatttgaattctagaaaaccattcgaaatttcactcataatcttctttcatctaggggtgcaagtgggtcacccacgaacccatttataggtcaaaataagtgagttcgcgggttagtttagcctataaataggttttcgcgggtagccacttgcacccttagtttcatccctcgtcaaaacatctaaattttgcggtttttggttggttttcgtcgaaaacttaaaccctggctgtgtcatctctgcagctagctaacagcaatgcatgaacagagcaatggcaacacatacagaagaagcagcagcagaacatcgatcgatctcttgcgaagaagggtacatgtaatttcatgacgaaattaacagtccaagagagtacttagtactagtagtactcctactaactaagctagacaagaagattatacacggacaaacagagaagctgacagcctatggtttctttgggtgcttgcgtttgggtggagacggagagtgcatcgccaccccgctgtaatcagcgctgtcgatcagcccttctcttgcgccctcatcatcatccacccaacctgccttcgtctctgcagtctccttcgtcgtcgcctccatagccactacctggacatggacacaccatgagcttgacaattatttcttgtttttcatctgcatttctagctgaagatggtagtgcacaatgtgctattcactgacattaaaaaaagattatgcagcagaggcaggcacaagaaaacacataaaaattcagttttgcattttatgaacatatgaataatgaactcacctcatgttgctccttgtgcttgccttcatgccggtattggtgtcctgacaagccttctcctatcagttctctgcctctgcgaccaagaactcgagccacttgatcttgctgcctgctcagtgaagaagcagcagcagaagagacatctgcaagatttgctaggacgagtactcctgagacaaacactaagcagagtagcttctgatcaataaccatggttgtgctgatgactggtgacaactaactactggaaatggagatggagagaagatgaactgatgaagcgaatgctccctctacatgtctcctcgaggtttatatataaattggcgaaggttgcagcgacagaaatgggccatggtgtctgcactctaacatatttgcaaaccaggccccatcctgaataatactacttgcaaggaggttagttcacaaaaggctaagctagccattagcatgattgagatccatactccattatgcaaaacatgccgagacatagggcactattgccataatcatgtgtagtttgtggaccataaacgtcacatgcatgtgagtgagcagatgtttggagtgtacagtagttgtgcttattaggtaggggcagaggggacagcaacatttggctacttgctgtaggcttctttgttactaattttttgctcattagatccctgctaaatctgacaaaggtgaaggtcatgaggacccaacacccaagaaaacacccaaaattctgactattgaccaatgctgtctgctctaacagcatgatctgatgacccatgctagctagctgctcaaacttttcttctcatcacggcatcacgcatggtgatggtgtctgaatgttggcttatctcctccatcctagctgcatggacagcatggtgtcgtcagatagtaggagcttgatttgatgttgtctgtcagtgagtgttgcagtgctaattttgttagtaatcgtagacttctagcattgatagagatgagcatatacaggctgatccttgatgatggcagtttattacatatgatccatgaacatgtaactagtgctatatgagacaacaagttagtatatatgcatcacaagaaatggtcctgagaggctgaaatctgagctaacatgaagcagggcaggtgagtgatggcccatggctacaaggatttggtgcgtgcctaaatgcagagagaaggcaattccaaaatggtgtatctttcgatggacacatatgtaggctggaggaatgcaaggttggcagcatgtattggcatgtcattagctttgtattataaagctgatgcatctcattaatgcctggattatactgattagagtatggcatgaggtatgcagtatggggggctcgagacagggaggtcaagctcaggtagggcttcttttatcagaccccagccttgtctctttgctggtcacggagctggccatctctctggattatgtgtatttatgtatggacatgtcaactaaaatagtcgtcagcagccaacagcgttactgttgattgtccgtttggtcatcactaatccatttcctggctgcttcccttgtgctttagaatagagtattaagcgagaaactaaactaaactaagaaatcgaacgaattgtttggtgttgattgacgccagtgttgattgattcgcaacggcctcgcgcatgtaagtaggacgaggggggtttactcgaacggtagtcgcatagtacatggagagttgttcggtgtgagacgagcacgtacgcacgctgtcatgggtggatgggagcacgcacggttgccgttgcagttgcaggcgtgcagcgggaattttttttatttttaattttttttattaaaagttttacaaaaataattttctattttgaaaattgacggaagtagtcgcctaccgccctttgggaaggcgatttttaaaaatcgccctcccagagggcggcgaaaatgacgtggcagacggccgttcgctctcgggcgacggccgtcaacgaaatttgcaggcggcccccttgccgccctccgcgagggcgattttgtactgtgcggggggccgcctgcaaatgggcggcgagggggggcatggaattttgcag

SEQ ID NO: 26472 - DNA, 5281 bp, Oryza sativa
  unsure (1)..(5281): unsure at all n locations
ggcatggaattttgcaggcggcccccttgccgccctcggcgagggcgattttgtactgtgcggggggccgcctgcaaatggccggcgagggggcatggaattttgcagncggcccccttgccgccctccgcaagggcgattttgtactgtgctctatattttttataaatatcaatagttatcaaatctttttatattgaaaactatacaagattaaaatctccaagactggtaaaatacaattttattattttttagggcatatttggattgttaccgtacaaatattttgttaccgtacaaatattttattaatttttagggcatatttggattgttagtgccaaatttttcttcacgaccaaatatttggtaaggtaaaattgcatttgatcatatttggtttgctgccaaaatgtaaaattgtagtgaagaatgttctacataatctcaaatctagattacgtattaccaatgaataggcttccattttcgtgtgttgtgtgctagtgggaaagaagatatgaagaggttgccttcagattgtcaattatatagcgtcgttttcactgcaatatatgtgaactcaatgagatacattattcattagatgtgacaagacgatcacgcgtgggcgtgattcactttatgtaaacaggcagcgccgaaagttgatagtgataactcgagctgccgcttttcatgtgtgctgttgtggactgtgcgcgctactggatctgacactaccgtgcagcgccgaaagtgtgttgtcgtgagcataagttgttctagcaccatatgaatgaaaagaactatgtagacgagacaaacacaagtagtactgcagtagtaatagcaaaagtagtactgctttacaagtttgtaagccaaaagaaacggtcacataaggactgaagaggtagaacactactgacgaggcctcttacccctgtccctcctaccctgcgccctaatgtgcccgtgggagtacgtgagtcggtccgggggtacggcacggccaacccgtcctgcctgtacaggtgtgacctctggctgctcctgagtgtgtgcctctggagctcctccaagctgagaggagcctagtacgtcgtggtggtctgcaccgtgcaagtcgtcgtcgtagaactggctagtaggaccagtcctaccggcgtgagacgaagaggccccagtaccgaagatcccggctgaaaatcctgctggacaaggaccatcagtttcgtacaggtatttaacagtattaataaaaagtaaagtaccgtgtgggcgagggatcgacgctccgtgagaggaagaggtggcgaacgcgcccgaagaggtggcgaacgcccctgcggagctcgtggaagcgccggtcgtgcctgcgaacgtgctcgaaggcagacgaggtcctgcgatgaggaaacgtgcagttaaaacatggtgacataatcgtgcaaaagctgaaacaaaaatgaactaatatctgggctgaactgtaccgtgcgaaaccggtgctgtaggtcgcactgatccgaagctagggcgctcgaaggcaaacgaggtcctgcgaggatggatcatcaagttacgacggggtgatgttttcgtacaaaaacagaaacaaaacttaagaaacctctgggctgagcagtaccgtgcgaaataggtgccgtaggtcgaggtcctgctccgacggtaggcgcgcgaggccgtggttgtaccggaccaactggaggtacgacgtccacggcgctgcgacaggagaagacgcgcatgaccgcgcgcatcttctcctgcatccggtcgaaggtcaccctctgctcaacgtcagtcaagtgcaaacctctgttcaacctcacttggactgcggtgatatcggcactgatatcccgtgcggcatcagcctatgcaagatggaaataacaaattcagtagttgtcctatattatgcaagataaatgaaataattgtaagaagtaatacaaattggatgtaccgccacgaagtagtctcggtcacggtgcgtgggatacgcgtccgtgacagcggcaacgtgcggctctggggcgtctggagtgaaggtcacacgcgcacgagtgcgaggaaggtaccaacgaaggtagtcacggtagttctcctccgtgtgtgggaagagctcgttgatcacctcctctgtagctaacacccagtcgtcaacgtactgctgtacacgtggagcccaaagtgcgcctgctagctgtccccgtcgagtcaacctgtgaagagaggtaaattatatggctcgatgaagtaattatcataaaaatttagaaatgaacaatccgaactcacgagtggtcggcagggaggacggtcggctgcacgttgcccggaaacacctgcctaagtccgaactgtctcatcacacgctgcgggcagtgaggctcaacgaaaatgtcgaacaccatcggcaggatggtgagccagtaagcctggtcgcatgtgcacaaggacgaaagtcctagcggtgctctcgcagcgacggcctcttctgtgtacggctcccagatgacgtcgctcggctggagacggtcaaactcgaacacgaagtccgggtaaccacgtctcacctggacgtgagcgtaacgacgctgcaataaacatgatcggaattagacatgttatgtgaagaaaaaaaaaagacgactgataaacttataacgcagcgaagttgcactaaccccacgtcgacaccagtaagtccccatcgtgggaccgtcctctggccactgcgcgctgcgaccaaccccatagggtgcgctgtccaccactggtcgacctatggcaaacctctcggctgcccaaagctgaagcaacatagggcagccagcgatgatcgctcccgcgtcagtcttcgtgcacgcctcacagagggcacggtacgtggctgctagcacggcagaaccccagctccactgcggcacgtcctgtggctgagcatccgcgatggaccgtgcgtagtggaccagccggaagtccacagcgtgcccgtgggtgctagtgaacatcacccacccgaacaaccacaacaggtacgcctcaagggagcgtcggaccgagtaatcatcagcgtcagggtgtagaaggtccgcctacaattaagaatgaaatgttagtacaaaacactcattcggtcgcaaataagcacgtatgataataacaacttatttacttacagtgaactggagcaaccaagccttgctaggcccgactgtagagtacggaggaagggtggtggtcggtcctaggtgtggaaggcgcatcacctgctcgaagcgcgcagtgatatcctccttccacccaaaaacaccgtccacgggaccaactgctgctcccgccagcggtagcccgagcaggtacgacacgtcctgcagtgtcggagccatctccccacagggaaggtggaacgtgtgcgtctcaggtctccagcggtctacaagagcggcaaggagtgaccgatctgcatcccaccgcttcgctgggtcacggtcgtccgccgccgcctcaacaagcctacaaagtggtagaaggcctgccgcacgcaacctgtatagagcaaacttcaaacataagtacaacacaaagcaaagttgagttgaaatgtgaacatacgcgtaccaaggaacgtgacgggggtcgacacgcaaccactcgcgcgacgtgcgtggacggaaggtgccgagctgtgcaccctcgactgctgacaggaacgagcggtggttcctgtcaatcccacggttcaacagcgccggtgtgtcgtacgccatacctgcatcaaataggttgatcagaaacatataaataattagttcaacataagtaataaatgttgaactaagcgaattactaacacatattaaacaagagtacaaacaaacaaaagtgtttactccgaacactcatcacgataacattatgatacaacaccgaataattcgcaatactactagtacaacaatagtcggaggtactcattacaacaacattgaattgaaattacacgatagaagtatttagtccgaacactcattacatcacaacagcattttatttcctaaatcgaaagcattgttacaccatggaatcgcctgctgcgcgacgacgccttggccttgcgcgtctgcttgttgttccttcaccaggtggtcgcctaccatcacttgcctgtccagatggactagcatctgcgccgcttggaacttctgcattcttcgggcatttcttgtaagtatggccgcgcagatcacacttgctgcagcgtaaagtcctcccacctgcttctgactcatccatatcatttctgatgcgtctagtttggcgtcgaccctttttcacccttaacttagatggatctggaatataaaaaacttgggcactcagcgttgtgtaagatcctgagatcccgaacccatatatctcctcactccatgtatgaaagattgcttctttcctgaaataatttgagacgtacacattgggagatatgccacaatcaccggcagcagcaagaacgtgtgagcaaggaaggtgatgaagcttcggcttcatacaactgcaggtacatccaccatccgccttcaagacacattcctgcacggcttgcttgcgatagataccacgcctgctcctatcaacacacattatttcataccgatgcacttgtgtgccttgagcaacaactcgatgtctccgtgcctttttgattttatcttccatgtactttgtcactacgttgccaaacactatgttgtcatcggccatggacggaccaattttcttgtatcgatccctaaagtacgcttgcgtgccgtgaaggatgaattcaacaatagcaaccaatggaagtacccgaactcctcgcattacccagttgtacacctctgccaaattggttgtcattatgtcataccgagatccatcggtgtcgaacaatagagaccacttctccttaggctcattctcaatccactgagtgaaatttttgatggacgaccctgacctccttctcattgttggtgggtcatcatgtaatgcaccaagaggtatgggaggctcgtcaccttcaactagtggactgcgagattgctcatctgtttgcttcgttgtcaactcatccaacttgtcccacaactcattaaatttcttctcttggttctgtgcacagagcctcttaaagagctccataagatgcttgttcttgaattgcttgtagaaatttgcacccatgtgacgcatgcac

SEQ ID NO: 26473 - DNA, 16586 bp, Oryza sativa
  unsure (1)..(16586): unsure at all n locations
catacctcatctcaatgatcttttgtttggctctccaggcctttgcatagcttatggtgtacttgaatttgttctcgatgtgcctaataattgattttggttcaaagccaatgttaccaacaacactggtgtacatctcacttgccacaaaagctgaagtgatgtttcggtgatacttctccaccccttgtaagtagcacttgtgctcggtcacaatgctaactttccaataatcattccatttacccttatatgcatggacacgccacggacaatcttccttcatgcacctcacttcatacacataatttgttgacttgaccaccctaaactctctctgcaaggaaactgcccaatgcttcaccgcctccttcatctcatccttatgagcatatcttgcaccctcaattacctcgttctccttatactcccagggtacatgatcaccctctgatataacaagtccagagaagtcctcatttgcccaatcagtggccattacatcaccttcctcatcggatgatgcgtcgtcgtccacttcctcattatccgaattttccctctccatttcatcaacaattataccgactctctccccctcatccgccatgcccatagcctgctcctcccttggttgattttcctcattttgcatcgatggtccaacaacatcccctgcattgataggaccctctacatcttcggtttgcattgaaacatttatatctttctcttgtaccgacacaaatataacgaggggtcatgaccgttcaaaagccatttccacataccgtctccaagcatcagtgctgtccatcggcattagttcccaaaaataaccttctgttgcacgactcactacaactgacactgacattgtgtagacttcttggtctattctaaatcctctcaacaaccaactataaattgactgaaatgttctctccgcaggcctatcgatgcccttagatgtcattacaaaatctaacagatcaacaccatctggaccaaatctaatatttccttcaccgtgaactatctgaaatgtgaccttacttgacattgtgcctgatgaaaacaataactgcgttaacctcgcatttctgtactacgccctaagttacattctctacaatattgttctctaaatttctaaaattacgttacattctccagatcaaactaaactacatcttacaattaacactactgtctatgtctcaattcatactattatattctatgctctggatctacacatatgtgctgtgtgctacagatgtgctaaaatatatggaactaaaactaaaacgcaacatatatactcaaacataacatattagtacaaatgcacaaaagatgtatgggagcatacctgtgatgaattgagcgaaccagcagggcttcgccgctccccttctgctgccctcccctctctctcttttgttttttttggatttttagtgaatataatgaaatttcacagaggagggactgggctttatagggggagaggcaaaaatcgccctcctccagggcggcaagggggccgcctgcaaaattccatgccccctcgccgcccatttgcaggcagccccccccacagtacaaaatcgccctaacggagggcggcaagggggccgcctgcaaaattccatgcccccctcgccgcccatttgcaggcggcccccccacagtacaaaatcgccctagctgagggcggcaagggggccgcctgcaaaattccatgccccccctcgccgccaatttgcagccggccccccgcacagtataaaatcgccctagcggagggcggcaagggggccgcctgcaaatttcgttgacggccgtcgcccgagagcgaacggccgtctgccacgtcattttcgccgccctctgagagggcgatttttaaaaatcgccctcccagagggcggtaggcgactccttccgtcaattntcaaaatgaaaattatttttgtacacttttaataagaanaattataaataaaanaattcccgtgcagcggcatgggatatttgattagtgggaatccttgggccgattccacgtacgtttccactcccagccttgcccatatatggtgggctttggggctttgcaccgagccgtttggtggtggatcatcggcggggcacagcgcgcgggtgggtggcgaatttcgcgtaccgcgccaaagcgtttgacgtctcgtttctgcacaacccacacgcgagtccaggacggacggcccagcggctcgcgcccaggacgaacgcacgcggtccaccagcgacgtgcttcctgccgtatgggcttcatgcgctgcacccggcccctctgtttctcgcatgcacagcacagtgcagcgtcgtcgttgtaaatgcaaagtcctgttcggcacggctgctcaagcttcatttttcttatagttgtaaccttttcatctaaaataaaagtaaaactggttagagagctctcacgaaataaatgagagaggtggagctggattcatactactctatagatctacttcaaccctaacttatagatctactccaaccccaaacttctaaaattaaatttaagggatagagctttaccaaatatgtccgtactaaaggagaacccagctcgtagggggtcacaggtgaaaggactggattccagccaagcgtacacataactgtatgtattctaggggattgtccaagcttttataaactggattttcttcgtttatgaatgaacagatgatctctgatggcccgggaaaagaaaatgcaaggctaacgagaaaagatatccgatggactgaacaaatgcaaggcctggccggcttcgtctctgtggtcaacggacaaacagtgcgtgaaaaagcagctagtgtccagagcgcagctgagcggctgacacgaaacagttatccgaatgcgggcctacacagtcacagatcgcgtcaattcaaggcttccagttccagcccatgaagggtgtacacacatctcgtaaaagggaaaaatatagtaaatgaagagttgaaatggctgcagtcctacactcctactagcatgaaagttgaattttgttcctcgagataatattctcttattttatgcacggtgtttaaaaatttataaaaaaataaaaaaaaatactatgatagatcaatactccctccattctataatataagacacaactatttttttttatgttccataatataatacatacatgcatacatacaattaattaggacatattcttcattaaattattgttttttttaaatccttcaccctcaagatctcaaatttattggatacatgcattatatttattaggttgattcaaactaggagatgataataattgtttcttgatctttgggttaagggtggttgtgccttatattttggaacggatggagtatatgatatatctttgtatgcaaatatgcaagatgaaattcgatttatacgatttgaaacaaaaacgatcatgaattacagtttcattcatagttaaatttattatttttgtttttttatgagtcaaatttaaatatgcaggtttgataaatgatatactccctccatctatttttgatagtcatatttctaaatctgaaaaatttatttttgataggcatatttcaatccaacagcctattctcttaatgactttcttggatttaacgcatgactctctattcttccacacatgattggttacatgggcattgagaaatgtaaatattaatgaatcgtttgtttacgaggaatgactagtaacatgtttaaatggatgataagtaaaattacttattattggtatgtgttgtcgattacatattgatcgatcttactaaattattttaaattttttaatgatttttgagtgacatgtaaaataagagaatattctcttaaaggatgaatggagtttcccctactagtatgtgtcacccccaaacactttcagttagcaagctgtcattcactgatactccactatatcagaaaattttggtggaaaaccacttggccctgccgctaccgccgctgcttctaccgttacgtgaatgccgggctacacgagtcggtgttttttggccccatattatctgatacccagcacgcctgcgccgacaggcgatcggcagctgcgcgtcgcgcgcatggtcggtgggacggtgagcgccagccaagtgcccaagaagcctgcagggtccgcagcttctgcacttgtcttcatctcactcacccacagtacgatgatgctgatgcacagcacaacgacttgctaccaatgcttaaagctttgaaatgcctctgcgtgacatgctatatgcgcctttatttttttctttttcacagatggatctcatctatccggttagtggcgctgcatcatgcaatgcatgcgaccgtgtgctgtgttgtttgcttccatccgttcccttagccaacctctgcacgatacgtggtggacgacgactccactacccctgcattgcagcagcagtgtactagtgtgtgtctccacgaactcactggatcgacggaacagagagagtatccatgcattgtactactaggattatttagctaggtccactctaatcgacaactgctcgatcggttggcttgtgctgctgtgcaacgcatggctgccttgcccatttgttgtaagcgattactctgtctcaagataagttaatttttagctctttctattgatctcaaactaaaattggtttttaagtaatcattgcatcaaaaatttatgaaagtagaagataaatatattgaaagtagataaagtggaaataattgtattgggatttgataaagtggaagtatctaactttttaaattttacacacatgtgtggatggatgaaaaataaaattattttgaaacggggggagtagtaaaattcttcccttatctatactattataaaaattgaagatgtttttgctggtactttggtaggtcattcgtgtttgagtcggtttttaagtttattcgtttttggaaatacggatctgtgtttgagtcgatttttatgttcgttcgcttttaaaaatacaatagatgttttataagaaatctctttaaaaaaaactcgcatgctaactcgggacacttttaaaaatataaaaggagtcgtataaaaattattttaaaaaaacttgcatgctaaattgagataagagttggactcctaattataacttatgattttcaaaaaaaatatccaagcaaattcccacaaggattttcaccctaactaaaccgtataacagtgataataaaactaaaatagccttcatccgtcgtaatgcatggcattttttctagtcacctaaaaacgaaattgaaacggttcggtttttgcagaaatagaggggagaaaacgttgtaccaaatgaattaagcctatgtttcacagccaggcagttgggtcgtctctgcaacagtgacattaggcccctcgattctaggcccatgtagattcaattaagcaggccggcctataaaaaacccgagctttagatattcattttctaactgatgatcacatttactcacagattcacagttcaccattaaaaagatgggattgatgattacagttctgtcttctgccatcatatatagagataaaggcgtggtttctttttatcgctctaaggtgtactctttacgtactttccgtcccttaattaatttgcttatatattcagcatttagaagatcataacaaggacaagacgacaaccaaaaagaagacacgcaaaatgtgcaaattaaagatgatcataataaatgtacgagatatgatataaagatgcatttaaccaaaagagatttactggccccaaatcaatcgaaatgatcagcacgtactaggtaccactgtggtacggtataatgtggcagctgacacacaaaacggcggcagaattgtcatactacttggtgatcatatctaataatcctagctttgtctatgtatgggtcctcaaggttcttgaaagggataacacattgtggtcatagtcatctttgattagcaggtacctaatatcataccttagcacatgcacgagtacctagcatataagggtaatatacaaagtataatacatagactctccacatattcataagaatataaatgaaagctaaaacaatcgagtggcatgactaactagctcaacccgtttgatttagggtttatttgatacagtttcagcttcagctctatttatctatcttagagttgaagcccaaccaaataagagtggagctggttagagtactctcacaaaatgaattagagatgtggttgagtttagacagtttcacaacttcacttcaaatttaacttatgaaattaaatttaggtgttagtcctaccaaataggcttagatcgtcgaacgtgttattgctacatattatagaggtaaatcaaatattttgaaaatcatcctttcaaaaaaaatattgaaactcaaatttgacaaataaattaaaataaatattatatataaagaatacaatagaagaaagttttttagaaaatgtatttttcaaaatttagagtaaataatatatttaaaaaatctaacgaataaccccaaaagatcacaagacaccatggaatcccgtagatcttctggattagctgaacactgcatgcatgttgttgctaacgctatcttaacagtgcagcactgcagcacacagtaagtggtttggttggtcaaaaacgtactagagccacatttacaaagcaaaatgccacgagtactaccgcttgctccaccttgatgttggattagaccacagggctgacctagctaaaatcaattccactgacatggacaactaggcactagctaaagaaaaccctacatattcatacacacgtacagtacatgtatagtagtaccactgtacatatgtgtaccaggtaacaggaaatccttgtacatatacagcaaacagtaggcattgcatattgcatcttttgccagtaaaatagcctgcaaataatgtactagctagtaccaactgaatgaactgataagttcaacccaacgctacatacttactccctccgtcaaaaaaaaaaactaaacataagaggagatgtgatattttctagtataataaatctgaataaagggctatgattcattatcatagaagatgtcacatccttacctatctaggttgtgttttttttacggagggagtatgtccggtgtttttccaataaaaaaatatatatgtccaacttagagcagatgaaaaaaccatcaataagtaaaaattcgtgaaaatcggatctaaaaattctctaatatgaaaaggttctagagatatgtatagacataagatacattcccaccaaacctaaaatccaaacttaactttatttgagagagagagagagagagagagagagataaatttcgatgaatactgtccttttactatccatcttgtatggcacagctgttctcatcttgtatggcacgttctggatcgatcgatgggagaatgagacagggaccgatggatcatggtcgtctcatggatggttgctgttggtttcgttcacctacaaaagcctgcagaaacgacccagaggaggaggaaacggggaaggtttctctgttttttttctctagcaaaacaagctgcttgctagctactcctctctgcttgctgtcgcactcacaccgtgcaatctttcatcagctcatcagctgcacagcccatctctcgctgacccgtttttgtcccctgttttaatatacacacatctcccttttttttagcttgtgcttgctatattgtccaggtgtgatagtacttgtgtctactacatgtaggagcatatgcatgcaagaatttgtgtgtgtgtttctctctatctctgctggattggatacaagaagtaacaggcttgtaccagaagcaaaataaccggccgggatggccataaacccttgtctgtggcattacctctctctctatttatgaaccatgatgcttgtatatttattggcatctaaaagtggtgagaagtgcccatggggcatgtggcattgtggcaaccatcggcagggccttttgaaagcttgttttgaccatgcaccggcgatatagttttagccacaggagtcattacgacccagcctttactactactactacatcgatcgatacgaaaagagaaaattccctatatacccttgaaaatttactcaatcccttcaatacccctgaatttgacattatcccttatatacccctgagttttcattttgatctcctctatacccatctccgttagttgaccattagttgaccgttaaatattttaaaatgactatattacccatcctatacatatgtgtggtacctacccaataaattttcatatgaaaaataaacttatacaaaatacaagcaatataatcatttaatgcccaacttaaaaaataaaacttattattttttattttttaaaaattatgattaaatccatacattagtttcaccagaaaattaagagcaaaaactaaatgttatttaggtttaaatttttgggaagatatacgaaattcatcaaatttgatctgaaatttatttaaaaattttaaatttgttttctaatttgtgataaactaattatatcccctttgttttttcacaacgaatcttttttcactaaatatttgttgaaaagtaattttcaaatcttatgcagaacttttttttacaataaatctttttttattttaatgaaataatgttttattttcaaaaattcatcacaaatatttagtaatttattccttattggttttcacaaatcaaataatttacacataaaacatttctagcttttaacaatataacaaggacaataaagtaatttctacaataactaacggtcaaactaatggtcaactaacggaatgggtatgtaagggatccaaataaaaactcaggggtatataagagatcaaacaaatttcaggggcgtagaagggattgggtgaaattacatgggcatatagggaattggcccataagaaaatgaacagataagcacaagtattttagttaccattgttcatagacatattcaatggaatagttgtctgatattaagtcccctttgaatatcagaaataaaaaaaacaaaacaaataggaaaaacacatggttataataggattgcaaaacacggaaaaaacacaggaataaccgcttgattggaccatagaaaaaacaaaggaatcgggagatagactgaaggaaattttccaagagctttgagctcttgctaagtttcctccaaaatctctataggattatccattccataggaatttcaaaggactatatatgattcaatcctttgattcaaaggcatttatagaaatttttcctataggattgaaatcctccaaaattcttatgtttttcctccaaatcaaaggagcacttaggaggagaaaacttgctgttagatcctatccttttctgattctgaatttttgtttccgcagtctccctagctaatcgatatgtttcatgtaaaaatatatatatatacaaattttcatctattttttttgtaaaacaacttttcaacttcttattcctcccgtatcaaaatatagcaatatagaattagattagatatatccctcgtacaccctgctctgaatgatagtgttgatatacggcgtaaatccggatgattgatgctagggtatgtctattttaggatgaaggaagtaataattaattcatttgtttatacacttaaatagctaatagaaaatcatatgatccatcaacctatcaatttcagctatccccttaaagatgaacaccttttttaccattgtgtgagatactgaatccagctctggatgagaaatagagatgtggagcccctgttcaccaaactttccatttcctccccacctttttgctctgaagaaagtggcctttgtgtagttgtgtgtatgggtgtttccttctcttctttctctttaccaatccctccctctctctctctctctctctatacacagcagctgagacagtggcagggaggagcagagaattgaagatccttaaatgcggtttggtggcatccccccactggcccatcctccatcctttgctcccaatatcacatttgcgttttgcattttttgcactgcatttcattgcattgccacaccagtacaccacccccacctacataaaaacccaatggcaatcttgcaagaactaacctttgccaccactgatccctgctgctactcctcccatcttttacccactttgactccactccacctagctacctagctagctcgcaccttcttcttcgtgttcgttaagcttgccgggcttaccggcaaagaaggtcgtcggcgacgcgatgatgaggaggcggtggtctcgcgcggccgtcgtcgcctgcttactgctgctcgccgccgcgtgcgcggagtcggcgcgcccactgccggccccggccaaggcggcggcggcggttgtcgtcgtcaggccgaggagcgcgttcgacgtggtggtggccgggctcgtcggcatcgggctcgggcaccggtggcggcccggcggcggcgacctggtcgacgacgagaagcggcgggtgccgacggggcccaacccgctgcacaaccgatgagtactacgtggtacgtgtacgtacgtatagctagctagctagcctgccgcggcttggagagacgcgtccatgttatatatatttccgccattagcgtgggcgcgaggagcaagcaaagctccatcgcagagtcgtcatggcggcggcgacgacgacgaggaggagaagaggaggagaagaatgggaaggagaagagaggagttcgtccagtattgtttcccttctgcttccctttcttctttgtccctcttctgatccacttaatttggttttttttatttttttttcttgattttattttgatttttttcctctcttgtattgattggtttgtgaagtggacagcaaggccattctgttgatcgaaagagagatagagatatgagtatagtgtttcttgtttccatatccatctcttaatctatagttttcttgatgattgtgttgttatttggtagtatatattggtacatgcatgctcttgtgtacaatcacatagttgacttccttgcattaattttgggtacaaaatgattaattagctaggctaaattactcaatgaaaacaatcagactactgcatctttgcaggggagtcgtagtgggaaaaagttcacaaaagaaacatcttggattgaagtatacgatagcttttaaaagagaagttcgtcgagaacgcaatggattaaaagggaagtcttgtgggagaagagatgactgtgtgaaaaaaaaaatcaaatcttttttccagaagttaggaaatgatgaacatcaatcgatcaccccaatgtgatgaattcccttttgaatttagcatgaatttcttgtgcctcttttctttattgacgaaagttttgaaccccatttaatttctattgagtctttcatacactcccttttcccaatttttgcattatcatttcctccaattaatttaaggcaacgtcaacgtggacaactaaacaggaaattaaaacaggaaaagcaatgagtgcatgcatttttctctcgaattccaaatatccagtgcatttttttatacgtagatatataagttcagagatacagtttactactaaatcctaagcccttatggatacaaatatcaggaaaaaaacaagaatattgtcaagaagtgaagaaaaacaaaaggaaaatccaatgcatgcctgtccaaatttatttcatctagttggaaattctgcaaggtttcataaatgttggatgtgattggtgggcagataatccagatgtgcgactactatttcagcccagtaattgctccctatcgcccacacaaatctctatcacacatcgatctcttgtcagcactgaagcccagcgtttgttgatatctcaacgccaagactgaatcttcttcctccagggattagttgagactgttcggggaattatgaatttatgatccgtcgtttctgtcacatttgagtggcttaatctggtgaacgatcgatgaagtggaggtgtttgatcgatgtgacgccgttgcaattattttgtcatccttggtgctcgccagaggctctccaagggcattctcaacccaataattagatggtgtccatagcattatataagctgtcacctagaatgaaaaataatgtggcaattgaataaacgagtaaagagaaggaaaccatatcttgtatgagacatagtttctacacaatatccaagacatcatgtgagataagtagcattaaatttaagtatgaaatagtggtgtttgcattagaagagtagtttcgtactagtttcgtgatgatgtggagtttataaaaaccatgtatagtgtcttgggttaggaatagcctaattcccacggagtatcatcaagaggctgtcctcctacagcactcggacaacgagttgcattgatgtcacagctgcttgctgtgcaggttgataggagtgtgttcttggttaattaggtttgcttaaccgtgtaatgggtctaatcctactttaaattgttatattttataacggagggagcatatatttaaatatatttttttctatggtgttgttcttttcagcgtatttattggattattaaaatagattattcgctcaacacttaattttttttataaaaaaaatcttatgttctattaattatatcacttattttgagctatttggtacatttatttctcaaaatatttaaccgatccctgtaattaagtagataacccatggcaataatccattgaacaatctaagtccatgtttgattcagcttagaattatgataatctaaattattaggagtaagctgaaataaacaaatagcttattatgatatattattataatctataagctagattactataatctgataatccattataaatgtgcattttctagattattgggtgactaacagctaataatccagagaatcaaacagctaacaacttattctatgctggcttattataatccaacttatagcaatctgattcaataatctagattataataatcttaagctgaaacaaatagggcctaaatcaaatggtagagacagagatggaatgctattttgttgttttaatgaaatatctgatatcttttactagtaaaaaacagaagaataagttgcaacagaatgacagatgcatgacaattggcaaggacttggcaagaaatacaaggacgagtacgtgctagtacaacaccaattagctggaggaggtagctagctaaccaaggccttgtttagttataaatttttttttaaaacttttaactttttcatcacatcaaaacttttctacacacaaacttccagactttttcatcacatcattttaatctcaaccaaacttacaatttttgcgtgaactaagcacaccccaagtgcagtgcagtgtcaaacaaacagctcaggaatctcatcgacatggacccttctcctacatgggtacgaacagtatccatccatccatccttgaagccagcaagctgatgcagcagtgctgctcgcatcaattgcacatgtctgcatatatatctgtcccagcctctccccagcttacatctgaagtctgagcaacatacatacacatactacacgcgtttcagagattattggtggacggatgcagcaagcaagccgggaaagactttacagaggacatcatgatgtgaaaacggaaactttacgctgcattttcgactgacgatttcctctcgcagctgctattcaggagagtcttaactactagcgcagtagcgctccgctctctatctctgctcgtctctctactgtaccaccggtgaggtgaatggcgtgtagtaaccttctccatttttaaaatctcgcaatttctaatggtaaccgtacagtttttgttgtaaccgtgctattaccgtatagtatatcattacaccgtgagataatgataacccgtaaccctcattaccggattaattagtaaaacaataagagaaattcaagacgaggaagcaaaggaggttttcagtgaaggtggtatatatagatcagaagatatagatccttcgcataactgccaatgcagtagcagtgggccacggtttcccttaccgccggtaaccgcgcggttaccaggcttaccgcgggggtacggtaatataaataccgcggtaacctctttaaatttaaataaatttaaaaaataatttgaatttttgataaattttacacggttttgtatgattttccacggttaccgcgcggtaaccgtgcttaccgccagggcgcggtaaccccggccccaacggtttgagaaaccctggcagcggctgacatccgagttcatgtctataaatcaatagtatttgttactgcaccaacattaccgtagacaatcctcactggtatatcaggatcagctgcttgctgcagtagagagggaggccgggtggccagtgagtcaatacggtagcattgccatctcggcagtgctggctggctggctggctggacctctgccttttgccgttgctccctgcgactgcgagtgagtgcccccatgcttcggtctctagcgctgtctttaatgggagtggggcgagcaacaaaatgtgtttaactagatttgtttcaccccttgttttttttcttggaatagtactactaataatgaattatattttgtccagatatgacatactttagtactataaatctgaaagtatatctatttagaattatagtattaggatatgtctaattcaatattagggcatgtataaaggtagagttagatatgagcgctacgttatctagagactagcatcctacaacagttagagacaatatggtctctaattattaatatatcaaaataccttttcatactcttctattcagacttgtagtattaggatatgtctaattcgatattagggcatgtacaaaggtagagttagatatgagcgctacgttatctaaagactagcatcctacaacagttagagacaatatggtctctaatcattaatatatcaaaatactttttcttactcttctttcctttttttcactaccatgcaacaaaatttgctctaataaatgctaagagtcgactttgagccgttgtcatgcataacaaccatactcatttctctttcttccatatcatcaaatttacttgcatgacaatatagagagaccactaataaatacagttgtatatgatcttagttagtattttatgagacgaagaaagtagaagtagagaaatcatcgtcaaatcttaagcggccctcagattcaaagtttcaaaccagtccttgtctccgataaaaagaaagattcagggcaggagcgttaaaacaggaggagtaattactgcctacgcccataaatggcgttagattatcctgtaatggtaaaaatcggaaccagaggtacggtcgatgctcttctctcttttgccgtgctacattgtcccgttgtgtttcgaactaatcccgagtattatggagatgtttggtacagtaagatattgtttcctctcaacacaacataggagtacataaaaattactccctctgtctcctaataaactcaattttctctccttccgtttattttaaaataagttcatttattattgtatagggtttattaaagtaaaaaataattatagtggaagtgtataaaatagataataattgcatttggaatttaataaagtaggtatattctagtcttttttatcagtatgtgttagatgcgtgaaaaatgttttttagactaagggagtaacaacaacgtgttacttatatttatgagaggcagtaatattatttaacaagggcaaatgattgggggaaaacgagaatgctaaaagaaaaatatataatattgatgaagaacttaaatccatgatgggagcactggtggagaaaccatctttggtcggtcgaccaaatttcacaatagtctcgattccattaaaaaccgggactaaaaacgatttttagtcccggtttaaaaacttttgatctttagtcccggttggtaacaccaaccaggactaaagatgatttgtagtcccggttcatcccctgtcagatgtatgtcagggggtcgagaatctttagtcccggttgatactaccaatcgggactaaaaattaccacttcaccaaccgggactaaagatcgagtgatctttactcccagttggtattaccaaccgggactaaagatcgatctttagtcccggttgaagttatcaaccgggagtaaatatttctctcccacatccgatcggttaagtcccagacagatatt

SEQ ID NO: 26474 - DNA, 9921 bp, Oryza sativa
actagccattagcaaatcaacaacaaaataataataataaaaaatctcgaggaactgtcgcttcccctctttagtctcggttggtacccctctttactcccggttggtaacaccaaccgggactaaagattgatctttagtcccggttatttaaaccgggactaaagatagcgatttttagtcccggattcgtagtcccggttggaaaaccgggactaaaggggggttatcaaccgagactaaaaacagtttctccaccagtggagaacatatttttcatcctccattactctctaggcaatgaatactggatatttcggcacggtattctcaaaagcaactttggtcagtagtctattagataaatatccaattttgttaaagtttttttaaaatcaattatacaaattgtttctatgtttttaaagtaaatactttaaaagttatttataatgagagttttaaaagtttaacattagttttgtttaaaacgataattatttttaagctgaaaggagctcagcacgcaaaacaaagctcgtattattacatgattatttaagtattaactttttttaaaaaatagattaatatgattttttaagataactttcatgtagaaagtttttgtataaataacatcatttaatagtttgaaaaacgtgcgcgtgaaaaatgggagaggtggattgggaaaatgggtgaagaacacagccctagagagaagatagaggcgctagggtgagttaatttgggcagtgcataggtgaaccagtgaaggccggccaaaaatagaggcagcaaccagtgggagaatgattttgaccatgatttcaattctttaatggttgttgaatgcatcaatgcaagtgtgttcaaactacaaaatctgtcatgtcgtcaaccttccttgtagctcactcaaattatcggaaatgccaaccatcattttggagctttctctgcttgtattgaccgtttcacaatcacatcatgaacaacaatgctgctcccaacttttaaagcttaaaaaaatattcctcgtcctactccttccgctgagaaacattaagcatttcgagctccagatatcagattacggtagatttgaagtttgtatgttaaaatatatcagagtagtttaaaattttaatttttatttaaaataaaaataatttgatttatccaaatgttatatacacgtaatatgtatagatttgtgagttaggaataccctgttttataaaatcttatatctgaagttgtgctaaagagggcttaataaaaaatatcttactcactgtattctaaaatataagacacattcgccttttccaatgtttataatacaagaagcgcatgtattaactatgaccttctctctcttttattccctccgttccataatataaggcataactattttattttggatgttccataatataaggcagacatgcatgcatacaagagaccacctatatatttgtcgacaaattttctactaaaaatttaatagatgtaattatagtacaatcgtagtgtaattacactgtaacttgtatgtaattatactgtaacttgcatgtaactatagtgtaacttgtatgtagatttgttctggtgaggaagaaaaaaatcatagcacacacatatgtgaaaagatttgttcccacgacctctattttactgaaataacatgttaccgagagattcttgaaagttacatacaagttacaatgtaattacatgcaagttacagtgtaattacactacgattttactataattacatatgataaatattagggggagaaatttgatgacaaatatctagcaaaatcgtgcatacaattaattaggacctcttcttcattaaattattgcttttttaaatcatccaccctcaagatttctaattctattagatgcatgcattacatttattagggtgatccaaactaggaaataataataattgtttctttgtctttgggttaagggtggttgtgccttatattttggaacggagggattagttcttttctaaaatcctctaccctcaatatttataatcccattggatgtatatatgcattattgggttaatctaaacaagaaggtgatagtagctttagattacaatatagcagcggataacccaaattatcagtccctagtcattcatgaagaatgcagtttttttgaatgagcaatacaaatttgcctctccttccttttcccactcttcttatttggtagtagtactactctgtacaaaactaatactattgtgcaacaaaaaaagcaccatataatgtatagcatttgtgcttgattgccagcaagtcagcaacatccatggcaggtattgctgagacacgatctcgctgtaggacgaaacagttcttaccattccatcatcaccaatggcgacttcaatatatgcgtgggtgcgaccatttatatgccacagctcatgtcgtacggcctgtcgaccatcggcgacggcgtgccgagccagtacgccgtcgacctcatctccgccgccgtgtccgagccgccgccgttgttcttgtccttgaggctcttcctgtccaggaacgccggcctcaccggcgcggggatgacggactgctccgtcgtcttcatggtgagcattagcaccacctccgacatcgccggcctcaggttcgggaatggctgcacgcagagcagcgcgatctggcacacctgcatcacctccttctcgtcgaacccgtcggcctgcagcttcgcgtcgaccagctccagtatcttggattgctcgtacagcctccatgcctgaagaagattcagaatgagagagattcttgtgacagtgtcgtaaactcgtagtaatgtggagtttgggttcagaaaaaagattcagacatgttcaggcaggtactgcatttcgttcgggagagagagatccgtgttcttcctgctgctgacgatctcgagcacgagaactccgaagctgtaggtgtcggctttcactgtgagctcccctctgatggcgtattcaggcgccgtgtagcctctgaaaatccatggatcacaaagttcttcagaaacaaaatttacaaccttgtcatggctcaggtgttcagagctagctagctacgggttaagcgagctgagtactatactttcttcagtacttacagtgtgccggcaaatgccgtgctgaggtatgtctggtcctcggggaagaatcttgccaagccaaagtcactgatcttgggctgaaacttatcgtccaggaggatgttgctcgccttgatgtcgcgatgaacaatcctcaggttggactcctcgtgcaggtactgcaggcctctcgcgatgccgatgatgatctggtgccgcgtcttccagttcagaaatggtgcaccatcaacacctgcaaagttaatggatgtgtaaaaatgtggatcaagtaaacaatgtttttgcttgttcttgacagtttttaggttcaggatgtaatgcttaccaaacagtatcttgtccaagctcttgttcttcatgtactcgtagacgagcagccgttgctggccctccgagcagcagcccacaaggcgaacaaggttcttgtgctggatgctggttatcatgttcacctcgacgaagaactcggactcgccctgacctgacttgccgacgctcagctgcttcacagcaaccttcctgccatcgtctagtttcccctgataatgaacattagcattgcaaacaaccataatgcaatcagaaattgctgtagaatggtaggtgatactgatacagattcagtattgttttgtggcgtttcttggcagaaaaaagtgtaccagataaacaggtccaaagcctcctctcccgagctgattcttctggtggaaatccctcgtggccttcttcagtgttgcataatcaaagtatgttattgtgcgcagattgccgctcatgttgccgctgaaatactcgggtacctctgttacatggacagaaagagaaacagcagagttttatacaaaaattatggagcagtttgtgttttattgttgatcagcaggtttgatgagaatgataggttcacctgacggagccctctttggcctcatcaatctcctcatgatatctggcctgaggaacttccagcagataccaagtaggatgaagatgactatgatgagaatcacgatgaaggccaggaagaccgcactcgcatttgggttcgccattgttgctgtctatttctgcacattcatccacccaaaacctaacattttcagctgaaacttgttctaaaatgttttcgtgccagttacttagttgcctgtactccgtacaagcaaagcagaggtgaattgcacatatgctcagtgacatgccaaacaaaaaaaatacagtaaaaacctgaaaactacttaaaaaaattactcattgtgacatgaacaaatctcatatatccatttatgtatcctatgttagttttcaggttaactcaagcctgaagtaattaagggtaggaacctaataaacaacatgatagaaaacgccatgaactaactaataccacagatcagccatgtcgaggagaaaatacttcctctcaccactatactagactcatctatttagttcaaagaaaactgtagttaagtcatcttgtacctactgtacgtacctttgcagaacagtcggtcgatccaacggcgatgatcaccggacgcgccgccgaagccgtcgccgccgccgccgcttcgtcctctgtacgcagccgtaacagctgcaagtctgcaagattgcaatgcgaggcttccaatgccgtgtggcgatggaaggtaagcagagctatcggtttctccgaggcgctcgcgcgtgtcgtgtgtccgatccgatccggtcgtacttcgcgctggctgcatgctgccactgccggccgctagctagcaagcattcggtaggcaaaagctcgcgaggatattagagtagcgcgacagcgacgccaaaggcatttgttaagctcaattgctagaaaacttatgcaagttttttttttatgtctctaaaatttttagatttgtgaccatatgatcatcttgagatttgtactagaaaattagcgcgcccgttggtgcgcttgctaatctaacctgtatttttctctagcattatgataatacttatacctttataagtagtatttttatttttacgtcgtggaagaattatagttatatacactacgaatcgatgaagatcatattttaaaggatataaaaatttatttttacgtcgtgaaagaatcatagttatatgcactacgaatcgatgaagatcatattttaaaggatataaaaatttattttcttttctaaagattctgcctcgcttctaaatttaagagttttaaacataacctgttagaatttgtagaatttagaagtaaacaatttttatagtgtttaaaattgccactaaatattctaccttttctagacacaaaggatatatagggttaagttacctatttctaattctaacatgtctcatgtcgtatttatcggaatttttctccctgactttcctaaaactgcaaaagttttgtaattaaaaaaaatttaacaccttatgtatttgtttataattcatattcctttttatatgtaaagttttttttaacatgtttgtagagcgtactctctctttttatacatattgtagcttttaaaatgatattgaagttgcactttaaacattaatttatttcataataatcgatacctatgaagtcgaaataaatttcacgttacagcttatatgtgcctaagtaaatatacttatatttcgctgagcttttgtattaaaatattacgcatggcatccaaaactgctagacagtgctgtactgctgtagctgtttcatcacacacactgttatgggccaatttggatttttttggctgtgcgtgcgatggaattttggcccagccatccaggcaaaaacgtattacgggagagatcgagaagggtaccctgccggcgcgtccgcacgattacgtgcacgatttaattcacaagttgcccgtcttattatcgttgctccacgtgtcaacaaattactcgaccatatggaccaatcagattgtataaaacctgccggctttagatatatagatagatagatgtcacgcgtaacatctacgtactaaccaaccaaattatggttgaatataagttttaaataagttataccacagttacagtactataattatcgtgtagtaattatagtatagttataatttaatttaattatattatagttacatcttaatgtttttcgctgaagaatattacctcgaacaagtttggagtttttgttggcgattgattagtggatcgcgcgacgaacttgttccaggccggtagttgtggcctgtgggccggccggtgaagacgcatggccttccacggcccacggaaatcttgagttggtgtccgcatacggcccatcatcaaatctacagcgcgtgatgcaaaattggaataaggtccatgaacagtaacagcattttccaaccagcaaccgacaaaagctgatcgttggattgaaatacagagcatccagccacaggcgccgcccccactcacgcgacgcgaaccggagaaatataaaaaaatcgagcaaagtcatttcaaacaacgaatccccttccccggatcaagcagctagggtttccacctctccctcccccaaatcttctccatggccgccgccgccgccgccgacgcatcggccgaggccgcggccatcgcgcggcgcctggcctcctgcaacggctccgcacgggagcgcgcggtgcggcacctcctctccaccttcctcccggcctcggctccgcacctctccgcctccgacctcctcaagctctggaagggcctcttcttctgcttctggcactccgacaagccgctctaccagtcctccctcgccacccgcctcgccgccggcgtctcctcgggcccctcgccggccgccgccgccgccttcttcgccgcctacctcgccaccctccgccgcgagtgggtccacatcgacacccaccgcctcgacaagttctacctcctcaaccgcaggttcctccaccacgccttcctcctcctcgccgccaactccttcgccgccgacctcacctcccaggtcgtatcgatcctgtcggagaaggtactccttcccgaggccgacaacgtcgccgccggctcgccccgtgggcttgggtaccatgtcgccgaggtgtttctggacgagctgtcgcctgtgctccctgtgagcttacagacaatggaggtgttgctatctcctttcttcgctgtgttggagaagtcatctgatagggtgatggtggctaaggttaagtctagtgtgtttgagaggttcctcgagagcggcaaacaattgctcgagatggcgaagaaaggcgagggggtggagaaggggagcgcagacgagaagattgggaaggttggcttgctgtttgggttcagcaagaggttctcagatattggggcgaaggcggagaccgtgcaagcaaaccgaaaggtgctatttgggctgagggatgcgtttgtgaaggttgagaaaggattggagctctctggggtcgagattgctgtgccagagttcaagagtaccgaggtgacaggggtggagaatggcatggatttggatgaggtgaaggtggagaagaagaagaagaaaaaggcgaagaaagcttcattggtggaaggtgagacagagggggccaaggattcaaagcaagagaaaaaggtcaagaaggagaagaaagagaagaagaaaaagaagaaggtagaggttgttgatgagggagatgtcacggaacagagtacagacgctcctgcagaggaggaccaacagatgggtgatggtactgaggctgttacatttgatgagacattgatgtccaatctccagaagcagtttgagaaggctgcagcagaagctggtatggtcaatggaggcagcagctcaagtgctttgcccgctagtgggaaagctgcaaagaaaaggaagagagcaaaatctgcagataggttatcggtttctgatggagacgatgttagcagcgaaggtacaattatttcccaggatggggagaagagcggtaagaaagtgaggttctcgatgaagaataatctagtttggaagcctcacaatcctttgccgccgcagtgcttgaggctgccaccatctgctactccaagagggagtgcactaaaaaagggtgttctgcctgggcctataaaagaaacgcctacgcctgtgaagaagactaagccaaaagcgaaatctgcaaagaaggtcttgaagaagccttcctcagccgcgaagcgcttgcggaagttgcaaaatttctctgcatgaactcttttatgaattgacactgcagtgatcatgctttctgcatggtgtgtcttttcaaccgtgttctattattacttaattcttcacctaggttagtcttatacgctgttgactatgcaccaaatttatatttatggattgtttaatgttgtgttatgtcatagcgcattcatgataatcatgtgggtgatcattctttggaattagcagtagcaattttgatctggatagtacaagtctgaattcccatggatgtcctttctgttccaactatatatcttcctccattaaaaaaactatacatcttcctgttttctttcacaactgtggcttagtacagagtactggttcagtgattctatatagatgaatcgcttccacaagcttattttcttattgatgatcagacaggcggattcttctgagcattatgatgttccatttgacataagattgttaacatcactggtgtttggcatgaaggcctttagttactagtttgcatgatgaagatagctgttgacatagtttgtttctttcagtacccagtaactttgatggggaatgttctgtctgcatatggtacacaagaatgagatgtgtatgaatgataattagcactacatgtttctgtatgtgaaaccgacctactactgctagatatagatatcatgctcaattgtttctgtccaatatctccgtgatccaagaaagttactgaaatcaagattcaagagcagagcgtttcgaagaggtgagttgttgggagaacatgagcagcatatgttatactgtattgacttcctcagaagttctgatttctgatatcttgtctctgaaaatcccttttggctaaattgcgcctgcactggcaatagacgctgtgctgtcgcaaccggggctcgtcagtattaatttctgctactgatttcacttgtttttcttgtatcagtatcaactcattaattttctcaacagcacgttgcagagacagctatcatcggtgaactgcgattgtgatgcttgtattataattcgtattcgtattattggattctttcttgtggtgaatgatactgctacttggccgcactatttcgtgaaatgtgcatgttgtgaatgtagtagtatgatcaatgtcaagcaatccagaaccgaaaatcaaccactgaaaattgctgtgatcaaagatagcttcctagagagagcgcgcacggatcacgaggcttcagcagcggtcaagatgacactgtgatcgttggcacaagtcgctcttgcttagagagctagagttagttattgtcgtcgtgtagaatatagttagcgaaatgccaggatcaattcatagacgaaattgtagattgcttcacttggttgtaattccaatgtgccacatgaagaagaagaatcatcacaaaggtgaaaaaataagagtcagtagtcacaccaatccacaaccttggcag

SEQ ID NO: 26475 - DNA, 32819 bp, Oryza sativa
  unsure (1)..(32819): unsure at all n locations
caagttttggttcttgacccgtctctgattcctgatgtggtggatgtggttattggtgatcacttgtatgagctgtcttttagagtagaacctgaaaataggcctgaggagcctgtgcctatggagatggagaatttggatgatggggatttggaaaagaaaaaagaggggaacatgaatcaggatctggggaagggggctggtttatttgattcaggtaacagctctaagatgggttctggtggtcaatttagtgagaggggtggtccttctgctccctcttctcagctaaatctgatacctgaatctgatgacttgactgtttctgatgaagaatttgatggtttagatgaggagactataatggttgacaaggcccagattcaggaaagtcttgtggcaaagctctctgctatccctgaggcagtaatctctccatcaaggaagagtaagagaagggcaagtgatagcgattagcttgttcttgaaagggccgaaaagttgaaggctgataagaacttggagaacctgcaggctaaaggtaattcagttaataatgtttcttttacacaattttcaaatgatcaaatatctgcacatcttcataatcttggtgttataccttctagtaaaaatgttgttttagatgatgtaattaatgatttgaaatgtgtagaaaataataggataagcggatgtgcttgttcttctattaatcaagtttgtacccctaatgttgatactgagtcattagatgaccagttggaggataattttttactacaacatttatgtagtgaaattatggaagaggtcatggattttagcgaggactgtgagaatagtcttaaaaacactttaaatcctatggcatcttctcctaactctaagaaaaagagtaaaagggggaaaaataagaaaaataataaaaatagtttcaaatgaagggaatcttttggaattgtgatgggtttaaggacccaaaaaaacataagtttatttctgacttgaccaaggaacatcagcttgactttatagcattgtctgagacggttaagaaagaatttactccagctgcacttaaaaatctttgtgctggtaaggagtttttgtggcattgtaaacctcccagaggtaggtctgggggtcttctgttaggcatcaatttactaaacgttgatattggtttaattgatgaaggtgatttttatattaagttccaattatgtaacaaagttgataagttcaagtgggctttagttttagtttatggaccggcacaaaatgaacttaaggatcaatttcttgctgaattagttaatttgtgcagtcatgaatccctaccaattctcattggtggtgattttaatattttacgtagccctgatgaaaaaaataatgacagttacgatgatagatggccctttctttttaatgctattattgagggactgtgtcttagggagttacaaatgtcaggtaggatttatacttgggcaaataacttagcaaatccaacttatgagaaacttgataggattttgatgtccactgagtgggaacataaatttcctttatcctcggtggttgctcttaatagagatatttcggatcatactccacttcttttaaatacaaactccaccttttcaggtaatgcacaacatagttttaaattcgaacttggttggttattacgtgatggctttgtagatatggtaaaggaggtctggtctagtgtacatgagggtaatactcctatggagcaatggcaggcgaagattcgccgattaagacggcatttgagaggatggtgtcgacgtttgatgtcacgactacggtatttggacagtatggggatcgttggtgctaggatatacgcgagactgaggtaaaagagatggagacagggatttttatacaggttcggacccctgagttgtcaggtaataaccctacatcctgttggccggagtcggagttgcttttattcaccataatcacaccagtacaatatgtggggtagcctatctaactgttgtcgacatgtcggtctgaagatctgactcgtagtcgacaacagggtagccttcctcctcgaatccgtgcccggcgaggtcagagatagtgctttcgtctctcctgacggtatccggagacaccgtaggggaatagccatgcctatccctgaagtcgatatccagcggcgtgtcttggcgtatgtaggcttgtatgttgtggcttctggtgggtgtatgttgattgtcatgggtgtcttccatggtggttcctctcccctgtcctcctaggggggcttgtatttatacccataggtgtccccttgtccgagtagaactagggaaaccaatatggatacaatccgagtagtccttgtcgtttcaatgtagaactctggttgtctttccttatccggaactccctcctatatccgtaggttgtttccgtataggacatggtatgtggtgggtcctgccgagatttagtcaactactattaggtatgtggtatccataaccataacagatgggataaacatacaagtggtatgtataaaaaacaaaaaagggagattttggataggttggatttgttggataaaaaggctgaatctattcttctaactcaggaggaaattgattttagatggttttgtaggaatagattatctactcttatgagagaagaagaaattaagtggtattaaagggctaaaactaaggatattttggagggtgattcaaatacaaagtattttcatttggttgctaacggcaaacataaaaaaaccagaatttttcaacttcaagatggggatcaattgataaatggtgatgcaaatctaaaatcacatattaccacttattataaaggcctctttggtcttcctgatgattctgatctccagtttgatgaaaataattttgtggatatcccacaagtatctcaattagagaatgaagctttaatacaagaattcactgaaaagaaattaaagaggctattttccaaatggaacataataaagctccgagtcctgatggatttcctgctgagttttatcaggtcttttgggatgtcattaaggatgatatgttggatcttttcagatattttcataatggtactttgcctttattctcccttaactttggtactattattcttttgcctaagtgtgatgaggccatgaaaattcaacaatataggcctatcttcttacttaatgttagttttaagatctttaccaaagttgctacgaatagaataatgagtgttgctcaaaaagtgattagccctactcaaactgcttttatacctaggagaaatattatggaaggtgttgttattttgcatgaaactatgcatgaattacatcgcaaaaataaaagtgctgtgatttttaagatcgattttgaaaaagcctatgacaaggttaaatggtcttttgtacaacagacgctcagaatgaaaggtttctctcctaaatggtgtgagtggataacttcttttattcaagggggacatgttggtattagagtaaatgatcagaccggtaataattttcaaacttacaaaggtctaaggcaaggagatcctttatctccaattctttttaatatagtagcagatatgcttaccttattaattaagagggctaaagatgctggttcattgaatagggtagtccctcacctagtggatgatggtttatctattttacagtatgcagatgataccatcatatgtttggaacatgacttacaacaagcgaagaatcttaaattgattttatctgtgtttgaaaagttgtctgtcttgaaaataaattttcataagagtgaattattttgttttggtcaggcaaaggaatattatgatgagtattctaacatctttggttgtaagtttggctctccctgttaaatatcttggtataccaatgcatgttagaaaactgaataatagagattggaaaatgattgagaaaagaattgagaaaaaacttagtagttggaaaggaaaacatttatctgttgggggtagactggttttgattaactctgtactttcaagtttagctatgtttatgatatctttttttgagataccaaaggggttcttcaaaaaattgattattataaatcacggttcttttggcaaggagatgaccataaaaaaaagtatagacttactagatgggatatcatttgtcaacctaaggatcaggaaggtttaggggttcataacttggaaatacaaaacaagtgtctcttgagtaagtggttgtttaagttgattaacgaggaaagtgtatggcaaaatctattgaagagaaagtatctctacaatcagtctataacccaagtgaataagaaacagggcggttctcatttttggtcaggtctcatgaaagtcaaagataccttcttagatatgggttcttggattgtaaataatgagaaacaaataaggttctgggaagataaatggctaggaaacctggcttttaaagacaaatatccatctttatactctattgtccgaaggaaaagttctactattgctaatgttatgagatctgttccactcaatgtttcctttaggagatcattagttggtcagaatcttgcatattggcatgaattgtgtgcttctattgtacatattcaattgaatcaatcctctgatagctttagatggaattatcatcagaatggaatattttctattaggtcgatgtatctagctttaattaataatggttatatttagagaaacaagattatttggaagcttaagatgccacttaagattaagatttttatgtggtacttgcttaaaggggttgtgctaaccaaggataatttggcaagacgaaattggaatggcagtttaagatattttttaatgaaaaatgagactattcaacatctttttatagagtgtcattatgcaaaatttgtttggagagcagtacagttctctcttggtttataccttcctactaccatatctaatatatttgatggttggctcttgggggtagacaagaagaagagtaaactcatacttgtaggagcttctgccatatgttgggctctgtggttgactaggaatgatatggtttttgacaaatcaccatctatctcatatatgcaggtaattttcagggcaacatattggctccgattttgggcacagctgcaaatgtgtgaagatgatcgagagcttatgaaggttgcatgtcgtagacttgagacaacggtcatgcaactccttgcaaactatggatggagattcacaaatagacttgaataaatgtgctctccttatcttagtttgatcttttattttgttgggtgtgtttaattcatttgaactacactcagtgtttgggtgttacttttataataattggctgtaactctgatgagtaaaggccgggatgttttatttcattatctaaaaaaaccaagggttaataaacctagaacaagttggtgactattagagtgttgacaatataaaattagttatattattaaatttaacatttaacatatatttataatatgtttgttccgtattgaaaatattaatatatttttctacaaacttagttaaacgtataaaattttgactaagaaaatattcaaaagatttttaatatgaaatggagcaagcatgagagagtttatcagttcagacaaagaaaaaaaggaaaaaaaaacattgttcagtcggcggccatctccttcctgatgtcgtccaggagatcgtccctgtactcggcgaacgtgccgtcgtacggcctcaccgtgccgtcctgcaccacccacagcgcgctcctctcctcgtcgtcgcagacgcgggacaccagcctcgagtcatggctgacgatgaccacgccgccggcgaactcgtcgagcgcgtccgccagcgcgtcgatgttctgcnnnnnnnnnnnnnnnnnnnnnnnnnnnnnnnncaacacgtgcggctccccgagcgcgacggaggcgagcgcgacgcgggccttctgcccgccggagagcttgccgatggtggtgaggtggctctccttggccagcccgaacctggcgagcttggcgcgcgcctcccatggcttgctcttcaggtggggatgcgtgtcgagacactctcggtgacattctggtgacattgagtcactgacatgtgggtcatgggggaatgtcactgaatctacgtccgtgctgcacggggctcttctcctccggcagcgcgtcgcagaagtgctgcgagtagagcccgatcctcagcttggggttcctcctcgcctcgccgctcgtcggcgtgagctcgccggcgaggagcttgaggagggtggatttccctgccccgttggggccgacgacggcgacgcgctgccccatggagacgtcggcgtcgatggcggacagctggaatccgccgcgggtgaacccggcctcggcgaggcggaggaggggcccgccgccggcgagctcggtgggcgcggcgaagtggaactcgacggtgtagtcgtgccacttcttgggcgccctccggccgctcttccgcgccgccttggccagcctctcgctctccttcatggccttggccttcttctgctcgtagctgccgacgaaggagtcgaagccgccgcggtaggcgtgcagcttcttgtcctggaggtgcacgacctcgtcgcagatggcgttgaggaagccctcctcgtgggagacgacgacgagggtgctcttgcactgcgcggtaaggtactcctccagccacaggacggcgcggaggtcgaggtggttggtgggctcgtcgaggaggaggagcgttggctgcatgaagagcgcgccggcgagcgcgatgcgcttgatccagccgccgctgaaggagctcgccggccgcgcctggctcgcctggtcgaaccccagcccggcgaggatcttggccgcgcgcgccggggcggtgtcccagccacgctgcgtgagctcctcgtacacctcggcgagccgggcgccgttggcggcggcggcggcggaggaggcctcgagctggtcacgctcggcgcgcagcgtggcgagctcctcgtcggcggcgagcaccacctcgatcaccgggcgggggtcgcggttgtcgtcctcctgcaccacgagcgtgacgcggatgccgcgcggcaccgggagcttcctccagtggaggagcttgagcagggtggtcttccccttgccgttgggcccgacgaggccgtaccgccgcccgtgcgcgacgcgcagcgacgcgccctcgaacagcgccaccccctgcacccacacgtcggagtcctccacgacgacgtccctcacgttgtcagtcgcggcgtccgcggtgccggcggcgccgcgtcccaggacgcggccgccgatggtgacgacgtacgagtcagggtcgtcccagagattcgccgccgccgccgccgcctcgtgcttgcgccgctcctccttcttcttcgtcttcacctccttgcgctgcggcggcggcggcggcgcggcggcgttgacgtcgaccggcgcgaacgacgccgccctcggcgtggcagcgccagcgagctcgtcatcgtcgtcgtcgtcggaagggggggagatcgatcccagctaggtacgacgagggctcggagttcttcgtgggcctcgatctaccggccttcgccttggaatccggcggcgcggcggcggaggggttgggcttgcgggcggcgtgtaccttgtgcaccattgtttcgatcgtaagttcgtcggttttcctttcggctcggacttcgggggatttcgcggggctcggcttttggtgttcgccttgtctgtccctactatatctaccgtctcgcctattcagattcgtaacgagtcttctctgattggattcaccaaactgcttcttcacggtaagacggttatcggtttcatgaattgagaaaaaggttatcgcaagtgatcaagagcggaggcaagcctatgacaactagggcttacagcccaagccctagggttgtcttcaaaatcatgtataaattgttttaaatcaccatgtagttttaaaaaaaaatcaacaacttattagttgagccttagcctagccatactctttaataatttctagcttcgccgctgcacgcgataatagtgatacccgcatgataaccgggcggttttgtaaaccttgctgtgtcgctataatttaagaaagtggaaccgatggattatatataggtttgggctactggattgcgcgcacttgggccagcctgagccttcttcgttgggccattggcggatttgggcccattacggatttgtaatgggccggtggaaagcccaaaaacgtgaggtgtccttcactccgaccgttacagataagccccagcgccgtacgagacggcacaacacgacggccgctcgccgatcacacgctgacgcgcacacaccggcgatttctcagccgcaatcgccatggccaccgccaccgccacctccctcgcctcctccgccgcgcaccgccgcctcccgccctcgcgctcagccgctagctccatcctgagagcccccaaccggggccgcctctgccccggctccccgtcggtgctccgcgcgtcgtcctcgtctccgtcgtctccccagcccaccgccggcggtgatgagggggaggaggaggaggaggggcggaggctgtcgaagcagtcgtcgtgggaggcgaaggactccgagggggatgactacctctaccgcctcgggaaggaggccgacaacatgaacatcgccgtcggcgcgcggagcggcatcgtcgacgacctcttcgtcggcaacttcctcggcaaagactgtacgcgctccagcacttggatgccccgttcgatccaaataccatcttataataaaatgtcctgaattgtttggttcctgaacatgagattctgtatactaacttcagcagtagacgatctttccttggttacagctctatatatatagttacttgtgaaatgtgtttgcagcggatattgtgttcgattaccggcagaaagcgaccaggacgtttgagtacctgcaaggagattattacatcgcacccctcttccttgtgagtgtaattttagttcatcttcagctgatctttttttttttactgcatcctcgtacttttatgctgttctaggtacctgattgacaaagatttgacactgcagattcgttgtggtgcaggataaagttggtaagcaatttaatgtaggaggaagcacattgttataatcaggtatctcactcttacagtttgaagagactacatctttcgtttcacctgcataaacagtggctactgaagtatcagtgtccttctgtataagaaactgaacaagttatacaaaggtgtaacagttgccgaataagcttaccaccatataccaacagtccctagaggcctagactgaatatatatatttttgggtcaaactatcaaataatggcatgcaatgttggcagcatgtgaaatatatgcaaatcttacatttacattaattgtgattatgctaaactcttccttaataatatcttgaacttttatatggtatatattcttgtggctatagtgtgcatgacaaatttattttattctttttctccaggcacacatactaaaaggactgcttgatgtttgcagcatgtcatattgtgaagaactaccttgcacatattcttactatcaagattccccttatacttggtagtgcacttctctttgtttctctctgtgtaattgggatatgaaataatacatggttgtagttcaatattattctttagttcgttttcaatatttttgaggaacattgcacaatgcaggaatctggggtggaaaaggccaagggaaaacattccagactgaacttatatttagagcaatgggtgttgaacctgttattatgtctgctggagaactagaatctgagaaagcaggtcaaagacacttgaatttgtgcttactgtttacatgctttatgtactctgctatattttgcaaggttgctatcaatgtggtgctccgtagatcatcaaagggtctcacgttcattagtttctcatgtgtgtttctgctattgttgcaggagaacctgggaggcttatacgtgaccgatacaggacggcttctcaagtaattcaaaaccaagtaagcaggtgttttcggctactcagtttcagatatgtaccttcaaattcagttctcagttttgagcacaaaacaaaataatgtctcaatttttaaaacttgagtgttatttcacctgtttgagttttttttttttggtatgtgtggaaagctccagtatctgactagcttcgtaattgacacttgaaatcataaaaaaagattgtcgaaaattctattactactgtcactcagttctgaatatggcaaaaatgctccttacatattttagttttctattaccatcttttcaaacagctgattcaatatttggtgtttcctttttcttttttatacatcaagatagcgcaaatgttcctgaatgacttgatgcttgtccgttatgagaaatacaagtgctctcaactctgtagtgctttactcttctgtgttattactgtattatcatgataaagttaacagattaatgatgcctgtgggttttgttaattttcagtttacttcaatgattcctgttttcacaatttttttcatggtataggggaaaatgagtgttttgatgatcaatgacctagatgctggtgttggaagatttggtaagttttgtaaacatattttgtatggtaattgttgatcacagtgacctaggatattttgtttatgcttcctttttgagagcctgtcaacaatactacaatagtgtattcatctggtgtattaattattttccaaatattcttcagaagaagagcaccttttgtaggaagagatggatcttagagttttatttttcatcgaacatatggtgatttctttttgacagcaaactaagtgctatatatcaccgttgttttcaggtaacacacaaatgacagtaaataatcaaattgtgattggaactttaatgaacttggcggataatccaaccagggttagcattggccagaaatggagagaatctgatgtaacacacagagtgccaataatagttaccggaaatgatttttcgacactgtatgctcccttgattcgtgatgggaggatggaaaagttctattggtatgttcgttcttgcatctgaataaattttgttgcaacaaagtacagactgaattttatttgcaacaactagtcggatttaatttggcaaaaaaacttcaaagaatgatacttgaatgtgatatgtgattaataggcagcctggccgtgaagatataattaacattgttcaccgcatgtatataaaggatggtttgtctttcgaggatgtatcaaaagttgtagacacttttccaaaccaaggtaaccatttctccagaactgtaatttcattttgcagcatatgaaacaaggtctatgtttctttttatacaaacatacttagatgatatgtagggaaaagaaaaatagaagaggaactagaacagtaacatagccatcattccctcaagcaaaatacctattctttttttccttttctcaaacttcattattttccttgttcagttgctggtggaaactagttattattattatttagcatagaaagtatccatttttcaactacatttgaaaagtatattcaagagcgaactcaacccactgcagctctggacttttatggagctttgagatccaggacatacgatcgggcaatcttgcaggtacctgtgttgatttaggacagagttcgcaattctattttccagttcgttttagaaaaaaaattcacctgattttttgtatgtgaaacaatgtcatgtctgttactctgtttagttgttgaagatgtacttttttgcaaatactgttgaagatgtactggtgtgcaccaaacagcgtgtatggagacagcgtgcaccaaacaacttgacaagcagacaatttttttccaaaaagttttaacagttgtatttccgataaatgtaccattagggtagtagttactgtattgtacttcagacatacttttctgtaaactggaaatctcctgggtgcagtgggtagaagagattggtggtcatgaacaactaaatgaaaagcttctcaagcgaaagaaaggagaggagcttccaacatttattcctccaaaggtattcagtttttcaggccacataactggcttgcgttgtactgagatttctttgtcataatcagtttgctaaatgtctttccctaaaaaaaaagtctgctaaatgtcaaaacagcaagctcacatactgattcttcattactctactgaatatcatctaagtagtaattgttgtttctttcattgatatgtataatatcctgatgttattttgttcatcagaccactgtagatgcgttgattgaatctggggactctctggtgaaagagcaagaactgataatgaattcgaaactgtcaaaagaatatatgaagaatttagatgattagttcaaaacaaaaggtctaatagagaaagtactcgaggtgcctatctcaacccgattttgtatatttttgcatctctgaaaactgcacctttctttctctctctctttggtgcccctgcatcctacattctacagaacagttgcatgtgcaagtatacgatagtgtataaaagaacatgaaaaggtatacaagaattttttcggctgtgttttatgtattttagatatctttatataatcgtttgtacaatggtttgcaactctgaactatatataatgaacttcatatattatagtgaacttcagacagtgtttcgctttcagaagttgcccacaatatgtggtttcagatatccacgactggaagaacagatgtcatcgtcgtctagctctcattattgccagaaagttgtctggtactccagtcgacttgatagactttttaggctatggctatggcacaaggatacaaaaatacaaaatggtccatgtattccagtgaaacaaaagtgtccaaatgataagtcttaattactacctccatctcagaatataaaaagttatagagttgaatagggttatcaagaaagtagtaaaattaaatagagcaaggttgtgattggttgagaactgaaggtgctgagaaatttgaatggtggatggttgtaattggttgggaagagaatgttgatgaagaatttgttatatttttagacaaattttaagtgcttaaagagttaaaagtagttatattttgagatggatgaagtatttctctagaaaggatgtacataattactcacgtgatctacttcgtatttacaaaagatgtgcttatatggaacaaagaattcacatgaaaattccatgtccatgctaaggtaggttagagaattcacatgtacgctaaactgaaacccataccaatccttagtgtttgtgtccatcagtggatattttacaagggaaagtaagaaattaaggtaaggcctcctctaaaatgaaggaattttgtcgaaactgaactaatttctatctagaaaaaaccaacttctaggacgaatatgaacaaatgcatatctagattcatccctataagtttaatctttttggaacggatggtgtaagtaatatatagacaactcaaataatatgttgtctatatattatttgatagttaaagatagttatattttaagacgacgccattccttatgtcctatataaaggagtctaatcccatcaattaaatagaaataacaaagaaatggaaaacaaaaaacaaaatccagttttgcaccatgtgtccattcggcgggaggagatgcctgcctgcctgccaaagtgccaatatccttatgaaaaatactataagtacgactaaatttgtccgactttagaacaaccttaacgccgtgagcttgtgacgttaatctccgtataaccaagccatgttgtcaccatactcagtcacgtattgagttgttttaccgtttgatcgtacgctggtcggacataccagtcgtacgtatagtattgttctattcttatcttggaatactaaacactagcaatactcgatttaagattattcacgcgggtattactagcatcgaggggccgcaaccgcaattacaaatgggctgctggcgctgccgccgaggcaacgtggagcgcagccaacgcgattaggtggcatcatctcatatcacatcacatcatatctcatatcccctcgctacataaaagaaaccaaacactcactctctcctgatcttactctgctaccgctattccctccctatctgtctcctctctctctctctctccttgtgactgtcagtagtccgtcgatcgccggcgactagccggccggccgccggcggcgtcgatccatggagtggtggcagagggcggtcgtcgtgccggtcaagcgcgcctgggtcgtcgtcgccgcccggctgcgtcgcaagaaacaatacggtaagttatccattaattctactgaatctttttttcctggttcatgtcttcatgagagaagaatcgaattgtttctgataaaattcgccgtcatgaagcattctgatcttctcctttttcatcgttctgcattaaaacaaaaatcacggtgggatggtaattaccgctgaatgcaatggggagacgaagtctgaatatatttgaaaatgtttttcatcccaaacatgggaaatcgcacctttaataataattaaattagtcaaatctgttcttcgcccaaaaactgaatgcatgtacacgtatggagccgaagcaaatagccaaatacacgtcgttgggggacacgtacgcgtggcggccgtcgtcgtcgtcttctgagcaacatgccaagccacgcaatctgcatcctagtacacaacagtagtgcagtataagatcagatgcatgcgtgcaaaatgtagaaattatctgaaactctgcgtgttatttttcttaattcgagcgagaaaaaaaagagagattgttttcgtgtcacgtggctgcatgtcggttgtcgtacgcctcactgggttccactccacacaaacatcactagtagactactgctgcagtactcatcagcatcactagctaagctatattggttttcgtctgcttcttctgctcgatctccacgtgtggaaattaatcaaagcgtgcctgtttatgcttgtaagatagtactgtcatgataatcttatttgctctgacattaggaatgtagacatacattgattataattactccctccatttaaaaaatataattggcttaacctatgaacctggacatgctcatagccagaaattcatttgttttaaaggacaatgttcatgagattgatcaaatcaataaaggtttctcggttccaaaataaacaaactcagtataaaactaaaacgtgagatgggggagtaggagtaggaggcgaaatggcacatagtgtagttgcacagtgatctgagtagcattttaagatcctgagattaaaatcttcgtaggagtgaatttcagattgagttatttgagagactaaggctgtgttcggaggagggggttgggaacccctcctcgacggcacgcaaaacgaagttcgttttattgcatgattaattaagtattaactatttttttaaaaaaatggattaatatgatttttttaaacaactttcatatagtaagttttttttttgcataaatcacaccatttagcagtttgataaaggtgcacacgaaaaacgagagaggtgggttgggaaaatgagggaagaacacagcctaagttccccatttaaaagactgtaaatattcggttagatgtggagaccgagtaaaaaaatacccttctaaacaaataataaaaaaaggaggttgtcaagcagcggcgcttaaacctggaatttatcaggcaaataaagtaatggacagcaactggcacttcttgacatctagtttgtgatgagatatttcagtgtcgtattatctacctccatgtcataaggaatgcatatatataattaaattacacgtagacatatactatacatatgggttggtacttggtagaggaaccagccaaattaggcagcgagtgagtgacatctgcatgcagtatatactctcaccaaccaaccgcccctgctctgctcactctctcggcaatttggacggacactcatctctgctcatgcttaattgccttctagaagcgtcgacgtggcatgcttatgcacttacatttcgtcctggccatgattaatccaggatacgcatgcccgattagtcataactatctgcagactggctgtgttgtcaccatgtttgtgctcattcaggtacaaaagtgattagctgccattgcatacttgccttctgctcttgctaattgctatatacatatacttcgttataaaaatataagaatttttaatttgtttagtaaaaacttaggttgataaaataaataatttctttcggtcataccattagtggtcaaattttgaattgtttaggttggattttcgtacattaaaattagtattctagaaatatttgtataaaatttgaatcctactatagtttgaaacggagagtgtgatgataccatgatatgttcaggcttctgggtacacacgtgtagggtgtcgaccgccgatctagctagcgacctcttgctatttgacaacagtgctaactgacagtgattgattagctttgatcgactttttaattgtgcaacgtcacccatgcatgcatttgtttagtctagctatcatattgtgctactaccacatgactaggtaaaccgcttacttatttctcatgccgatcgacgaggtacgcgtcgcattgtggacgcatgtatacgatgcgttcatgcagtgtcatcctaatccattacgtcattgacaagcaatgaaattaattaaggacatgcttaattaccttaattagcctctagatagcaccgtattaatgatgagtatgtcaggtgtttgtgtatgcatggagcacgtgcggtatcaattcgctcttggattttcatcagtataaaaataggatttgctttctgcatggatccaattctgcagtcggctaaccacccaatcatacatatagacagcatcacatattcattttttgcaggaaaaaaaaagaaattatagacaagaattatgactggttattagctcatctagattctcaagattcagaattccttcagagcttgtgtgttatcaagttctgcagtttcaacaaattggacttgagaattgacactaagctaccttttctgtaacaatttctaccatggtacatttttttacagctacaaactgtagcaccaatgtactctctccaaattcataaccataaattagtgcttcatttaatttggaacggccgatgaaatgcttatatttttagaatcaggtggaatataatactctctccgtttcaggttataagatgttttaactttagttaaagttaaactgctttaagttttgctttaagtttgatcaattttctagaaaaaaaagtaatattttgacccaagataaatttattataaaaaatatttaattattcatttaataaaactaatttggtaatgtatattactatatttgtctataaacttaatcaaacttagcagtttgactctaatcaaagtcaaaacattttataacctgaaatgaaaaacattttataacctgaaatgtgaatgaagtactacgtaggtagttgaattttgtttgctttgtcagatgggcgcggcgtgctggtgaagctccacgacgacatccagacgtgcgcgtacgaggacgtgcaggtgatgtgggagatcctgcagcgctcggagacggcgaggctggccaccgcgccgccgtcgccggggagcgcccgggcgctcatctggcccggccgcgccgcgccgcctcgccgccgccatcgatgacatggacctgcggcggcggcggcggtgctgagagtgagtgaacatgccattgccgccggccggtcgagcatggccgtctctcagctaaagctccggccagctctctgccattgctaatgcgaatcccctttcttgctgtatagctctagatgcttgcatctttctttacttatgtaaataatatttacagtttcaagagaaagtaccagttttgtattttgctgcagtctttctcttggtttcagaaatcagaactgctatcatcagcctatggggctgtaggcatatcgctctcacactgaaaaaacaaaacaacatattcagttcaggagagggcagtaagcaggctgagaaaacattggagataccttgtaaaaagaaggaaagtaccggataatcaacgatgcatgcaattaaaagatctgcgtagggtatcagagcttgtgtcagccaggtgatctgaatttaggatcaaagaacctgaagtggaggtctaaaactgacatatggtacaatgagcactctgagaagcagctctgcaatcggtgaaatggtagtcatggcggcttctcaatcattttttccattcaaacgaccatatattttgatagtctcgtttcattcatactgttctttccatcagtgtctcagctgccaaccaaatggatgtcagcacaagcataggatagcaaatcaaaatggcattgtagcgtcccagtggctcagtgaatctcgagctgtgctacagagaacaagattttacctatcagagggccagaaataaggttcacaagatgctaaacccaggccgcgtgtatcataacttcaaaggtgacttctaacagttttctggctttctgcttgaaaaaaaaggtgattatgcaactcaacagattatatttaaggatactcaaacgaaactatgttcacaagtaatcagcagaagaaagtacaccagagcaaaaccaaatacaggtatgaattgtccgatccttgagagcaagaagttttgcatgcacccaataatctgcagcaaatatgcacattcttatacatcatattagcacgccatagaagaagttttgcattcacaggcattaagcattaacggaatccagtctaatttcccccaccttatgatgaaaaaaatatcactccaatcaacaaggcaaacagctaaaaaaattaatgacattatgcagaccaacattagggaaaaggaacaactaaaaatggagagacagttcaggcttaccatctacagcttcttgactaatccctccgttccatctggtactaggttcttatattttgggacggagggagtaggtctccttcaaagcaacattagatagaacggaagaggaaattcagacacagcatacttgcaggttgcaacatgtagctgtcattgtcaaaatgcttcctgagatatttctacaaattgcctacacatacagatctgaaagacattcttctccccattcagaatgaatgtggaacaagaaattttagattaaaaaaacaaatatatcataattttcatcaggaacccattcgtttaaggtgataaagtgaggatcacaatgatagtgcacagcttggccataaacatatctacgttttcatatctggagtgaagatggaaacatctacccactcccaagcagacaaacacatcaagggagaggagaggtcttagagatctaacatataactttcaaaaacacagttacaaaagaatttaaataaaattaacgttcaacatccctgaaattagtactgaagatacctagaaaattttggaatcaataatgtacatcctgacctagaaacttacagaacattttcctataagttacaggacagctcttgcattttgctgtcttctgtccccttatgccagatgttacatagaagttgggacttttggatgaacagtctccatctcaggagagctaatgaggtctaagcaacgtcaacggaagatattcttctttatgagggcatttatcaggagaaaagaattggctttctttcgctgcaaatctgacagcagaattctgccttatccccaaatgcgcatcttctgttgcttgactgcagtataatcgcttcagctcaaatgtacattagatgggcaccaaaaacacattggtacaaaaaatctatttgaaatagcactttccatctgtcagtcatgttcttctggtgaacataagcatatcttttaaaggaggactggccagtcctccccgagctgttgaggatttagctgcatagctaccttgaaatcatcaagggagatcaagtggtgatttctgatatcattcgttgctccggatggtccactgcctgattgcatctgaacatgatttggcaaccaaacaccattcatatgttttccatatgcatgctgcttgtacaattccccttttcttgcatcactttgaacattagctcctattaactcaactgatgacctaatcaggttcttcaagtacttgtccaaaccgttattcagaaggtcagcacaatccaatgtgacaccagctaggcccagtgactctgctgttttctccatccgccgatgcaatgcctctgtatttaacaattcacgatgctcacaacagctggtacagtgatcctcacctgcactaattagtggtggtggtaatttccttgccccgcccacactcgctgaacaaaaaggaattccaagtggtgcccgtacagggctattcgatgcttctgcagaatgatccgagacattgctcatgcttcttctcaacttgattatgtttccagttggtgactgctccacacgttggtgctttgccaatggctctgcagattcatgttgaaaatgcactgatctcttgaggtcagaagaacttagggtgccattctctggtactgccgcaccaccgtgagtaatctggctgtgattggcagaagcatctaccctacaactcaggcccgtgcttttcatccgatcttttgactgatgatcttgcattgtgctcatatgccttgacccctgcatctgtaataacctgatgtccccattgcaagaattcaatgcttcgccgggctgacaaaccttcttcactgttgctcccacagacctcccaacatctggtgctggtgttggaggtggacacttcgcatggtaggcgttgtagagaactgagcgtatcagctgattatgcactcggaggttctctctccccaatgtttggaggcacaccttgtcgaaatccgccttgctgagcctattcgacaggtagcccttcaagtagctgaagtacctccttgacctgtcaggaccaagcctcttctccagctgaagcttcacctcgcggagatcgatacggccattctgctgctgcgcctgcggctgcggtggaggagctgatggctgctgctgctgctgctgcggtgcagcgagcggccacgcctcctccctcaccatgtccataaaatcaccaccccggcgaaccccaatatcggattcagagcacagaaaccacgaatcggtgacagcgcgccgcaccaacccagctcggatcaaaccactatggcctccgtcgcctcctgcagagcgcgagcccgtagcccaattcccagctcgccagccatggaggcgatctcatctccgccggaaccacaccaatcgccgcggaagcaaccacccgccccgggagcggtgcggctggcccgaatcaagcatccagggcggcgagtcgtcgggcgggagccaaattggattacccacccaaaccctagcgcaatgggggcatgatcccgaccccggcgagctccgccccgggcccgcgccgcctggatctccggcgaggagggcgaccaaccgcctcccactccacgaccgaatcgaatccgagaaaaacagcaagaattggagctgacctcgccgaggggggcagcaattgggattggcggaatcggattggaggacgccgccgccgccgcgaggaattccgcttctgctgctgctgctgctcccccgcgcgcgccggagtgcgcggattgctgctgctgctgctggtgggggaggtgggagatgggttcttgcttccgtttggtttgcttctctcttctcttcgtgttcgtcttggcttgggctggctggctgtctctcgcttcgtgtttttttttttttggtttggagtttttttttttttggttgggagggttttttttttgggccgttgaattggatttgatcgcggaggcgacccgagagggcgggagggggggggggggggtgcaccgcagcgaagaggggagagccttttggctcccggcctgtctctcctcctctttgcggtatgttgtgtgccagtgtgcgtgtattggtcagtgattagttgctgatctgcttctgcttgtgattattcaatttcgttgtttttgactttttttcaaagttaaaccacttaagtttgtagaaaaaacagtaaaattttcaacggaagataaatgtattatgaaaatatattcaattattaatttaatgaaactaatttgatattgtaaatattactatatttgtctacaaacttagaatagtttgaccttgaccaaagtcaaaccgacttataatctgaaacggagggagtactcatttaaaatatactccctccggtttcataattcttgatgttttggacaaggttaaggtcaaatttttgtaactttgattatcaataactttaaaagtatttagtttaaaaaaactagaacaatatatatagatttgtctttcaaagtattatgagaaaagtaagcatgcatttatttattgtgtatattataatagaaaaataaagtcaaacatatattttggagaccgtatcattgtccaaaacgttaagaattatggaaccgatgagagtaactatttttacaattaatattttatacaaaatataagtattatatgatgcattggatttaatgcacagtagtccaaacatttttagccctagggggagagtaagcaattcaaaattttaccattgtgatgattaaaagagaatattctctcttatatttatttttttatccaacaacatagaaatatatttataggagtgtttaggaacgaagggaatacttgtcacttcaaatacttgtaaccagtaatcaagttgtttcaactttcatcactgataatttttaaatggtcaaattaagatggacgaaagcttaatgtttatatttaaaatgcaacataatttgatataatgcaccttttctaaagtatttatatattgtttgaataaaaatgataaacaatcaaaattcaaatataaataatggttggaacaattatttaggaagtgaggggtatatcttatgcgcaatgcagtataagccgatacaagttttgatgcacttgctgtagctataccaccgaacacacccgggtatataactatatgatcatttctgattctgaatgggagcatgaactgcaccggatagaatttacatttcagaacagtaaaattgtttggagtatatgtacatgcggtacatgtatgttatggtaaacgtaattttattgtttgactaactgtatatcttttaatcaaagttgtaaaaggagatacagtattatctaggagtaagtacgactcacgtactaatgtactgctgtactccatcgcgtttatttaaaaggagtctaaataagtccatcgcgtttaaaagaagtctaaataagtccatcgcgtttaaaaggagatacagtattatttaaaagaagtctaaataagcccatcgcgtttcctcttaaggttaaaggttagaaattgatctgttaaacggaattttgtatcacaagtcatggtggatccggataacaacatatcatacaactccatattgaagttaacattattctcaaccaggcaaattttggctattaatgtttatgaaaatggaacaagcacgagaaagaaaagagataatcacataattagtctaaccataatttaatttggttcgacagaaatttgtggcaattcattttacaaccgcgttttcatatcaacttggaaaattaatcaaaacacggcgatctggagctaactctaaatagctgacgttgataatgtccagcttcgctaaacaccagatacttcattttctcctactgcaataacagctaccctgaagcatcaaggtgacttcacacttctgcatccatctccatcaagaaaaaggtgttcaaaccaaagtacaagcacaggtaaattatggatccaaacaagtcctggttttaaccaagctcagaatgtttatacctcatatgcacgttcgtaggacaggtgactacgttttgtaggtgtactattttacttgatattagaatggaaaaggtgccgatcaaaaaagagatacagtattgatttttattttacaacccaatgagatgtttctcacttcaaacatgcatatacagggtattaataccgacccgtccccttacgttatgtagatatcaaaacgtaaatcaattttgaaattcctcagttcagatatgcatgccaaaaaacaacaaagatttgaatagaatggaataaacgttttgacactccttgttgccaatgtcccttatgcatatgatataatagtctacctacaacaaaagaacatgccaaggtcagtacaaagcaagtaaacaaaattttagcgaaatgtgcggtgaaaaaatacatgtacatgcccaaaaggccaaaagtgcagagtttacagcatcacttcattcacaactgcaagcaaataaaacaataatgcgcactatttggcatccccagatagtatgcagatgccattttaagttagcctcgagtctcccctaggccctaacccctgattttgataccctgaaggggaaaagactgaagggtaggtaacccatgaacatgcaccattccttgctgtttgagattggtgcaaaatgccccccatatatctctagattgcagatttaactccaataggagacacttgatgatagcgcaacagctttcttcactgttagcatttccaaatattctctgtctccttcaaacattacaaacgctaaaatttcaaaaatttgcaggtactggactaccaattatgcatgaaaatcacattaaaaggaaaaagtcaggcatggttttaaatttccgaatctcaaagcacactctacagtacagatagagagagtacccaccagctcaagcacaagagctttttccttgttaatataacctcctcacaaaaaaaactggtctgcttgccgtcaaattctgggtgtttatgtatatgctactgaccacagaccactccaaagccggacacttgaactggtctagatatcacaattacaatgcatactctggcaatctggcacgtcacctaagaatttctataaataatggcaggcttccacaagaaaacagtacggagatgattagattaaaaaaaggattctcgtcaatataatatgggctatgcatggtacatgcctattttctatgtaaactatgttgaaaactttatgcaggaccatcatacgtcttctagtctgcatgcaatactatgtagacattttttacataggaccatactactagaagaatgccgcttacttgcctgcacagaaatttactaatctatgttcacaactcaaagacaggaccaagtctgatactttagtagaaatgttacctggacaaatatccactaaggactagctgattgagtcctccgggacacttgaatcctgaagaacacgatcaggatccagctgaccactgtaatagctagatgggacagcagacagttccaactttccagtccactcctcaccaggcttcaaagtaatcggcttttctatagcagctgcctccacacagaccatgcgtttatattcgtcatccccaaagtctgacatagccttagccttcttgtcccaagggttccaaacaactacaaccaggaaataaccaacacaatccatttttttttcatttattataacaaagatagtttattatggttgtaacttgtaagcaaataaagaccatcattgactgtaccagcatcaggaaggccacctttcctcacaacaaatgttcttttcttctcatgatcaataatggcaatttttgacggtgtgcccagatatattctgtccaactgtacaataagtttgcatttgcttccttagttagaatgcaaagaaaaatgaaggatagtgtaaggttcaaatgttttgttaacgcacttcagattcaaaaacaattgcatccccttgttcagtgtatcgatttctctcttgtaagttgtctaggtaatccagagtttccaggccttctactcgcacctcgctgaaatattagcataaagttatgcacaatgaagaaattgtttctgtatgtctatggaaatacatttgaaatggaaaaggaattcttcattgtggataaacatacagaaacattttccattaattaagcccacattttagacaaacatattaggtggataataaacatgatcacttccaatactgcactgtgcctttgaaatgaatttttcagaactgatgggctttgtcgagagttaaacaagtgtacctgatatcagatattgaaaagtatgtgtgatatgcaaatgtaaatgagaatggctttccatctgcattggtatttcttatacgtgaagtcagcatcagatctccaccaggtccaagtgcaactctcagacggaactcgtaactgaaataaaggatttgcttttactgatccatgtgaacagctaccttgtcttctactaaaacaattatatgataagaaatagagggaaaaaaactttcaattatcttacaatggtaattaatttactattaacatgtaattatttagtatatgcccacctatgtggccagatctttagatcttcttcagtatgcgtaaggattaaatcgacgtaagctttattagaagttggtactggaaatggtggtggatcattttcaacactccaggtcctgttccttgcaaagccatgtgggtccagatttccgaagttggaaaactagaatacgaagtactgagcaaaattaaaatttgagaaagcggaagagattacgagcaaaaaaaaaatgcaggaaaggaaaagcacggacctgaggaaaagcagatggtatccctncacgtatagcttnttgaggtttgaaaatagcctgagagaacacaggcatcagccaagcaactcttaggcaattaaagaaatacatggnataaaaaaatccagtaagattcataatcaaattttattgccatgtcgaggtcaaatgagtagcagggatgttgtaatacaatctttgtcacatcattaccacaaaaacatagggtggacgataacaaagaggtacatggtttatgagaataggtatgcatgtctggatgataatgaaattaagggtaaggatcatattctaccagttgaattagcctagtatcagtctctcagacaggcttatggtacagccaaaacaatgatggaagaattttagaggcactgagatgtgcccaattgcccatactaaagataggaaataatatcaccttattactaacaaaaagcagctcctctccatgctcatctttccatgatgtgacatggccgccatacaggtacacctgaaagcagcaagagtagaaatactaaataaccatatgtttggactttggaacaggatacatacaagaaaaaagaaataagtcctatgtagccaggacagaagcaaagaactagatatatataaagagatgagtcacaaaaatgcacatgtggagttctaatgagcttattatgctgattagcttttggggcatgtccttctgatgcccatccactaactatgtttctgataatcaataactattcagaatgatataatttctagtaattcatattcttgatacccaaataaaataaatatgttcagtggggatatctcctattgttcccataaaaaaatcgatagatagatgtattacaatatctttgaccaatagatagatgtactatagtatcttcattttaaactcaagaatgaatagtttagcttactgttattttgtcaaaatcaatgtggaagtcttggcattgagcttccaatagtcagaccttatgcaatagcactatagcatatatgcccatgatttacttagctccatatgccttcttggtatacatctgattcaacaaacaacatgggcttcttgttatacatctaattcgccaaaaaacatggggctggcctagttaatgtcaacaagcgaacatccaacatccaaattgtaggtgaagcaagttttaggatgagttctggaaagtctaagtgggataataggtatcggatgaatataggaggatatttcctcagtaaggccgactagttgagtcacaagaagaccaggaccagtagcaaacatgaccagttagacaccggcgtatcgtttctccatcaactcaaaccatcctctggcgttctcacctctcttctaccagtgttgatccatgagcttctatccgtattggactgaaaataataccatggcaacagcacaaatggtggccctgctactcatcatcagagatagcataaagcaaagtatgcaactggaggaaaaatgaaagaggctcctcaagtgacgtgatgaatggtagcatgggctccatcccaccagtttggcctgataacatccataatttctatggaatttgcgtcaaaaattatttctatggaatacggataatacgattttggaatcttgtactaagcgtacaccaaacaacatagtagctagatatttgacccacaaatccagaagctacaataaaacgcccatgatatccataacatcagccaaagaaacaactcgcttgccaaaatcgctatgctaagatcgagcaggctgtgtcactatcatttttatatacctcctcaggtaaaattccatcatttattgtctcctaaaaggccaagtgcatgaggtcccacaatccactcttcagactctttagtctttagcagctgagataatcatgaaaaaacctatctttcttgggtctaccattttaggccaaaagagcactctcaggctgtaaccaatatgaggcatccgcgtacccaacaacaagaagtgttgattataaagggtcactagcaagagtatgaagattttcttatgttgctttttaagttgactaaaaaaaacattttattgcaactgaagtgtataccccctccctgctaacctggattttcctcagaccccagatatgagtaaattacccctctataaagagaatgttcaccaccctcatgtgttcaggggttatagaagcaccattgtacactgtattgagccatttttataatcctatttgttactcccaccatttagtttataagaaacgcacataattcattgtatctgttgatcaacgggtagttgaaatatttatatgtctatggataagacagtggtaccaacagnatcatcatgttctaaagtacttccacgtttcgcacaatcaaatatgttgcaggggaaactagaggtccaaggtcaagttttgacaattgcgccnttacaaannaaaataaatanatggatgatgtatttccaaccacaactcgtcaatggaggcaaagtgagaaggcaaatactctccactctgaatgcaagagacccagactgatttcagaacaccgatctgtcgcctacaacgagtcgaaccacaagcttcccggcaatcaaaccactcctatctctcacccaaaaaaaaaaaaaaaacactgcaagagtagtacttgagcatggtaagcgatgggaacagcagttgagcaactacaagcagcgccatggatctgcggcgagatctgacagctgaatcgagagagtggagggggcagtactagtcttacctcggcagagctgcctcggacctcccggaggacgaccttgtcgagcccgttcacgcccttgcaggtcaccaccggccccttctgctgcggctgcgcggcggcggcggcgccctcctcgcctgcccctccggccgccgacgccgacgccgccgacgacatccccgcctgagcagtggaggtggagatggagatctctcctggggaatttcgcgtcactgctcgctctggggacttaaataattattctcgagatgccttttcctgatcgcgattttttcccctcctcctcccaaactccacaattaaaaaacaaaaaacgcaagctttagtctcaaaaacgcaagctttactttctcctagaaacgcatgcttgcgacgcggggaattagcgttgctttaaccgaagcaaaaaaaatattcctcatcgagaagcagcagcagcagcgtgtgaggtgtgagtgagcgagtgagagtttatacgtgtctcgctcgaagaatttggcgagatttggaggaaaaggatttgattgggttttgctttgctgttgcgttctgatgcgctaaccgctaaaggcgataaaaaaccttggcgtttcttcgacgcattttgtcggtgtacaagcctttttggtggtttccatgctgtacaatcgcaacctgctggtttcccatgtagcatatgctgtgaacatcagggatacacccccactgatcgcttgttgtatatgcagaattaacctgtattcagataaagaaatgtcttgcaaagtaattaactgatttcagataaggtgccggttgcctgaatttggctttggtgttggaaggacataaaggaaagccgaatggtacgtttgatttggattattgaacggactattaaagcggattatcgatttgatttagaaattttaagaaataaacatgatgaatagtttaaagtggtccaagtaatacagtagaaaatgttttttagaatgtatttttttcaagcatgaaattaatagttaaataatatgatgaacaagtaaaaaaaagtatcatatgcacataaatctttttgtgtgcacaccacctaacaaatttcactaaaaattctagaaaaaatatatatctataattttagtagtattacatatatgtataaagtttcatcttcaaaatcattatatttagtgagtaaaaaaaacaaaattcagatacatttatactcttaaaattgtcagaattatcatctttttattaacgttaaaatataataaatttgaggctaagtatttacacataggtgtagtactggaagtacataaataattgttttaaatttttgataaaatttattagttgatgtgtctgatgtgtacccgagaaagattctgtgagtaggattacaaataaagcatatatagctcttttccccctgtcttgtaaattagttatgtaagacgatttagcacactagctttgaccagcaagctgtgtgcagtcataggatcatcgattgttccaacatcggatgataataacagcgtgttacttccagtaatctatatactccatctggctaattaagacagatagatgggttttgatccagtgatgttagcggtgactgacgcgggcgcgccacgccgccgtcaggtgaccgatcgatcgattgctcgtacgtcgccgtcgtcatgatgcgccatgggtcaatcactgcctgccatcatggtggacggccggcgccggcgacggcgacccgtagatctcgattgaccgattagccggacaattagtgcagtattcagatccataagcccatttagaattttcgcttatatttatacttatcagccaaaatttaaatttaaatttttaattttaaaataattttaatgttttttcatcataatttatttttcagcaaattttatttttcgtttgcgatacgccgtttgtcttattcctcgaataagccagataatggggctgtttgtagggggatgaacagtatttcgggcattggttccagcttaaagtgattatctaattactgcaattccttgtgcaatctgactgctgctcccggtatatggcagacgattattgcacggataacgctgaagttttttttttaagcaaaggataaagctgaagtagtcgagtgggctgttggcctagggccaatgggcatctggtcaggccaccagaagatgggaattgggccgatcctgaaacataatgggcctaggaggccataattactttttgggccacttaaatctcatcgtttggcccattcggacttcggagtgtactccgctgccgtgggcgggccgcagggaagcactgtgaacctgtttgtttgggagaaaagtccggagatggtgagaagtcgttgatgagcattccgctggtgaacgccaaaagctaagaaattccgattccaagctgctagttcaggttttttggattttgtagctagaaattcttaaaatatgaacggaaatctgattgagttcctccatgagatttatttggaattgtattttcaggtcaaaccaaagtcgcaacaaagttatcgatccagggcagctattttctgcaactttgaacttgccaaatttcaatacaaaaacggatgagatggaagaccagtactgaaa

SEQ ID NO: 26476 - DNA, 1790 bp, Oryza sativa
tggttgcatgttacatacatttgctacaatgcttttgttatgaatattgtgttatgcatcctttctcagttaatatgcttggaagaggttctccaaggttgaccatgcttttagcgaaagctgcacaaaagaagaactctctgaaaggtcgtcctacaaaaaagcatggaggttctccaataggtatgcaattatagaacatgtgaaattcatgtttgaaattattaaatgtagattatacatcaattcttatcttgtgtagaaaaaacaagagcctcttggaacccagccctagagaagattcttgttgagttattgcatgagcacaacactcctgagtataggggtcagaatggatggacttcagaagcttggaacaaaatcgtgaaggaattccatgagaaggacatatatgtctgcttaacaaagtcccaaatctaagaaaaggagaaagagctaaaaagagaatataggatgctgaaagaggctagaaaacaaagtggagcttcatggaataaccagagatgcatcattgaggctgagcctgctatatggaacaatataatcatcgtaagattatttctgaccattacttaattttgtagttaattacattatgcatcatttagtgttttccttttattgtgtagtcatttcctaaagccaagaagtttcgcaccaaatctttccctctatttgaggccttggagaactttacgatggttagttctatcacaagctataatccttgttttcaatatcacaagttataatcatgccttcttgcttaccctttcctgtactcaattttcttgtgtaggacatactgcagaaggaacctacaatttcacctcaattgagccattgcaacatccaatcattactcaaattgagagtgatcaagatgatctcggtaacactgagattatctttccagattatgaggacactttggcttatcaagtacaagatgatgcagatgcaactgaagatgataatgcaaatgctgaaaggcttaaagagatgccgcaaagaagggttgttgctgtaccaagaaacaaagaagaaaaagaacccaagaggcaaaaaaagagtgttggcgtagaaggacttatggaaaggtaccttgatatgaggaccaaacaaactgaagatgaggctgtacaattagcaagagaaaaggaggctcatttagcaagagaaaaggaaattaatgatttttcaatcaagaggtgcatatctgttctgaattcgatggatgtgacaaaggcaaaaaaggtcaaagcatataccgtcttcaagaatgcagagaacagagagatttttgtgagtgcttgtgatgaggatccagaatctgccttgagttggttaagaagtgagatggcttgataggtacggcttctcttccatataaatcttttttggtctgctaagcgagtaagatgggcttcactctgtcttgtgtgactctctgttgttagttacctgcatgttgtttagggctgtaaaccatatacttcatcctagcaacaataggtgcaagttatatactgtacccttcaattgatttccttgtctttgattcaccaagaactagttctacctgaagacaaagattggtactgtatgatagatatgcatgttttatggttctagattttttgagaactcatgttcaagtcttttctgcattggccatatatttatctgttatacatgatttctgcatcttctgaaaattcaatcatttcaagttttgtttccttttatctgtttgtgagataggaaag

SEQ ID NO: 26477 - DNA, 52488 bp, Oryza sativa
  unsure (1)..(52488): unsure at all n locations
tttttttctttgtacccatcactgtttttcctgtgcttctaatctgcaatactgtcccagcaagctttgaagcgttgttgctcagattagctgctcattacagccattgtaaatgaaagctttgacgtaattcaggtctgattacagccgactgatagaacaaaagcaggtctgctcggaggagcagccacgggatttatcatattttgatagctaaaatccctggctaaaacgaacatggggtttaagagagagcaaggaatttcaacccccatagggattgagtgacatgggagggattcactcaatccctccctggatatattccacttggagattaaatcccaaggaaccgaacaaggcctcaagcgggacaagctgcttgagtagcacaagttcactcaaatagaactttaccacttgaatagtgttttcccaatcgctagagtcttttccgagttggatacttagaattctcaagacctcctttcccttagtgttttgaccgaatgaggagaacggtgtttaccccctgctacaacacaccggactgggggatttttgccattgcataaagggattcattccataatgctcaccacacatgtggagagggttgggaagttggcgctgtgaagtgggacgacaatcatcgacgacgaggtgaggggcgtgatgctaacccgccgattcacgtccacccaccgcatgggactgtgagaggcaacaaaatgctaggcgttggctggcggctagttctggggtgaactacaagctaggggccaatgatgaaagggcaaagctgcagacagcagaccataggaacacactcatcgagttgcatcggttgcaggaaccgtgagcccaagccaaccgttagtggctcttgtgtgcatcataggcctagtgcgcaaaggctggtaggatggtgacatcgtggttttggggccagcttattgacttaaccggtttaactatggtcaacgcgccatgtcaaccgaaaccaccttcaaaacaacaggggaattgttttgcacttgttttaatacttatggaggcaataaacccggttttatatcatagggatgcgaattggattcgactgatagttgagagagccaaatagactttttcctaaacctagctgggtggcccgcgcaattgcgcggctagcaaaaaaaatcatatatttttttaagtatgattttacttgaaatttattaaatagctatctcattcttaagactatgaaagaccaaaccttatcatcatcatgtttctaattatatagtttataaaaatcacactagttgctaccccttatgtcatctcctttatttgcttgctcgatctatcactatttctattcattcttctgggaacttttaaaaattggattttacagtttttagagtttattgtcacgttgggtttcatttttataatttctagatgtctcgtcaaacgttgctattatactcctctacggctcgtccactatctcttctctttattgtcattaattgagattttaaaaatcgaacataattatagtttgggttcatttttactttctagaagtcccgccaaactgtcagcggttttgctattgtactcctctacgactcgcccgctgcctcccttctttattgtcattgggggtttaaaatcgaacatgattatcattggtttttttactgtttagaagttccgaacctttaaaaattggacttatagtttcattttttacaatttttagaagtcccatcaaacgatgccactatgcccctctgcagcccatccgccacctactctttatgtcattgtgattctagaaatcgaacataactatcggtgcaattcattttttattttctagaagtcctgtcaaccgtcggaggctctgtagctatactcttatataccccgtccgctgcttctcctttttattgtcattgagattttaaaaatcgaaaatgattatcaatgtggttttttttttactttctagaagtcccggcaaccgccttacttgtttgcttcacggcatgcccgacgtctccttttaatcattattaggattctatttggtgttttattaacagtttttatatgccgtatcaaccgccaccaactctattcttttataggcctgttacttaatttatctcgtcatgtgttttagatagtcttttctttcaatagtctttatttttatcacaatttttagttatttataaattttattcctaattgaattttttttttctaatttcagagtttatttttttaaaaaaaattagttaatactgtattgtgttcttttaatgtttttattttttattttcaatttaagttgttttaaaattgtattcctacttgaactctgttttattttttctaattttagatattattatatttttatttgaaattttaattaatctcgtattgggttcttatatggattattctttcaatattacttattttaaattccgaatttcatctaattttaaattgtattcctacttgaactcttctttattttcttttgctaattttggatttatttttatttttattccgaattttaattaatcttatatggactcttcttttaatattccttatttttaattccgaatttcagctaattgtaaattgtattcctacttggactctcgtttccttttctaattttggattttattttatttttatttcgaattttgattaatctcatattgggtttttatatggaaatttctttcaatattggttatttttaattccgaattttagctatttttagattttatttctatttggactcgccttttctttttttttctttttctccgattaatgtgggaatttctagcccccacagcagacgtggtggctcctttcaaagctgttttaataatatataatagatagataaaataaaaggtgccgctgctctgggtttatttgggctgaaacatagccaactggacttaacttaagtaggctgacgtcggtatgttttgggctctattgggccgcgctttctattgggctgtgaacagtgggcctatggcaggttgcctttccctaccatttattcaatctcaatcatgacaccgaatcaattgtttcacatttttatttatcctacaaatttaatctattcattgctcatccaagaaaaaaaatgactgacaaatattaaacctgaaaattttaatggacatgcctaatcaaaacacacaagtcaaccacattaaagaacaaaaacctgttgttaattctttcctataggtgctatacatcaaaaacagggtgagtgatattttgaaaggagaaaggagagggtgagtgatattaattttgcagctctaaccacatctaatcatggttgattaatcatctctatgttccaactccctccccagaagccattttcagctacttcttgttgttccccctaaacctgctcttcaccaccctcgtcgctgtcgttgtcacctccttcagcttctttctggctactctctctgtctaaattcggggctttgatcggcagaggctcaacgtcatcaggaggatcatagtttgggtcagctagaaacgtgagcgccgtcaccacgtcgctgatcagaggccggctgctcgcctcttcttgcaagcacatcgatgagattgccagtgcctggtacagccctttcagtgggaacttcatgtccagcagtggatcagccatcttcacgaacttcttcttgtccctgaacagtggcgctgcctgcatttcagacatacagtataagatcaccatcttgattctgaactgaacgagaaattttcattgactgaattctgaatctctgatctttttttcacgaacacgtcaatatattagaaaaagagcagcatacaactgtggcacactgaggcgaatataaaggaatgttacccagtgaacaagaatctgctcgcgagtgggcttggtggtgtcgatggctcggcggccggtgatgatctcgaggaggacgacgccgaagctgtagatgtcggacatcttggtgagcttgccggtcatggcgtactcgggggcgcagtagccgtacgtgcccatcaccctggtggtgacgtggctcttgtcgccgacggggcccagcttcgccagcccgaaatccgacagcttcgcgttgaacccgccgtcgaggaggatgttggacgccttgagatcccggtagatcaccggcgggttggctatctcgtgcaggtactccatccctctcgccgcgcccaccgcgatcttcatccgcgtgtgccatgacagcggcgacgagttcggtgtcagatctgcacaaaaattcagaacaaaaaaaatcatgaactttagctcaaacccgtctgcattttgctatgcagatgtaatgatagttactatacctaggagatgatcttgcaatgaaccgagtggcatgtactcgtagaccaggattctctggtcgcactcggtgctgtaaccgagcaaggtgacgaggttggggtgatggagaaggctaagcatcagcacctcgacgaggaactcgcggttcccctgcaatccatccttgtccagctgcttaaccgctatgacctgtatgaacatggacacaaattcacatcagatacatgctactgatgcattcatcagtcatcactgaatctttcagggtgtcaggttgatgaagagactgaggaaggacagttcacagttaaattccgttcaaaaaaaaaaacagttcacagttaaatggtgcttacttccttggtgtctgggatgaatcctttgtagactctcccgaatccaccttcaccaagcaggttttccgggctgaaagagccggttgcatcggccagctgacggaacgtgaatactctgcttggaatgttgtggttgccgatccgtagtatctctcctgccgctgccctgttcctggtactatctgcacgaacaaagtttaggatcttgttagcttatcagccgtaaccaaattttaaatttcgacactccaattttagaattgattttgaagtttcttttttcaatgtagatttttttttcaaccttacctaacacagttaataatacaaatataaaggttttactcataaattatttttagttgctttcctttatttttctctgacttataagtcatagctcaaaggtgaaactaggtcaagagcatggtaattttcagatgaattatacatatcacattttcgcctttataagatataaaaggagatatttttgctatttcggcacgaagaaatcaggaaaagaaaaaagggaagaaatggtagtatattttattactctcgagggagatctccttgacgaggctggccaagccggtcggttgggtcttgcccttcttcttcttccaattcttcttggtcccccacttgttcttctccagctccgggctcgtcgcggcgctcttcctcttcttcatcgtctccagcgtcagcggctcctccgcctcccgcgcggccttgccgaagacgccgcgcaccacccacttccgcttcttcctcttcttcgcgtccgacgccgccgtgtcctgcgccgacgtcgtcgcccccccgccgccgccgcagaagccgcggatccacgagcagcagctggcgcagccgccgcgcacccaggagcagcagcagcacgacctgctcgccgagctcagcagccccatcgccggatcgacgcgagagtgggcgagcaccctcgtgccgacccccgcgcgccgccgccgacgccgacgacgacgccgcggggtgacgatctcctcccgcggcgagaagaacacggcatgcaaggcgctggaaaaataaaaatgatgttctatttttttttctctgtggatgggaatgagcctgccagactctgtttttctctggattgataaaaatggaaggcctgaagccaagtgcgtctctgtgtttttaatggttgttaattttagcaacactgttatttccattccctaatttttcgcattaaaaattggtgttagtttctttgccatggttgatggttagccgaggatgtttgcatgatagggattaaaacattggaaaacagtctaaaccatttccataatcatatttttctcgaaaataaaatcaaaaacagtaaaattggaaacgaaaacaatatcgaaaatattgaaaaattggaaaaatacggaatgaaacatgacggtacatattggaaaacggtagcaaatacagaaacattaaaccataaaaacgtatatttaactttgcataactatgtaatatatataaataattcaaatttatactatataaattataaattaactccattttagacatgcattcaagttatgtatttgattgaatgatcaatcaatctaaattgtaggtcaagtagagacatactctataaatatataaatatatagacatatttagaagtacaacaattttaattttcacaaaatcacgctaaatatggaaccatttccattttcaatattatttattatttctattttcgttttggtcgattaccattttcatataactcggccggcagaaagtcagaaacgaacgccgatcggccagaaatttccattacctttttctgtgattttataatccttaagtgtcgcaccccaatctaataccgccgtacaacggcacctgacaggagcatgtcatagggaaaacggcgcgaaccgcttcctacgaaaccgcgatctcggtaccagtcccaggacatagtgctggtacccacggtgacaaatatgaatcatagcaatccttaaaataaatagaggacttatttaccttaacaccaacagcagcagcaacagcagcggaaccaacggtctaacacccaacaccacaggcgacggctgggaaccaggacgaaaccctaatcttcacttcactttatcttctcttcagggcagaggaactatatatatatatatttatatagagcaagggtgagtactttcgtactcagcaagtcacgggaacttaggtggttaatgcaagcttggaagagaggcaaggttgttttgcaaatcttttgtttgaaatcattttgaaaccactaagtgatttatttctttctaagtttgggccgaaaagagacttgcgtctcgattcgactttaagagatgtttttcaacagctcatttagtaatgtaccgacctcccgggtcagatcattacttctcggctcccagagccattccacttgattaatcggctcccagagcctttttcattttctcggactcccagagtccagctgcccagcagcacaacaatccgcttccactcgggaagcctagtctatgatgcccgcagacatcccgaatcacacagattcgtttctgaccactcaggtcgtccatctgccacataggctgattctggttacgattcccacaccacaacaacttttcacaaagcacaggcaaacaaatctacgcaacgggaaccacctcacatccgcccatgaccgtgggcacggctgttcgaacagttagttaacctctgcagaggggtacactttatccacaagatacgaacttattccgaacacccgtcggtatcggaggttcgcaacaaagcctttcccaagccgacccagggatacctcatgccacatagaaggatcaaatcctcacataaacataggccattttaggcgttcacaattcaaactccaaccacctcgatcggtaattcagcaagcttctcgttcttgcattaccaggaacccggtttggctccaaccgaccccgccccggcgttcccaactattggcatgcgaggtttccctgaaccgactagttacttagccagggtgtcccattccaccttgtggttgcactttgattatgttcgatgagtttcccacaggaatcggtccttatatgcgaatacgggacagtgccacataggcacaacccccgcatcgcgagttttcacaattcattttattttcaaacacaccgacaccacatgtcgggttttgaaggcttcacaaacccatttcccaagttttcgacaaacaacggtgtatgtgggatatttggtatacacgcttagagagcacgaataccgaggtaccacaagggtggagcgacaaggaatcagggtagtacgacctacggaaattagtgcgactactgggtaggtccgtcggtttgtcacgcaaaccgaggccaagcaagttaagtgtgtgattctactaatgcaagttgaaaacaaaataataatgaatttccaattataggagcaaatgatcaaagggtgactttccttgctcaaggtcttcacgaagcttcacgaatcttcgagaaatcccacgatcgacaaaaatccggtaaccgcaactatacgcaatcaatcaaaacctaaacaaaagaccaagaaaaggatcctatttagactaaataatagtgccattaaatagatctcaattttacgggaatactggaagtggaacggggttaatcggaattacggatcgggagatatgaattttgggagtttaattggaatttctggacaaggaaatgatttgtcgaaatttttttttgaatgcgggcaatgatttataaattttatagaaaagaatattcttgagaattgacacgtgggaccaacatatggtgagagaggtgaattgggagggagcagatatggacttttggtcactgcatttgggaagggagcaaagatggactttagcttttgggtgggggtactgggctcggcatgagggaatataactggactttggttgattggaccgggggagcagcgcagcccaacggctggcgaggccgagagagggggggggctggctgacggggcgtcagcttgacccggtcaagcccacgtggacagccacgttggatggaggaaagggaggggaggccgggcggccgatctgacggctgccggcgagcggtgcataccggcgagcggcggtaaaccgggaggggcggcgtgcaccggaagcaagcggggatcaaggggagctaattcaacggtgcggatgaaggagaggtggcgctgcagcggctgccgaggcgggcggccgcggcggcgcgccggggaggctcgagagggctcgggggtggtgacggcgccgggaatcggcgagagtccggccggcgacggcgcgcgacggcgcacggcggcggcggaagcagagctacggcggggcggcacaacactgagtggggcgtcgccgggaaaacagagagggggcgcgagaaattacgggaggacgacggcgagctggttagacgagagagaagggccgacgacggcgcgcgactgctcggtggcggacgcagcaccgcgtgtggtacgaggaggaagaagccggtgatgcggaaacagagcgcacggcgagctacgcgagtgcggggacggcgaaaaaggaagctgaggagctcaccgacgggaggaacggtgtcgccggcgaattggggatgggaagggttggaaggctgagggtggcacgcgaccgagcggcggcgcacggcggatgacgccgagccggcgcggtgtcgaggcgtgtgcgccggggaaggagagatggagtgcggcgatgggcggcgcagagctcctcgttgactcctcgtgcgcacgtcggcttcccggcacgcgcgacggcggaggaagggcgacaatggcgcggcggcagagggaagtaaaacgggaagaaaagagggggagctcgggcttgggttttataggtgaggaggagaggtcggtttggaggagggaaaccgaccttggcggtcgagcgctcggctggcgctcggcgggcggtcacgagcgggagcagcgttttcgcgggctgcgcgaaacgtggcgacggcgaggatgcgaaggggcggtggaggcggtggatcgtacggcgggaattgaatcgcgggcgcgggagcatcggcgtggcgcggtcaaggtgggggcacaggcgcggcaggacgttgtcggcgtcctctgcctccgcgcgcaagaagacaagggcgagaggagagaggccgggtttagaagggaaaaagtgagggaggacggtggaaagggaagcctctcccttccgttttgggcggcgggcaggcgaggcgcgtgggagcggcgtccttgccggtcggccatgcgcgcgagaatcggcagcgtggctgggattttgggcggcgtcggcgggagtcaatgagagagagagggagagagagagagagaaagggtgagagagagcgaggaagaaggagagagcgagcgcacacgcgcaacgcacgtgcgagggggaggaggaggagcggctgagaggagatgggccgagggaggcaaaatagactttttcggaggagattgattcgaagagaatttgaacttggaatttgacttagattttggaattgggatctggatgagaggaaggagtagacggaggattcaagatggggttttggatattttggatccggggaagtattttggcgatgattcaaagagagggatagaatttcagagtttgatttggagacttgagtcggaagaggaatttcgaggaggcaatttttgatggtgacgagagggatcaaggacggatttgaattgagatcttggcacaacttagactcgcatacaaagaacggaaattttcgcatataagattttgccgaattagtttttaacgtctcacgaaaagcggagcgttacattaaggtactaggaagtaccatattttctagtataaaatttgatatctctcaatattatttccagtaataggagatatcaaatttacattaaaaatgttggtgcccgttgctacctcttaacgccggtaaaatttctctttgttttttttttttgtcaaggttctgattttgataattgtcaagaactattatccagggattattgcagtagtattgaagaataaaattgtccagaacgcacaaaatcatatatagtactttatcaccagctattttgttttcaaaacatttcattattcattatttgttttgatcactatctcgttgcatgcaacacagcaacggtgtgatcctactagctatgaggcaagccagctaagcctagtactggccggcggcgaagatgctgcactgctggggctcaacccggcacatcgacggcagctgcgccgcgtactgcctcgccctggtcagcctcacgcgggtcatccccggctgctgctgctgctcgccgtagtagccctcctccgacgacccctcgccgtagtacccctgctccgacgacgacccctcgccgccgtagtactccgacgacgacgacgaccagccttgctccaggggcatcggcatgctctcctcgtagctcctcaccatccggcggatggcggcgcagcggcactcgcggctcacgtcctgcagctgctggcagcactgcatccgcaggccgagcgcgcccgggcggcggaacatcggctggaacctctcccggccggtgagctgccggtcgagcacctgccggcacgcgtccagcgggctgtcctgcacctcccgctggcactgcctgtccctgaacctcatctccgactcgctcagctgcgcgccggagatggccaccatggccgccatgagcgccgccgcgaagaagacgaccttgctagccattgatgatcaatcagacaatcactagaagtgtatatgttttttttcctcttttgtttgttggtgatgaactgatgatgagatgatggcgatcggatggggttttatagggtttttgtggccatggttgtgtgcacggtgagcttcgtgtagatcaagtagaagcttgagggtgacatggatcggttggaaaagagcaagagagcaatgctgcaaagagtgaaaaaggtttccaagatttggagcttgcaaaaagatttttttttatttttctcttggtgttgggtaatttctgaagttatgtatgtggcagataacacttttgtgtcacctatttttgtcataaagagcggctttacgtttgcctctgataaaagattaatggatgtatctacactaatgagattgtcctagggataactcttagctctttgtgacgtggtggaaatgtgcagaaaatgtgtgtaactgcgcatgttgcttgttggtagtagttttgtacttttatgggtgactgaaagaaggcaattatctattttaaaaaggccctttaatttgaggaggattggaagcccacggtatatatggctcacagaatattttgaaatggaataagttcatttaaggtcccttaacttgtcaacaaatttgattttcgtccttcaatcgaaaaaccagatacaacgggtccctcaactatcaaaaccagtgcagatgaggtccctcggcggtttggatggtggttttggctgacgtggcgcttacgtggctaatttgactcggtcttcatctgacgtagcattgacgtagcgcttacgtggcaattcgatccgaaaaataataaatctcatgggacccacatgtcagtttcaacaaaagaatgaattaaaaaatggtggggcccacatggccccacatatcattgtcacccctcctcttcttcctcctctctcaccatctctcccctctcctccctccaggcgccacggggccacggggaggtccggcggcggcggccggcgacgtgggagaagggcagtgggcagggcgtcgcggcgggagcgctgggtcttcgctcacggcgtcggcgcggaccccgcgcgggggctcgtggaggagatcggggccgcggcgcgccgcccgtctccgacgagctagagctcgtgcgagcgcagtgccgggagctgcacgactgccgacgagaagcagaggaggttcgaggtgtacaggagcaacgttgagcttgttgagaagttcaactccatgtgcaatggctacaagctggctgacaagaagtacgttcgccgacctgacgaacgaggagttcagagccaagaagatggggttcagacctcatgtcgcaattcctcagagcaatgcctggagagagcagtgatgatattctgccgaagagcgtagattggaggaagaaaggagcagtggtggaagtgaagtaccaagaagattgtggtgtgtgagcaatagcatggtaaagaaagattcaaacctgtaaaaatgttggagattaatcgatggaaatctgggtgttgtgtggatgcaggttcttgctgggcgttctccgccgtggcggcgatagaggggatcaacaagaacggtgagctggtgtcgctgtcggagcaggagctcgtagactgcgacgacgaggccgtggggtgcggcgggtacatgagctgttcgagttcatcgtcggcaaccacggcctcaccagtcaccacggaggcgagctagccgtaccacgccgcgaacagcgcgtgccaagcggcgaagctgaaccagagcgcggtcagcatcgcgggctaccggaacgtgacaccagcagcgagcccgacctggcgagggctgtggcgacgcagccggtgtccgtcaccgtcgacgccggcaacttcatgttccagctctacggcagcggtgtctacacagggccgtgcaccgccgtccgccgacgtcaaccacggcgtcatcgtggtgggctacggcgagtcccccaacactcccgccactgacggcccgcccttcccccgcgtcgtcggccgccgccgccagacctccccgtgaccccgtggcgctggagagaggagaggggagagatggggaaagaggaggtgtgagaatgctacccaccattttttaattcattcaaactgacatgtgggtcccatgagatttattatttttcggatcgaattgccacgtcaatgctacgtcagatgaagaccgagtcaaattagccacgtaagcgccacgtcagccaaaaccgccatccaaaccgtcgagggacctcatctgcactggttttgatagttgagggacccgttgtatctggttttcggttgaaggacgaaaatcggattcgttgacaagttaagggacctcagatgaacttattccttttgaaatctggatcaaaatgtagacttcctggtagccccaacattaccgctatgggccacggatgggcctactgtttgggcccaattgggtctaatattcaggcccaaccgcccaagagcaacgtccatgttgggccggtttaatggtcacatctgccttcagactgctagcaatcggcctggttaaccggtttaacttccatttttttaaaaaaaaaaaaatcctcgtcaactaaaaaaaaagtgactcgtcccagcctcgtgaagtattaccagttcatactttggctgtgctaatcattggcaactccgaaggtgaaatctcgttgtcaaatgacaaaagtgatttaagtgatcaatcattctactcgtgtgtgcaggcagctagcagaaggccaccggccacatgcactgatgcaccatccagtttctttaattcttagcatctctccaagcagcctgcagttagcagagtgtactggggacaaaagaatcggagttagatagcacaggttaattagcttccagaaactggaaaaaagaaacggagcaagtaagctagctagctaactaaaacagttcagttcactgagatgatgagtcgccattgctgctgtttctgaactgtctagtgtctactagttgcccatgtggccatgagagatgagccccccgatgaaagctggtgtttgtttctgcttctgcctacctgctatgccttttctgaacaaaatgataccacttcaactacctaacagtgtgtccactggtccatccatctacgagttgttgcaggcttagccggcgacccggcgtctctcgtgcgtgcggatgattgatcaattccagcgcggcgacgccgactccgccgccggatgttcgatcgatcgcttctcatatcatcgtgtattcgtggtgatcgctgatcagagctctctttcctgttagttgcacatgtgcattccggctctgacgactcaaaatgcatcgtcagctgctttgagttttcagtttgttcgtttctcctttttgttggtgactggtcgtctcgcttgattcaacctagctagctatagctttcaggtgtaaacttgagctggatcggagcactctctgattggattttcagctcgccggttcactgtgttcatttatttcaggatttgaaaaaaaggggatagttagctaggaatggctcagctgacggacaacgtgttgtggactcatcgatcaggcctgtcgcgtgcaatgaacgatacgtaagttaattcagtacataagcgtagagtttgtactttttgcctactactacttcggttctgctcatgattcagggttcaggacatcgtctggatttctacattcaaacaggcaaatataaccagtacttagtgtagacggattctaatcacccagtggacattcacttgtttattatatgtcaactaaatagttataaaaaatttttaattttttttgacaagatagattaatatgtaatatatcattccacaaacatgcaagttgaaatttaatttctataagtcgtaacaaaaacaacaaatttaactgcaaatatacatatactaatttgagttttatttgttatttttcttttacaatttgtagaagttaaattttaagttgcatgttacgtttgtggagtgatatattacatattgatttatcttaccaattttttcataattatttagatgacatgcattaaacagtgcacatccattcgggtgattaaaagagtttccccataataatcctaactctcgttctagaacccaaatattaaacttatagcatatttgtcatttttcactccttaaatggatgttccctcgtttctcgcatgctatctaaatagttatattttttaaataataataataataataataataataataataataataatatagatcaatatgtatatcattctacaacatgtaggtttaagttcaagtcatttttttcataattgtttatacgatataaataaaacaaggggacatctgaacaaaagagaactatctcagaagaaagcagcattttttttaactcccattctagtactgaatcttgaacccaaataggtaaagaggttaaacggcacatttgccatttttttactacattttcacataactaacttatcagaagcgcaggatggtacatgttctccctccgtttcaaaatatttgacaccgttgactttttagcacatatttgaccgttcatcttatttaaaaatttttgtgaaatatgtaaaactatttgtgtacatgaaagtatatttaacaataaatcaaatgatgtgaaaagaataaataattactttaattttttgaataaaacgaatgattaaacacgtactaaaaagtcaactgtatcaaacattttaaaacggagagagtagttaattaaggtgtgaaatggtattgtttcctcgggcattaatctttgtcagttgctacagcctgcaacagtgcacatggcttgaaccgatggttacaggccacagaaaaaaaaaagggaatccaagtactttgtctgatcatcacctctaaagttaatcaacatgacagcatgtggataatctcccacgtcctctcagttgcggttcagaagttcacagcgagaaataaattactcttcaaattgaccaactttgctttagattccatgcaaagcacacgcctacaggatcgatcaagcagcagagacatctcgcactgattttgtcagtacaacgtacaaaaatacgttctcgatcgacgaattcttctcctcatctctttcgctgctgctgctggcctgctgctaacaaccagtaggtgctgcattcttgactcctgcccggcgcccgcgatgatcagaactccacaaccaactgtttccgtagccgattttaaaaaagtttttgcagtacaattggtacttcgttcttggatggcaattagtatctgaatgcgtacctgctacaagaaagattcggcaaagcgaaaacaagaacagctcattgtgccatttgcataatttgcatgcgtgattcttcagaaagtgcagctagcaggtagctaagccagcctaccacatgggggaatagggacaggatgggccaggacggcgccgcgctataaatctcgcgccaattcttgcccgcaaattcagcagcagcagctaccagcaacaagcattctcttctagccttagcctagctagctagctttgttgtctagctctgatcgaggttggtggtgatcatggcgtcgtcgagggtgatcctagcgctgctgctcgcggcggcggcggtgatggcgtcgtcggcgcagctggacgagaagttctacagcaattcgtgccccagcgtggaggccgtcgtccggaaggagatggtgcgcgcgctcggcgccgcgcccagcctcgccggcccgctcctcaggatgcacttccacgactgcttcgtcagggtaagctgtgcatgcagtgtccattctccattgcgtcgcggctgctggtgtatagtagtagtgttcgatcaggtcgcctgacaacctcgtcgccggccggcgtcgactgtctgtgcatgcagggttgcgacggctcggtgctgctcgactcggccgggaacagcacggcggagaaggacgcgacgccgaaccagacgctgcgcgggttcggcttcgtcgagagggtgaaggccgccgtggagaaggcatgcccgggcaccgtctcctgcgccgacgtgctcgcgctcatggccagggacgccgtgtggctggtgagtagagtatagtacactgcaatgcacgcatgacacgtgtactctgacacagtttgcagaagcaaaaagttctcacctcgacttgtcgtcgtcgttgtcttctcttccagagcaagggcccgttctgggcggtgcctctcggccgccgcgacggcagggtgtccatcgccaacgagaccgaccagctgccgcctcccaccgccaacttcaccgagctcacccagatgttcgccgccaagaacctcgacctcaaggacctcgtcgtcctctccggtaaccatcaccattgccaccacacaaactctcttcacacacgtacacacatccatccatggtgtctgacacgatccattgtcgatgttgatcagctgggcacacgatcgggacgtcgcactgcttctccttcactgacaggctgtacaacttcaccggcctggacaacgcccacgacatcgacccgacgctggagctgcagtacatggcgaggctgaggagcaagtgcacgagcctccaagacaacacgacgctggtggagatggacccggggagcttcaagacgttcgacctggggtacttcaagaacgtggccaagcggcgggggctcttccactccgacggcgagctgctcaccaacggcttcacccgcgcctacgtgcagcgccacgccggcggcggctacaaggacgagttcttcgccgacttcgccgcctccatggtcaagatgggcggcgtcgaagtgctcaccggcagccagggcgagatcaggaagaagtgcaacgtggttaactaatcatctctcttaattatcgtcatatatcatcagctgctcgccgagactgtgattatggatttcagcttttgattccggccgtgaccatcttataattaatttccatgtagatcattatcgtaagatttacctgtcccttctttttttttcttgatttcaatcacttcattaattaattgttttgtttatatagcgagccatgcatgtatgtaacaaagttttctccaagtacgtgctcatcatgatcatatgaataaacttcattttttttcaccttgcattattatacatttattattttttatcactcattggtgcctctatctctttgtcagacagttactcagttatgatgccactgtcgtcattttaacatgaaaactagtaaaccaaaatgagtcattactaaagctgtaacacacagcaacgcatcacatgggttgcacatctgatcattcgcaactgacaactataattggaggaacaatctggtcaagaatggactcatctatcatgcgtgccatgacaagtgttccagggcaatttgataattgatatgctgttcagtactgtcagcagagtcccacaaacctctctggcgccctgcattttgttaaccccattgtgcctgcagctctctggcctgaatgtctgtccaaactgaacgacagaaacatttcttaagtagctttggtcacatggcatgcacttacgaaaatgcaattgattattgctgatcatgatggcatctatgacaccaaatcaaattaaggccggtacgaacattggctattattatacgcgaccggcctgtatagtatgagatgggtactgatcagtcctgacaccctgagtgctatctgcgatctatatttccgtattgtaacttcatcaagcagttaataattcggcaaatttagcatctcccacgtttaactgagcactggcacacgaacctacacatatgccatttacgcgggccgacctattcaaaggaggtatcaaaatttataattataaaaaaaattatatctctcgatatctctctgggacagtaaatttttttcgaaatgatttatatacgcatgttcaagggtccttacttttatgctcggctgctcagggaccttgaaattggaagaattaatcttaacaacagattagaacgacaaaaccgttgatggaagagctgctaacgtgttgtaaaccaatacgcttattagtggatcattggatctgttccttgtttttcgcacaacagtagaggcgtaagaagatgtagaacacatatgtccttttacttgtcctcgagaatattgcagaaatagacaattgacatagagatatagaatagaactctctcttattagatttgttctcaagactatctaaaaaattgctggaaaaaactttcaaatctaactatagtataattataatataatttccactataactatagtatgacatgtatataagtattaaaataatatatgcaactttatatctaacttatatagagattacaatatagttacactatagttataatattacactacaactatactatagttacatttaaaagtttttttgcccaaaaaacttgggacggttttttagcaattccgtttgttctcgtgtacaatcaaccatcaatgtctcatcctactctctacatataatatacaagggtcttaataggagataaatattactatctttactcggctttaaattggtccagaagaaacgaactttatctccacaggagatattattttccaactttgaacacacacctttcaacataaaatccccacttgagctaactagcttgtccatctaggcccaatatggttgggcctgggtgacccaattcggcctgtctctcccaactaaaagaaacgtacggcctcatctgatacaacccaactcctcaaaggccccaacgctttccctcgcgaaaacgccgcgccaccgaacaccagcagcaagacgcgtccgcgaacgcgcgccctgggccgaacggttgccgcactacagaatttttttcggttttagatcttttggccgtactttttttcatctgggtcccttgccgtcctctattagggcggcaagggatccagatgaaaaagtacggccgcaagctctttatgggcggccaaaattgtaattagccccttgccgccctctgtatgggcggtaagggcctaatcgcaattttggccgacggcggcagacggcgcggtcgacccaccgtctgccacgtcagcttgccgcccaccattagggcggcaggggctatttctacaatttttttggtcgatagattattcctgtaaatattaaaaaaaatctaaaaacgaaaaaaattcttcccgcactacactgcactccggcgcgcgcaccaaccaaccaaccaaccaaccaaccaaccaaccaagcctcccaactccatgagcaagttgcagcagccgcaggccacaggctcgagcttactagctaggcggagtagagtccgtcgcactcaacgctctgtttcacacacgcacgcacccatctgaaagcacggcgcgaccaaacgcatcgacctttggtttgcccgcgtctcgtcgccatctttgtactacgccaatggctctccgctgcctagctgctgccgcagtacagcttgatcgttgcccgtaacctcccgtggctccgatcccgtctccggcgcggcgcgcggctcggcgttgagacagtttgccgcctcatgtcccgggagctggagctgctgctgtttttgctggccctacgggcgagcggcgaggtcgtcgcgggttcggcggaggcagcggcagcggcagcggcgtggcccgcgctgcaggtggggttctaccatgccaagtgccctgtcgcggaggacgtcgtgctgggcgagatgaggatgatcctcgaggaggatcccacgctcgcgccgtctctgctccggatgcactaccacgactgcttcgtccaggtaattaacaatttttaattgccccaagctacttcatgctcgtccatggcgatcatcgtggttgggttggttgcaggggtgtgacggatcgatcatgctgaggtcgaggagcgggaagggggagagggacgcgacgcccaaccggagcatgcggggctacgacgccatcaatcggatcaaggcgaggctggagaccgtctgcccgctcaccgtctcctgcgccgacatcatcgccatggcggcgagagacgccgtctacctggtacgcgcctcacggaacaaatccatggcttctttgcaaatcgatatcgcgctctgcttctgaatgctccttgattcgcacagagcaaggggccgtggtacgacgtggagaccgggaggagggacggcgacgtgagcgtggccgagtacgccgagaacgacctggcgccgccggactccaacatcgtcgacgtcaagaccttcttcagcgtcaagtctctcaacgccaaggacatcgccgtgctcttcggtacgtatactaccacgccgtctccttttccccttttgcttctcgcgttggacgacggcgacagcttatcagaacgccggtaatggccattggccgccgccggcggcggcggcggcgtcgtgcaggatgccacagcatcgggacgtcgcactgcggggcgttccagaagcggctgtacaacttcaccggaaggatggaccaggacccgtcgctggacgccggctacgcggcgaagctcaagaagctctgcccgccggggcacggccacgaccacgaccacgacggccatggcggcgccggcggcgcggccaaggtgcccatggaccccggcagcggcttcacattcgacctgagctactaccggcacgtgctcgccacgggcggcctgttccagtcggacggcagcctccgcgacgaccccgtcacgaggggctacgtcgagaagctcgccaacgcgtcgtcgtcggaggagtacttcgccgacttcgcggcggcgatggtcaagatgggccgcaccgacgtgctcaccggcgatctcggggcggtcaggccgacgtgtgacagcctcgtcgactagtttattcggcgtcccgccacatttgtgatctgtagaattttatatggttttctctgtaacatatatgtaatttcgatttagattagggaaaggttgagacttgagagaagttgcagtttctacgcttttgaggagactgattggaacagcgtatgaatctagagttaaacacttgtcagttgtcaaactactacaaactaatgaatctgtacagatgggcttgatgacgaaccttgcagggtgtaggttggttattcagctgttcttcgtagtagcattgttagtttggtgaatccaccgtttggtcaaccataagttggtcaccaaatctgaccagattgtatagattacttaggaacaaagactgcatcaaccttatgcaagctaacctatgtgaaaaaataagcacggaatgcttttgctagttagaagtctctttcatgagcagctctgttgctcactgcttcaagcttaagtacaatgccaggatgcagaatatagaagtagcgcccttctgtaagggaaggagaaaaaacatagcattggaagcagacaaatttcaaaatccagaatattggccctttcattggtttggacctccagaatcgaaaaatggcattatttggtaaatttaaatttatttgccaaaaggtaaaaccaatgttagccattatgccagnatgacagagaataatgaggaccctgtccttttctactccatatgtagattccggttgctattactacaccacctaatgctccaatggatgccaaaattttcatctttgaagcaccttgcttagtcactggtaataccagtaaactttctatctgcaggaaaagttgaaaaaatggtgcatataaaattaaaacctgcagaacttttctgttgaataactacctagatggatgatggatttcctattggtacgaagcatatcactgtttaaaaatatctaacctcgattggttgttcccaatttttctttattccagaaacatgcccttttcctacaactgccaccaccgaggaatgttcctttgctaccttcaataatttggaggacatatacctgcaaacacaatttcaataattcaagcacaaaagattgtggtggtaatcgagaatatcaacacaaacttttttaagtaactcacatatcacgttcatgtaggagtgtctccatcaaggtaggaaatgccttactcatctcttgaataacaagtgttagcatgtcaacatcctccatgtccttcagctgtatagacaagcattgtcattgctatgcaaatggagtaaagtctggttaattgtctatctatactaaagtctagaaagtatattgagttatatgaaatcacacactagaactgtacatttcaagtcatccaggaagacatcataccattttattaagttcctccgggcttggtaaaaatatggactggaaaacaatgtagtacaaaaactttgccctgtgccataatgacattctcccccaagtccttctcaaagtgatcttcgaaacagataaagacgatgataagatggcaccactgctaatgaaatataagtactgaccaaactattgtttattctgtagaaagttctaacgatatcaagattcatattctattaatcaaatcttctatatgatagagatcattgtaacaagatatggagtacatctcaacttttgagttaaataacaaaatatctaacctcattagtccatatcatatagcaaaagattaagacgcaagcaaacagtggcaactatcttttattccatccaatcagccagatgtgatgaacatttgaaaaatatgtagtttttttccagatgtcatgtcaaaagatgcaccattatgataaaaatatctcatcacaattcaaaataatgacaagtgaaaaagtcaatagcatgaatacgtggttgcttaacttgaggtaacataataaactgttatcatttgtttgtactaggttcacaaaaaaatccacactaaaagtttatcacatttatccacgtatgaaccttaaattggcacagccagtcagctgttatgaatatcctctcccttcttcttcttgcatctatctataacctgtatggaggttatagacaaccaaattcaaccactagataagtaggttgcatacctggacagggcgatctccaaggataactttgccgccataactcattgcttcctcaaatgccactcggaattcggccccaggtaacacatcaagttggctagcaaccttggatgccaaaaacatagcccaccatgtaaattttttttaaaaaaaaacttacctaacaataagtacgaactgcaaaacaagcatcaaggcatacctttgcaagaaaccagctgtagagtattccaaaagtgttcatcttctttttcttccacatgtcaatcatttcgttcatggtaggaacctatgatgataacagaatgataaaacaagttaactacgagtagatataacatctcgaacacttatgtcaatgatggctgcaaaccattaataaggctaaagtctgttgctacacactagcatagtgctataagttatatgcacttaatcaaatactgatagaaggcatgtcagcactggctcctatttatgattgatcagatagtctttggcatggccatccatgccaattgccaatacgaaaatgcaatacaatgccactgccataattccaacttctaattctctcgcgtaaataaatcttaaccagtgttgtaagagatatatccacaagagatatcttttcccagttgagcttaattccatgaagtatagaaccacattatcactctaaatagtttgtattcactatttgagggaagataacagacaaaattcagacgacaatagacttcagcactctcatagtgtattctcatggttcataattcattcagtttttacatgtacaataacctcaaacaaaaaaaagaggaaagtgttcccttcctcgtgcaatgtacataggtaacaaacatgacaacccaaaatgaagtaaattctgcatgatcatacctgaaggttttgtggtgtcagaatggcgactctgctggcacagagctccaagaaaacagcctacatttgttaaagaggtgttaaaataattagtataaggtgttccggatcaattatcaataagcactccacaagaaggcagccaacctgccaaatgattcaccaactggtaaattatcggtgatgagtaaaaagaggaagaacctgaggtttcaggtagtcgatgacggcttttacttggtcacatgattcctacaaagtgaatcaacatacgaatattcaatccacagtataatcatagtaagcgcgactttgatgcatataagttgaaagtacaggacacaacaacagttaactaaatttgcatcggtcatagcgctaccactaccactacaaatacacgtctatataaattactataaaggaaaaaagggtagtcttttgttggtacagttcgtgttcatgaggattttacgagcctgtttggcacagcttcagcttcagctccacctctcttctagagttggagctcagccaaacagttttagttccacctaaaatgggagcggggctaggtggagcgctctcacaaaatgaactagagatgtagaacctggtttaggcagctccacaactctactccagacccaactcctggagttaaatttatgagttggagctctaccaaacaggccctacatgtttgctgtgtttcgctctccagttttttcttttttttcactggtaatctcaaccctgcaagttcttcacttcctaaataagttactaacgaaatttgaactaagttactagtgaaaacttaaaatttggactaatgcgaacccgcaatccaaataaatcgagaccagatcgtcccctaggtgttctccaaaaagttcgaggctacatcatatatcgagctgacgaggaggccaattcacctgtgaaacatgggcggtgccgacgacgtagacgcggcaggtcccgcccgcccccggcggcttccgctcgggcgacgtctcgcactcgaggcacaccacccccttggcgagctcctcgggcagctccttcctctccctctccccctccccctccccccgcaccacctatgtccccgccgtctccgcgtcggcgaactccgacgcgtcctcgtagcccccgccctcgccgtcggcggccggatccatgagcagaccgagcggtgtgaggccgcggccgcctcggatcgggccagtgcacagcagggcctggaccagtgaggcctggagcggcgacaggcggcggcggaagagaggcggaagcgggaggcggcggcggtggatcggcggcgacgacgagtctgggaggaggcgacgaggagcgcgaatcatgcggcggcgggcgtcgaaattttttttttgagagggatttttttttttttttgatgaagagaaagagttcgtcgtgcgggccggagatggagtggacttgggggaggaggtggggcgatgtacggtctggatttgtttcgtcgtatcgtagaagggatctggcccgtccgttcggtacactggactccgagtcagtgataactacggcgcagccagttttgtcttttttattgcttcatcgggccggaaccggatgaccgggcgatggaattcagggtcggtttgtgtcatttaattacgacgttaacgttaaacatgtacaacaataataaactgatcaacgttaatattttgtaaagtaaatttttagagtaaattgtacccacggtacaaagaatttggtagatacgtgcgatatagtataataacttgaagaaaaacgagtagactggtatataaacttgacaatcacgtgcattttaatcaaaaacataaatatatatctttgattaatcttaactgctaggttttggctcatgaattcaatttcgtgttttgccatgttcataacccaatacaatgaatatgttgattaggcgagtcgctcgaaaattatgttatttgcatgcacttatttttgataatcatatatcttttggtttcaaatagatagattattttattgttacaactaacagataaagcaatatataatacatctaaatccttgtcaagatggctggcatgagtggctgctttttttatatggcataaaaagtatggtgtgcaatattgatatttagccaaaatgcacgcactagccaagttgttcccttatatactcagtttttaaatttttgcactagattacacccacctaccccaagtttacgtattgtagatgtaatttactcaaaattttaaaataagatcatctattgaaaaaacaaagatagtatgtaaagagcattataaaataatttatcgttctatgggagaaaagaaatgaaaagaggagtgaaatgaaaagaggagtgcctctgcgtcggtggtaaaaaagaaatgctgtatgtcagtggtagatatcatcgaccaagatccgactgtgcccaataatcaatactacacatgtctagcatgccggttatggttgaaataaagttatttaaatgatgcattcgttttttttcaagttttattgagaaccttttaaaacaaaggattaatgtataaattttgtaggatttaaatcttatagaatttttatatttgaccttttttgatataaaggattgaaagaatatctaacttaattgcatgtagatttgttttaccgttatacttattttctccgtcaaaaaaagacaaaccctgagtttccgtgtccaacgtttgaccgtccgtcttatttataaaaactatgaaaaaaactaaaaaagataaatcacttataaagtattaatcatgttttatcatctaacaataatgaaaatactaattataaaaaaaaattatataagtcggacagttaaatgttggacacgaaaattcactatttgtcttttttttttttttacggagagagtatgtatagaatcatgtatttttttctgcttctctgttatccattcatggaattcagacaggccattaattcgacacatcatcaatattggtcccgctgatatttactctaaccaacaccaactagagtgtcaagagaagagtaggaaagcttgaagaaatcaaacacatcatcattccaatttccaaagaggagagtcgcagaaagcaatggcttctactgaccgcagcaagaagcttcgcgtcctgctcatcccattcttcgccaccagtcacatcggccccttcaccgacctcgccgtccgcctcgtcaccgccagaccggacgccgtcgagcccaccatcgccgtgaccccggccaatgtctccgtcgtccgatcagccctcgagcggcatggctcagcggcgaccagcgtggtcagcatcgccacctatccgttcccggaagtggccggcctccctcggggcgtcgagaacctctccactgccggcgccgatgggtggcggatcgacgtcgctgccaccaacgaggcgctgacacggccggcgcaggaggcgctcatctcgggccaatctcctgacgccctcatcacggacgcccacttcttctggaacgctggcctcgccgaggaactcggcgtgccctgcgtttcgttcagcgtcatcggtttattctccgggctcgccatgcgcttcgtcaccgccgccgccgcgaacgacgactccgattcggcggagttgactctcgcggggtttccaggggcggagctacggttccccaagtccgagttgccggatttcttgatccggcaagggaacctcgacggaatcgacccgaacaagattccccaggggcaaaggatgtgccatggtctcgccgtgaacgcgttcttgggcatggagcagccgtaccgtgagagattcttgcgcgacggcctcgcaaagcgcgtctacttggtcgggccactctcgttgccgcagccaccggccgaagctaacgccggtgaggcatcgtgcatcggttggttggactccaagccgagccggtcagtgctgtacgtatgcttcggcacgtttgctcccgtctcggaggagcagctcgaggagctggctctcgggctggaagcctccggcgaaccgttcctgtgggcggtcaggaccgacgggtggtcgccaccggcggggtggcaggagcgcgttggtgataggggggtgctggtcagagggtgggtcccacaaacggcgatactttctcacccggcgacggcggcgttcctgacgcactgcggctcgagctcgctgctggaagccctggccgcccgccgtccacgctgcctgacgtggccgctggtgttccaccagtttattcaagaaaggctggtcccccgcgtcttaagattggcgaaaaggtgtgggactggccaacgaacctgcggcactaggaggcgatggtggtgccggcggcggcggtggcgcgagccgtggcgaggttcttggagcctggtggggcaggggacgcggcgaggctcagagcgcaggagctcgccgccgaggctcacgcggccgtggccgaaggcgggtcctcgtaccgcgatctgcgcaggctcgtcgacgatatggtcgaagcaagggcggccggcggcgaggctgcggctgcaccgcaacctcagtagcctataatgccaatgcgttcgtctgtacgatgtcgagtcattccactgttgcaggctcccagttcatttcgctcagttgtcatgatgcactgatgcaggccttgttgtgactttgagaaacgtttattcagagtgcaaaccgcagaacacttcttcagttcagttcaatgaaatcagtatattgacttggtttgtaatttgaagcttttaggggtagtttggatatagggactaaactttagtctatgttacatcggatatttgatattaatttataatattaaatataagctaactataaaactaattacatagatagatgctaatttgcgagatgaatctattaagccaaattaatccatttttaacacatatttactgtagcacaacattatcaaatcatgtactaattaggcttaatagattcgtctcgcgaattagcctccatctatgtaatttattttataattagtatatgtttaatactttaaattaatgttaaacatcctttatccaaactacgctttagtagtttgggaaatctgataagaaatgggttgggtaatcttttcttctctttttgaagaaaagaaattgtggatgatttgaacagctattcttcgccattcttgacaatctccaagggttctcttacaacgctcgggacgagccaggtgacaccgatgaagattgcagagaagcttgcctgaacaaatgctactgcattgcatactcaagtgaatctggatgtgcaagctctgtattacgacctgtacaatctgagctcagctaataaacctccatacagcaagatctatgttgggttccaagctcaggagcaagaggggattgaccacaagatgtgtcctcttggtggttggatcaatagctgtagcttctgcaatgtttgcagtgttgcttctatgcaggtacaggagagacttgtttggttcgagtaaattcgtcgtagaatgatctttggttgcctactcatatgcacagatcaagatcaagaaggcaacggagtggcgacggcgtgggcggtgcccggtggtgcggcgacgggcgaggccgactccgcgtggaggcgtgcgcggagcccgtgcgacggcggcagcttcggctggcgcagcattggcggggcagctcggccagcgacggcgaaacccggcacggcacagtggcggcagtgcgtggcgtggtggcggcggtgcatggcaggcggaggccggcacggtggcactggtggcggcggggtgacggctggtggcagtggtttggtcgtgggagcgaaggaggcgacggcggcgcctggtggtggtcgtggcggcgcggtgctcggtgacgacggcggcggtgtcctccagatccgtgcgactcggctggatctggagggtggctggcggtggtggctgcggcagctagcggcggcggcggaggacaaggcggcggcgtagggccggtttgctggctgctttggtggcgaaaggcaacgatgtagcggctgctttggcgatggcggcggtttgcggagacgacggctggtgatagcggcagcggcgacggcggccggcttgcggcggtcgtgactgtgaggcggtggtgatgtcgccggatgcggcaacggcatcgccggcgacagcaagtggaggcggggaaggagtcgggtgcaaggtgtggatggcgacgggcgttcggcagcagcggtggtgaccgtgactgcggtcaccgaaggcatgacgacttcggtcggctagccaagggcgtggcagacggctacttctgactggtgtggcatcgtttggaggaggggtcggagaccagcttggcgcagagaggcgcagctgatggtagcggaggccggctcggcgtgagaggcgcggctggcggagatggaggccggcttggcgcgagaggcgcggccggcgatggaggaggcgaccttggtgtgagaaggagctactggtggttgtggcgcggtcttcggcgcacgaaggctggccggcgggggggcgccaatgcaggggtcccacatgttggcagagcttgagtggtggtggagcatcggggcaccacccatggatttgcaggtggtgagcagcgggtgaaaacccagcccggccttggccggactggcaacgatgattccccctcctgagggcgttgttgtgctgtctcatccctcaagggtggttgccgggcaaaaagcccagtcttgctcctttgagccctgacggatggcggcggcggttcttccgtcgcttctcttcttgaagacgtcgttttgacatcccctagggggcgatctcgtctgtgtttctttgttggtctagcagcgatcggtcacgcttagcagcggccggtccggtgcttgccttttcccaggcttgtgtgttggcgttgtcggtgtgtgggtggtagtatattttttcctttttgctggttacgacccttcagggttgtaatcttgtaattttttcctgctctatcaatagaacttcgcaccgtctcgtgcgagtcgttcaaaagaagaaggcaacggagaatttctgtgataatctcggagaaggcggattcagaagcatttttcagaggtacttgcccgagaagaagaagaagatggtaatgaaggagacgagtgtttccgagaacgtgggagcacacacgacggcaacattgggcgacttgaagtcaccctccatctcctcccacggcggcacgttcttccggtctgtgaacagtgacagaggtgagaatgcgtcgctcccgtcctcctcgatgccaccgccggcggcggcttgtcggtgcaggtcgcttagttgcatcatcatcggcttgtctcccccttccccgccgccgccgccaccaccagccccatcgatctagtgctgccggaggcgggatgcgagcaacgccgactcatcaaacacctgctccgccaccagattgcccttctcattgtgcatgcgccgaagtcgccgtagaagaagccgtgcggacttgtagccggaggaagaacgcctgagagagaggagagagaagaggagggaatgagaatgacacgtggggcccatgtaggccccaccattttaaaaaacatttttattgtaactaacatgtgggcccacgattattattattattttccatatcaagttgccacataagcgcgacgtcaatatcatgtgggagaaagactaagtcaaactaatcacgtaggcgccacgtcagttaaaaccggcgtgcaaaccgccatgggacctatattgcaccggttttgtaattgagggacccgttgtatctggttttaccgttgaaggacgaaaatcggattggttgacaagttaagggaactcaagtgaacttattccttcttcttttccaccgaagcagcaggcccaggccaatcggcctgtttgtcttcctctctaccagctagcccaaaccagctattcttcccggaccatctttgtttcctcttcttcggcccatctgtcccaactcgaccagcctcgccagccagccaaccaaccaggacgcgaatttttttcgtttttagattttttttttaatatttacagaaataatctatcgaccaaaaaaattacagaaatagcacctgccgcccaaatggtgggcggcaagctgacgtggcagacgatgggtcgaccgcgccgtctgccgccgtcggccaaaattgcgattaggcccttgtcgcccatacagagggcggcaaggggctaattacaattttggccgcccattcagagcttgtggccgtactttttcatctgggggcggcaagggacccagatgaaaaaagtacggccaaaagatttttctatgttatgttaataataaataaagaagtatttattggtaaaacttgttaatattgttataaaaatgtattgaagttggttgttgcgcaatttcatatgttaagtgaggtattattttgtaccttatttgacgtattagtactcggataatttatataggcctatcgcagtctaggtcgtagaaacattatatggacttaaacaaggagaattatgtaacatgaagaaatagtagtacaatttgaacatgatacaactatttgcattgcggttacatagatgatattagattcgaactaggagggaggtagtgcaatagttgaacacaacgacgatgtagtaatgggacaaggaagcatgacagtagaaatttcaatatgccaagttgtccgataatagctaacccctacgtgaggatccctctcctctctcaaaccgcgctttagtaaccctgtattgctctggtagttcaagctgcacaacacagctaggtggagttagaacccttctggtgtctatccattctctgtattgacatctccttggtggttcctgggaggaaagaatagatgtaaagcaagcaaagttagtaaatgttgtgagaaaataaggaatcatgtaattaaaatattcttaccatgaaatcgtcgtcaagaatatttggacaaacaaagaaccttcgacccaatgttgtaggatttatggaacgaagaacctgacaacgatcaccacacctacatcttggacgggctttccatggagggagtgccgtagttagcacccgccagtcgctctgttgttcacgacattgtcgttcataagccgcttttctctgtaagtattgctcagtactttcggatgcgaaataccagcgaccttcttgtaaacaagtggttaggtcgagaacgggattttctgtatcgacccactcgatgtatgcgcaagccgtagtgcgggtctgctgaatagagtagtgttacgaagaataaagcgattgcccatacggaatgaataagcatatgcagataataaaatacctcacggtcatagttagggcacctaaaaaagcgccttcctcgaatatcaggattcctcgaagccattagttggcatcgatcaccgcataggcagagaggacgctggcaccaaggtggtagtaggtatacacaaggatcgctacgccagtttggatcctcaacaccccggcgtctagccattgacgaaagccggtcggatttgtaatgaagcaagtggggaagagagtactgaatgtgactgagttctgaaagattgtgaggcctcactcgttaaggcgacttatataggcgcaaaaaatcgagtgatacccctgacatgtgaacgtggtggggtatggtgggtacgcctgattggtgccgaaagatacatgcatgatcggcaccgaaagttacattggtcgtatgcgccaaatggcgggcaaatactcgtatcacacgcgaataaaggaggctgcatcggtgcggcagaaagtagtcgtgcatgcgccgaaaggtatcgtgcatgcgccgaaaggtatcgtgcacatataacaacaacgtagtcattacacaagcatacagtactggaaagtgaagcaagtaaacaaaaagaagactgctctgctggccctgccccgcgccgcgaccacgcttggtcctccgggcctgtgctcgcacgtggtcctaggagtaggtgaaacgatccggtggcacagcacgggtagcacgagtgtcccgcggaggagtggcctgcgcctggacctgcgtctgcaccggcggtgcgcctcccagctgtgaggggccgatgacgtcctctgtcgagtctgaagcgaagtcgaagtcagtgatgtcgaagagcacggtggaagacaggaaggggtccgacgaggtcccagcatggtccagtggtggaccctgactcgacgtgccggctgcctgtgacgctgaccctgcagcctgggagaagtgggcggcctgcgtcatagcgaactgggcgaaacctacacatcgacaacgggacccttgtaagctaagacataaaatgtatgtaaattgattgtggaagtaatgttgtttttttaagtacctgtggggggcacaacagaaggcctagccgaggaaggcagggtgctgaacggtgcacgaaaccctgaagcaatcggcaagtgaaacggctcacttatatgtgcgaggcatgtacagaagtagtaataaaaatacttacctccgtgcggaggaggagtcggcctaggaacttgcgcagctggacggggaccagtcggtacgggtggccgctgtacagctgcgtctgcccgagcaacgtcgtctgcacgacaggtgagcactcggagaatcgagcgcatcgagctcctcatacagtgactcctcgtacgcgtgctggtccacctcagggcggccgatcgcaatcctctcagctgcccagatagaaagaaagagagggcacccaccaaaggtcgcgctgggatccgtcttcgtgcaagactcacaaagtgcacggtacagagccgccaacaacgcggaaccccaactccactgaggcacctcgcctcccgcggcgtcggcgatgctcctggcgtagtgcacgagtcccttgtcgaccgcgtgcccatgaccgccacagaacatcacccagccaaaaagccagagcaagtacgcctccaaacatcggctgtacgagtactcgtcggcctccgcctgtagctgctcaacctgcaagcagtcgataaaatgttaggcaccttaactgcggactaaatatgtaatacgattgtcatttcggtacaaaaacactcacggtgaactgaagcagccacctcttcgtaggtccggtgttgcggtggtgtgccaacggctcgagcgggaggtgcggtgcgcgctgtactagtgcgaaacgtgccgtcagatcgtcctgccagtccacagccgtggtcactggcccaacagcgtctcccgcgagcggtagccccaacaagtacgatacgtcctgtagggtaggggctacctcaccgcacggcaagtgaaaagtgtgcgtctctggcctccatcgatcgaccaaagctgctacgagggacctgtccacagtccatcgtctggccgggtccgcgtcgccggccgcagcctccaccagccgacacatcggtaggaggccggcctcacgtagcctgcaataacaaattaatatgtcattataaaaaatattacagtgcaactaacttatagtaaaacactgttcgtacctctcgacaaaggagtcgtgaaccgtgagtagctcaccgcacgtccgtgcccggaacgtcccatcaatgcagagaatgtcaagaatgtcccatcaatgcagagaacaggacgacagttcacgaatgccatcttgcatgcatgtagagctaagaacgccctttgcagcacactcttgccaggatgttcaattgaggggaatttcttcacttcgtaagagctcccagggtttctttcctcgataacaccaagcaggcatggcaaattgtcatacaaggcttcgtaagttccaaatctcatctctattattttctatttggccctccaggccttggcatagctaatagtatacttgtatgtctcctcgatgtgtcggattattgaccttggttcatatgtgagattatcgatgacatgcgcatacatctcagatgcaacaaatgcacatgtaatgttcctgtggtatttctgaacaccaggtagaaaacatgtatgcttggtaacaactgacactgtccaataatccttccatttccccttatacgcgtgcactctccagggacaaccatctttttccttaacacaccgaacttcatattgcgaccggttcgacttggcaaccctaaactctttatgaagtgacactgcaaaatgttttaccgcctccttcatatcttctgctctgctataaatcgctccctgaataacctcattttctttgtactcccatctcacactatcctattcagagacgatcagtccagaaaaatcctcactagcccattctgctggattaatatccgtctcatcatctgacgaatcaccttcctttacacgctcgttgtcagaatcctccctctccatttcatccacaatggcaccgacagtctccccctcgtcggccactccacctggttgaatgcccactggagcaactacgcccccgtcctctcgtgcgttgacctcctccacagaagtctcgtttacttcagcacttggtccctcgccatcatccatgttcatctgcacacctggatccttcgggtgaacaaacggaaccaaagctagaggccacccgcgttgcaatgcattttccaaataccatctccacactcgggagttttgaactggcattagttcccaataaaaaccctcagttgcccgacttactataacattgattgttatgtcacttgtctgtggatcaactctcaagcccctcattaaccatccttttatagaaggtacactcctctcagccggtctatcaattcccctttctgatacaataaaatctgacagatctaccccagttggcccgtaacagacgtttcgtggtccatggtaaacttggaatatttgtttgttcgacatatctgtcaacgaaataactagatcatattactctttcatgcaataaacatctacaacgtaatatcttcttgtgtaagccaatgcaacggtaatgtattgattccaaactagcagatctacgtagttaccgatatctataatacgcacttctagattagtacaactaaaaccctaaaaatataatgcatttattcaaacaaatttttaaaaaatacacactatttttaaaaaatataatcccccgtttgccacgtcagcttgccgcctcagaggtgggcggcagggtctatttttataatttttttggccgatagattatttctgtaaatattaaaaaaaaatctaaaaccgaaaaaaattcccaggacgcacctggacctggtgcgtcggccggcctcgccgcacctcgcgctcgcgcgcgcaaccctaacccgccctccctccctgccgcaccgagctcgccagtgcgccgtcccgcgacaagccgtggacaacgcgcccccctttccgctgccccttgaaatctcagccgtgctgtagtgccaagcagacctcacaacgacgacttcgtcgcttccccgtaccaaccaccgcacgtacagcgccagctgtacgtagatcgcgtcacccgagcagcgtttcgcttgtacccgcccggcgcaccggccccgcgaccgcgatgacgccgagtcgcgccaaccatccactccctgtcgcgcgccacgtcgcctgctgccgcccgtttacttttcctcatctcccgcgcgcgccttccgctgctgcacccagtccaccgcgccgccatgccgcgccaccggagctcgacgcagaaagtggtgcgccgcgtccatcctccccaccaccaccacagtcctcctcctgtaacatcctgtgcccctttttcatcgtcatcggcctcctcctttcccccaccaaacccatctccagttctccaccatcacacgatcgagcatctcggggccgcgacttcttgcttttccgccctcgccaccacatcgacacgccgagatccgccgttgcatcgcctccaatcgagcccgctcacctcctgcatcaccagcaccactctccgcctccctggccgccgtcgcgccgggtcgagtgccgctcgcgtgcgcgcctccttccccaccgccgattggattcttgtgcagaaatccatcaattcctcaatcctcactagacacatcaacgctccaactccaggctagagaagagcagaaggcttgcggagaagaatggcttctgccgagcgcagcaagaagctgagggtcctgctcatgcccttcttcgccacaagccacatcggcccctgcaccgacctcgccgtccgcctcgccgcggccagaccggatgtcgtcgagcccactctcgccgtcaccccggccaacgtctcggtcgtccgatcagccctcaggctgcatggctctgcggcgagcaccgtggtcagcatcgccacgtatccgttcccggaagcggccggcctcccaccgggcgtcgagaacctctccaccgccggcgacgaaaggtggcgcgttgacgccgctgccttcgacgaggcgatgacatggccagcacaggaggcgctcatcaaggaccaatctcccgacgtcctcatcacagacttccacttctcgtggaacgtcggcatcgccgaggaactcgccatgccctgcgttcaactcaacgtcatcggtttattctccacgctcgccgtataccttgccgctgccgtcgtgaatgactccgattcggaggagctcaccgtcgcagggtttccggggccggagctacggatcccgaggtcagagttgccggatttcttgaccgctcatcggaatctcgacttagtggacaatatgcgcaagttggtacaagtgaacacgaggtgccatggcttcgccgtcaactcgttcttgttcctggacaagccatactgtgagaagttcatgtgcaacggcttcgcgaagcgcggctactacgtcggtcccctctgccttccgcagccaccggccgtagctagcgtcggtgagcccacttgcatcagctggttggactcgaagccgaaccgatcggtggtgtacatatgcttcggcacatttgctcccgtctcggaggagcagctccatgagctggctctcgggctggaagcctccggtaagccgttcctttgggcggttagggcggccgacgggtgggcgccgccggcggggtgggaggagcgtgtcggtgacaggggattgcttgtcagagattgggtcccgcagacggcgatacttgcccactcggcgacggcggcgttcttgacgcactgtggctggaactcagtgttagagggtgtgacggctggtgtcccgttgctgacatggccgctggtgttcgagcagttcatcacggaaaggctggtcatggacgtcctgcggattggggagagggtgtgggacggagcacgaagtgtacggtacaaggaggcggcgctggtgccggcggcggcggtggcgcgggccgtggcgaggttcttggagcctggaggggcaggggacgcggcgaggatcagagcgcaggatttcgcggcggaggctcatgcggccgtggcggaaggtggctcttcgtatggagatctgcgcaggctcatcgacgatcttgttgaagcaagggcggacgccggcgagtccgcgctgcaacctctgtaacctgtcgtttctctatacgataccgagacattcgttccagactccatccagttcatctcgttctgttgcgttcaatcaaaataaattacgatgtgatgtattgatacatgggatcacctatatatttgttgatataattttttaaaaaatttgacagatgtaattatagtataattgtgatataattacactgtaacttatatgtaacttctatgaaactttcaaaaatatcttgtaatataatattggtgaaacggaggttgtggggacgagtcctctcacatgtgtgcgctgtgactttcttattcctcacttttataagtcttgaaacaaatataacggttcaaaattacgtgaaaattaagttatatataagttacactgtagttatatgcatgcatgttacagtgtaacactactggataaagggtttttaatcctagtttgtaaccccttagtcccggtttgaaataatcaggattaaaaatcattaagatggagccaaggtaggttcgttcttttctttttttcattatttttaactttgaatattgatttcactatatcccaaatcatcccgtgaaatccccaaatcgatcatcacataacaaaaaggatcatctccatatccccaaatcaatcatctccaaatacatcacaaatacatcatatattcaaatcacacacagatcaaatacatcacaaattctcaaaaacaatttcatcacaaatcctaaaaaaaaaacaaatctcctgccgccgccgaccccgcccctgcctggttgcttgccctcccggctccggcgtgcgcaagccaccgcggccctccgctggcctcgctcgctcactcctcctagctcgctcctcgatctgccgacaggaaggagaggataagatcggctttaaagaaaaggataagagagagaggaggaataggaatatgaggagtttaggaggataagtaataggaattatatacagtatatggatttttaagtaccggtgttaccaaccggggttaaagatcaatttttagtctcgtttggtcacaccaaccgggactaaaaatccctggccccctgacagcctctaatagtaaatgaaccgggactaaagatgatctatagtcctagttggtgggccaatagagttttaaactgggacaaaaaaaatcatctttagtcccggtttctattcaaaccgaggctattgtggattttggccgaccaggcaaagatggtttctccatcagtataattatactagattgtactgtaattgtatctgtcaaaattttaggcgaaaatttattgataaatatatagcaaaattgttgatacataacttttttttttctgctgctgctggaaaaatcacgttatggagagtacaaattaaccgaagaacatttctgacctcacttcatcgagaaaaagactatttttctgagtacatgtaatttttgctagcttggatataacgtgaagcttttagtttccggcttgctaaaattatgacgctatatttttttaagggatttcagtcactttttttctccatgtgattgctcggtctcttatatgtatatgtatgttttcatctctcctattttctatttcaagtagataataaattacttgaatcctaattctctcgtacattgtgcattagaaaaattacaatcataatgtcgacgtttgatgtcgcgatttcggtatttgcatattatggggatcgttggaactaggatatacgcgagactgagataaaagatatggggacagagatttttatacaagttcgggccccttaattgtcaggtaataaccctacattctgttggccgaagccggtattactcttattcaccataatcacaccagtacaatatttggagtagcctatttaactgttgtcgacatggcggtctgaaggtctgactcgtagtcgataacagggtcctcctcgagttcgtgcccggcgagatcaaagatagcgctttcgtctctcctgacagtatccggagacaccataggggactagccgtgcctatcttcgaagtcgatatccagcgtcttgtcttggcgtatgttgatattgtgtcttgatttattgtttcgtgtcttctatggtggttgtgtgttgatcgtctgtgtcccctctcctcctaaggggccttgtatttatacccataggtgtccccttgtccaaatagaaccagagaaaccaatatggatacaatccgagtagtccttgtcgtttccatgtagaaatttggttatccttccttatgcggaactcctcctatatccgaaggttgtttccgtataagacatagtatgtggtgggtcctgccgagatttagtcaattattattaggtatgtggtatccataacactgacacataatattgaaacttaccatgtaattatagcgtgagttttgatactttcagttacaaatataagtatatgtaattcatagttgtaaatatagctagtttcgagggaggtcaagcagactacacgcagcaagtcaacactgaaaaggagagtggcgatgagtcatgggcaaggccaatgtttgtgactcaattgacaataagagtaggaaccgctgaagatagcaataactatggcaatgtctgcaatggttaagctcatggaaaaacacaaggtggtcctaccgaagaaaaaaaattacttcccaaccatgcccaacaggcaaagagcaatgaaaatattgtattatattccttgtggtagcaccttaagcttaagatcattttttgttgcactaaacttatcatgtgctcacacaatggctaaggtgttatactattgcagtatttaatgcttaaggttaactttttggatacattgtggttgcctgaggccgcaagcatcagccgcgccaccgcccgtcctcagacctcaggtgcggcgagcggcgagcctgtgacttgcaacaagttcccgtttttatttaagaagaaagcagttctcattttttttaagaagaagagagttggtctaaaccagccataaatcctcacagtcgcttggttaattaaagcaatcagaaaaacaaaggacagggtaaaagcctgcggcaaacaactactgagaccacagtgcaacacagggttgccaagctcttactcaacctaaaccaccagaacatgtccacacaaattctatctgagttttagccgacacacttggttgccaagctcttactcaacctaaaccaccagaacatgtccacacaaattctatctgatttcagccgacacacttttcaagctactaaaacagtatggtctgtaaaaaaaaattctatgtaaaagttggtctgcaatataaataaattaacttttcaattttacaataattaaaactcaattaatcataactttcccgtttcatgtgccctcacttaaaatcttcatgttaagcaatttcaaacataggcacatgttgggaaaaaatttctatggaagattttttaaggagtaaaacagcttcaaagacgctgttttttgtttgaaagacgctgtttaactgtgtatattgcttatcgatagaaaaaaaagggaatatttcattgtttagataggattagtggcctagtggatggccattacaactttaaacgttattcggggcattatatacgtcgttcaccgagtagttattctgcattcattcaaccaacacagcaacgttccaaactagagaagaacaaaaagctaagggcgtctttgaatcgtaagaatgaaaaaatgtaggattttgatagaaatgtaagtgtaaaacagaggattgcaaaacacaggaatgaccgtttgattggaccgcaggaaaaacacaggaattagaggagagataaagactcaaaggaaagtttccatgaggttctacctcatgttagaattcctccaaaatttacatggcattaggcattccatagaaatttcataggattccataaaattcattcctttgattcaaagcgctatatagaaaaaatttctataggaatgaaatcctctaaaattgttatgaatttcctttaaataaaaaggggcctaagcttgcggaaaagaatggcttctgctgagcgcagcaagaagcttcgaatccttttcatcccgttcttcgccacaagccacatcggccccttcaccgacctcgccgtccgcctcgccgcggccaggccggacatcgtcgagccgaccattgccgtgaccccggccaatgtctcggtcgtccgatcagccgtcaagcggcacggctccgtggcgagcagcatggtcagcatcgccaagtatccgttcccggatgtggctggcctctctccgggcgtcgagaacctctccaccgccggcgacgaagggtggcgcatcgacaacgccgccttcaacgaggcactgacacggccgccgcaggaggcggtcatcagggagcagtcccccgacgtcctcatcacggactcccacttctcctggatcgtctacatcgccgagggcctcggcatggcgtgcttccgattctgcgtcatcggtttcttctccatcctcgccatgcgcctcctcgccggcgccgctgccgacgcgaacggctccgattcggagtcgctcaccgccgcggggtttccggggccgaagctgcagatcccgaggtccgaggtgccggacttcttgacccgccaacagaatttcgacaagtttgacatgcgcaagttgcaacagtcgcaagacaggtgccatggcatcgtcgtcaactcgttcttgttcctggacaagccatactgtgagaagttcgtgtgcaacggcttcgcgaagcgcggctaccatgtcggcccactctgccttccgaagccaccggccgtaggcaacgtcggcgagccgtcgtgcatcagctggttggactcgaagccgagccggtcggtggtgtacatatgcttcggcacatttgctcccgtctcggaggagcagctccatgagctggctctcgggctggaagcctccggcaagccgttcctttgggcggtcagggcggctgacgggtgggcgccaccggcggggtgggaggagcgtgtcggtgacaggggattgctcgtcaagattgggtcccgcagacggcgatacttgcccactcggcgacgggggcggtcttgacgcactgcggctggaactcgatgttagagggtgcgacggctggtgtcccgttgctgacatggccgctggtgttcgagcagttcatcacggaaaggttcgtcacggacgtcctgcggattggcgagagggtgtgggacgggccccgtagcgtgcggtacgaagagaagacggtggtcccggctgcggcggtggcgcgaaccgtggcgaggttcttggagcctggagggacaggggacgcggcgaggatcagagcgcaggagctcgccgcggaggctcacgcggccgtggccgaaggcggctcgtcgtacgacgatctgcgcaggctcatcgacgatatggtagaagcaagggcggccgccggcggggttgcaccggcacggcaacctcagtagtctattaatttcgctccgttgccatgagcgatgcactactcctgcagggacttcagaagtgttgttcttgtcacttgtgactgtgagaagcgtttattcagagtgcatgcaaaccgcagtcttcagttgatcagctccaacgaagatctgcacctgcaatatatattggcttaatttggccttgttctaatttgaaattaaagcttttaagttgcatctgatatctgtcgttgccttcagaggtttctaatatttcccttctgaaaatttcatcttgtttacgtgatcatgccaagttagtggatattcacgttatcatccacaagtttctaaaagattgctcattcctcatcagattccccggaaatatcatttttgtcaatccacttgtactacctaatctctattatataaaagaacccagtgatggtaatgaaaatctcccatcacttagagttggtgggattttctaaggctagataaatatatctgcttgttttttttatgtttgcttgcaaattatatttgacaaatataatttcaagtcaagaatctcagatatatcttttgaaatcggttgcaagtcacgggtactttgctagttacttcctctgtttcgtaatgtaagtcattctagcattgtccacatttatatagatgttaatgaatctagacaatctagatatatatgtatgtctagatttattaacatctatatgaatatggacaatactaaaatgacttacattgtgaaacggagggagtaataaatatctaaagtcatggaaaaactaattaatctttctcataagcacattaggcctcgtaagctgaaaaacaaatgccatcaaatgcatgattggataaaatgatgaccgtccgatcagatacatactccctccataaaaaaacaaaccctaggtttccgtgtcaaatgtttgattgtccgtcttatataattttttttatattagtattttcattattgttagatgataaaacatgattaatactttatgcatgacttgtctttttaattttttcatattttttaaaataagatgaacagtcaaatctagggtttatcttttttaaaggacggagggagcatatgtattatccctccggagccttctagtgcctctcctcgcgcacttggcaggcatgaaagagaacaagcaacatatttgggaacttaattggcggcaatttcataagttgagtacttatgaatttgacacatggaccaaatgaaacaaatattgtctctagtttttaatatatgatgtcattgacttttaaatacatatttgactattcatctttttcaaaactttttttcaaataaataatatataaatcatgcttaaaatactttcaacgataaaacaactcacaacaaaaataaactacaaatatgtaaatttttttagtaagacaaatagtcaaccgtgtgtttacatgttaatgatgtcatctattaaaaaccgaaggtagtatgaattgtttatgtaaaaaacatagaaattctatggcggttatgtatgtgacctatgggcaacttcatagtaatatttaggtcaaagatcattttagctacaaaagaaaaaaacaatcttaatctttaacaaagatggtttctcatggtcgtgcaaacacgcgactttgagtagctagtatttgtgaaaggacgacgggtaccattatgttttatagaaaaaaaatatattgtcagcaggtaagcgacccagatcgtagctgatcagcgtgcttacttttttaattagtagtttcagttaccatcgcatcgtgactcacggagtgtacctgcttatattattttaagtcgatcataaatcaaattttgaaatgcaactatacgtcgagcgcccaattcgagggtggaaaaatcggacgcccacatcaagctgacgtcaaattactttaaactattttttctcttaaattatttatccaaatcataaccgaattgcaccattaaattcattacaattaaatctttaaaataagaccacatagggatatattccaatggaaaaaatttaacttattattcaattatttttaaatattgcacgatgttccaccaagtatatcgaaatttgtttcactaagtaaatcgaaaatgtttcaatcgtttaaatcaggcgttgtttcaccttatatgaaaacaatgtttcagttcactgcaacctttggtccatacatagtgaaacattataagtatactaggtgaagcatttttttttggaaaaaaatgaaacgtattcccttattaaagggttttcataatacgtgggtgatttgttgtaaaagaatgtttcagttcactgcaacattagatctatacaaataaaacattattagtacattattagtacactagatgaaacatttttgctagaaaaaaaataaaataaattctgttaatagagggtttcaaaatatgtgagtgatttgtcacaacaaaatatatatagtggagacacgtgacagataagatcaaggacatgtggtggagaacaggagcacgtgacaggtaagatcaaggacatgtggtggagaacaggagcacgtgcacatccgggggagcgtccgattttacctgccccgcctgtcgcccgagcgccacgattctcccagattttggcccctttccattaaaagaacatgagatattgttttccagacaaggacagaacaaaagcagactattatctgttcttgccacgacacagtacgaatcttcgatgacaagagggcaagacaaaaatacgtggcaagcatgcagcatcagaatactaccctttaattaatcgtaaaataatcaaatcaattcagcaaatattaatatatagtctgtgagtgatctagctgagattgagaagcggctattccacaatagttcgatcgtcatctgattgcagacatcgcccactttcgccaaccaagagcaggaaaatggcttcggatggcagcagcaagaagcttcgcgtcgtgctcatcccgttcttcgccaccagccacatcgggcccttcaccgacttcgccgtccgcctcgccgcggcatggccggacgccgtcgaggccaccctcgcggtcacgccggcgaacgtgcccgtcgttcgatcgctgctcgagcggcacggcccagccggcgcggggtcggtggcgatagccacctacccgttcccggcggtggacggcctcccggcgggggtcgagaacctctccaaggcggcgcccggggacgcctggcgcatcaacgcggtggccgacgacgaggcgctgatgcggccggcgcaggagtccctcgtcagggagctccgccctgacgtcatcgtcaccgacgcgcacttcttctggaacgccggcctcgccgacgagctcggcgtgccgtgcgttcagttctacgccatcggcgccttctccaccatcgccatggcccacctcgtcggcgccgtcaaggaaggcgccaaggaggtgaccatacctcggctccccggccacgacttgacgatcccgacgaccgagctgctccaaacccaagaacgccaattcggggccatcagcctactttggcgtcgtcgtcaacacgttcttggacctcgaggccgagtactgtgagatgtacacgcgagacaaacacgccaagcgtgcctacttcgtcgggcccgtctcgccggcgccgccgccattgccggcatccggtgagtcaccatgcctcgactggctgagctccaagcctagcaggtcagtggtctacctctgcttcggtagcctgacccacgtgtcagacactcagctcgacgagctggccttggggctgtaggctgccgggaagccattcctgtgggtggtgaggactgacatgtgggccccacccgatggctggaaggagagggtcggggacagggggatggtcatcagaggttgggccccacaaaaggcgatactggcccacccgtcagtgggtgccttcgtgacgcaatgcgggtggaactcggtgctagaggcggtcagcgccggtgtcccggtcttaacatggccaatggtgttcgagcagctggatttttcacattttggtccttttgaaaaacttatttcacaaatagacccctagaaaaacttatcccaaaaatggttctttggggcgccagagtagctggcgccgtcgtccaacaggacggcgtggcgccgtccccctgccgacgtggcggggcgatgctgaggtggctagggagtgcgccagagtggctggcgcccccccaccgggaattttttttttgttttatttgtttgatatttttttcacgcttagggacacacaagaaccaaccatagaaaaattgaactcaaatggacgtaatatgtgacctgtagaatttttcctctcctctcctctctctccgaactagtgcaaaggagagatgtgcaacttttttatttttattttattttttaatttttttttcacacttaggaactcacaggaatcaaccatgtaaaaaataaactcaaacggacaaaatatgtggcatgtggaattttccaaagttctaccgaaaaacttttctcctcgaaaacacaatcttgcaagcggaatttggaggttttaatatctccgaacccggcaaagctggggagaatcggatgtaacattttctgtagatgtccgtgcatatattatttgcctgattccgagtccgtatgagaaagttacgcctattttaatagatgacatattctgtccgtttcggtagagttttggaaaattctagtttgagtttattttttatacggttggttcctatgttctcctaagtgtgaaaaaaatatcaaaaaaatgaaataaaaataaaaaaaattgcatctctatgtactgtttaacttatatatgtcatttcatgtggttatattttgaattagagtgcattatatttaacatgctgatcaaagggttttactaaaggaattatggtctaattttagtgaaggtgcaaagtagactaagtggtatgctagctattttcagacttagctaagtggtagtttgagtttaaattttttttgtggttggttgtatcgtgatcctaagtgtgaaaaaacatccgaaaaaataaaataaaaatgacaccgttgcaactccatacagagaaacaggaatggaggcggcggcgccagcatggc

SEQ ID NO: 26478 - DNA, 16794 bp, Oryza sativa
gaaaaatccaggttcgagcagttcgtcaccgagaggctcgtgacgaaggtgctcgagatcggagagcgcttatggccggagggcgccggagtacgaaataccaaggatgaggagaaggaggtcgtccccgcgaaggcggtggcggaggccgtgacgaagttcatggagccaggaggggcagggagggcgcgagatgcgccatcaaggagctcgccgtgaaggctaatgccgccgtagcagaagccggctcatcgcaccgtgatctgctccgccttatcgatgatctcatgcaagccaagtaatggtaatgcttgtaagataaaccagctctgttttaaaatatttgttgctctaaatttgttgtaagttaattggccatcaatttctatgaactcatacagtttactatcataagattaatatttttaaattcaccataagaaatgctttcataatatataatttacatttacatgccgttgaactatataattttttcaaaattaatggttaaaaatagacatgtttgactttagacagatctaaaatagcaagtaatttgaaatggaaagagtaacctttttgttctatttgatgcattgagctcctgagtttatcagatttatgtttaaaagacgagctgttttacttttacctcaagttacagctcactgcaacatctactgatcaattcgctcagatgcagcctgaaccacttcccaaactgtagcagttcactgaaacataggctatgtttagttcgtactaaaattgaaagtttggttaaaattaaaacgatttgatggaaaaagtgaaagttaatgtgtagaaaagttttgatgtgatggaaaagttggaagtttgaaaaaaaaaatttgtaactaaacacggccatgctgatgaattcactgcaacactgacctctaagaaagatcattgcttctcctctcttccagtcgcattggaacgcccaggagaaatctaaccaacttggctgtgttcgttataggaggttgggaaacgaaacggttcattagcacgtgattaattaagtattacctatttttttaaaagaatggattaatctgatttttttaaagcaactttcgtatagagtttttttttttaaaaaaaaaacgcatcgtttagcaatttaaaaagggtgcgcgtgaaaaatgagggagaagggttgggaacaatctcatacgaacgcagccttaggtcaccggtgaattggtcgccatgagattgtacagcactaaatacctggatatgagaactttcactgtacaatatacttgtggtatatactgttagtataaacgatctatacttgtgatatatactgttagtataaacgatctaacggtgtatattgatttaattttccacctaaaatatatgctagtataaaatttacaagggtttccctagaaaaagtaaaacttacaagggtcaggaattaatttagataaaaaagtttcggtacccgcatcgagttgtatgaatgtgtttacctagctaggaatgttcagaacgtgtaaggcatttcacgcacatctgttatgttacaccttacattacgtgatcggtaattggtcacttgtaatcaaagtatgtaaaattttaatgatgattaaggaattgtgccaccgcaacacgcaccatcatctctcacaggcgtacaaatgaaatccagcagcgatgccggcagcctgacatgtgaacgagtcccaattagaccggaataactcttaaccacagaattcaattttctataaaacttctaatttacccatctatatactagcactacaatgtaaaagttctccagtaaaatatgcacaaacatatcatggaaattacaataatcgtttttttgaaaaaaaaagttaaaaaggatcaatgaagttctccgtctgcttggcgccttttttccgcatactttacggcaacatctctgttcctctgttctcattcaagataataaaagttagtgcagaacttccccaacagaaaaatgcatgtgcagctaaaatcagaaaacaaaaaatgaaatgaccaagtgcattttttgccaaaaaaaacacaatttgtgataaagactacttgttaatacacaattctccaggtagtttttttattttggaaagaacactaattactgtgcaaataattaccgagataactagatactacaaattacaaagagtaatgactgaggaagaaggtattagttgcttcatgaatggcaaatgcagcagctaatcacttactggaaatcgaatgactacttgaaaattgaatgagcaattgggacagttctaaagtagagagttagggaattacctgctttatagcgttgagagacacatctggatcattactaatgaacctcccatgagcattccgctgagcaatgtacaggttccagtcgaactcgcgacggagatccatgcgcctgaagtgttcatccgtccagcccgcgtatctcgtacgaccaaaagggaggccctttgcgtcttcggtctcatcgagctgctccgcagcttcgttcaaaatactgagataaacacgccagttaattttgccatctttgaacaggtacccgcatcctcctcagcatcaccagctgctggcactgctgctacagtacacatgaacaacattaggtcacaagaaacaggaatcccatccgaggcgactccaaattcatcatacctgaatccgaatcctctgtgttcttgtcgagatgcagaactgcgaccaaccctgccaacgcaccactgtagaatactcgcctccccgtcgccgccgccgccgcctgaatagagagccccagccagggctccgcctgcgcctgcgcgcgtggcgagagcctccgggtgaggagcgaaccgagggtccggagggccatggccgccggccggagtgcgcgccttcttcctccgacgactcgaattcctcttcgccctctcctccgccgccgccgcgcgcctcgattcgatttcttagtggttcatgggcttgattgatgggtttcgcttccgatttccgattgacacggctttggagaggcgttggggggccaaaatataggataggagtccggtttgcctccctcaagtgtagctgcagtctgattcgaataactaaaccctcaactgtagtcacagtctgattcgtatccttaactgtaataaaaactgtaatctcttcttttataaaaattaaaggtgtttccgtgttccatcatccgtgtttgagtcgattataaaaattgaagatgtttatgtggtttgttatccgtgtttgagtcggttttaattttatgttttggttttaatctatatctcttctttactattatagaaattaaagatatttttgccagtattttggtacgtcatccgcgtatgagtcagttttaagttcgtttgcttttggaaatacatatccgtatttgagacggtttttaagatcgttcacttttggtaatacataaggaatcatataagaaatctgtttaaaaaaggataatcgaactcctaactgcagcttatgattttctaaaaatatatatatccaagcgaactcccacagtgaatttcatcttaactaaaccatataataataataagattaaaataaacttcacctgttgcaatgcacgggcattttttctagtaaaataatataataaagcttcctttaactattaaaaccgagttaatttaaccttccgtaagggtttcccatcattctgagcctgcacattttgccacccatttatagggaaaattggagccatgccattataattttgcaaaatttaagatatgccatcctgacccacatgtcattgactcatgtgggtcctacatgtcattgagataccgatgacatatctcaaactttacaaaattataatggcatggttctaatttaccttttttatatcacatgaatgcatgaactcaaaatcattgcagttcactgcaacatctacggacgaattcactgcaacactgacatagagaaagatcagttttaggctcaggtattacaaattttggccttcagatcaaagccaaacaactacgtgtcagtgtacataattttggcctgtggacaaagctcgtgaattgtcaatttttgtgtttaaaccacgaactgttttacgaattaaatttgaaaatacattgttcattcatttttttcttaggaatattcgggatgcaaaatcttttgcagaaatataccgtctatctcgcataaccgttgcgcgaaaatgacgtgggaataacgttgcggacggtatcactaagtgaaaacgcgagaccgcgcggcctcacggaatggaagagcgatcaagcaatcaacgataccggtgccatgcggtctcgctcaagcaatcaacgataatccgtaatccagataattaatcactaattattattattagttaattgttaatgaagtaattaataactaatcaaatggagtcgttggacaatggactgtcgctgattgcttgagccggtctcgctcttccatttcgcgaggccgcgcatggtctcgcgctttcaccgcgtgataccgtccgcgatgtcattcccacgtcattttcgcgtaatagttgtgcgagacagacggtatagttctgaaaaaaaatttgtatcccgaatattcctgataaaaaattgaatgaacaatatattttcaaatttaattcacatggaagcatatgaactcatcaaactcgttatggttcactgcaaacttctactggcgaattcgctcatatgcagtctgaacgaattctcgaaatcgtaaaattacatgaaaacatctgctactgtcgaattcattcagaaaagaaaaaaaaatctagtactgatgaattcactgcaacaatggcctcgagaaagatcattgcttcttctccttccttcctccggtgacattggacacgagcccccggaggaatcttgccgacttggtcaccggcgagtttgcggccatgacgttgtacagcatggtctccacctcgccgatcgtcggccgccgcttcagccgcgacaccaccttgaactgctccgacgccggcgcggcggcgtcgtcctccaccatgagcacccagctctcgccgccgaacctgccgccgtcgacgcaccggagcagcacacccttcttcttgctcagaaggcccctcacctccagccccgtgaaggagtacaccacgctgaaggagcccacgaatcccctcgcgccgccggcgaacccctcctcctcctcgtcgaagctccacgccgggttgaacatgaccaccggcttggtgtccagcgcgtcggcggcggccttcatcttctccacctgcgaccgcccgggcgccaggaacacggcggcgtcgcagctgctcagcgcgtcgggcgccaccgcgtcgagctgcgcgtgcgccgtggattccccccaatcatggggctcccgtagagccacacccatctcctcggaggacggccacacgagcagcagcctcgccggcgcgccgccgccgccgcccttcctcgacaagccgaggcccgacgagaacacgtcggaggcgaggcgcgcgagggagcccggcgagtcgtcgacgactggtatctcggcgcggaaccgcggctgccgctgctgcttcctctgcttgccgagcggcttgcgcagcgcggcggcgaggcaggacctcgcctgggacacggcctcctccctcgacgacggcggcgagggggccgcgcccgcctgcgtggacgacgaggagcggacgggtcgcggcggctgctgctcgcggaggagcagcgagagatggagaagagatcgctgccgctgcggtggcgcgaactgccgagatggtggcgggaacgacggtttgggcgcgagtttggagggaggagtgttcaggaagctcaaggccattggcgccagaagcttcgctgccgggaggagaagataaggtggctgcttgcttttgacatatcaactgctctagtatcagtatgtctcattggccataatttcttcagagattcagtgctcaagctagcctttttttttttttcacttagatgtgattacaaagatggttatgactaactgacagcatgctatgcttaacctttgtattgaggcagactttcaacatcacaaaatgggcaacgaattccatcattagtcactgaacttcagccaacaatgaacagtcagtgtgaagaatacacatattgaagtgcttcatcaaatgagcacaccgaggattatatatgtcgagaatgcttgtacccacacaaactacaataattacaaacaaataatttcatattctcagtgtcattggactgtcgagcatgagttagcgtaagcaaagcattaagctgaaccaggaatgctgaatttgcaggttttgaaccatgataaaaagttattcggttcccagactctcaactcaggctgtgtttagatccaaagtttggatccaaacttcagtccttttccatcacatcaacctgtcatacacacacaacttttcagtcacatcatctccaatttcaacaaaaatccaaactttgcgctgaactaaacacagcctcagatgaatatttcaggaacagaacttgtcaaggattccagggttgggtcatgagaagcagcgtttccttgcataggcagaaagtggtatgtacaaaatcatgcgaaacattataggaactattcaagtcaaattacaggtcatgcctcaaacaatgaggtagatattcatgttcttaatattcaaattcaagcattgttcactagaggttcagattccaatttgttcagattccaatttggtaatcgatttacggttgccatgcaacctgtggccctacagtagatgttcattcagtgaggtatcttcagaaaacattcatgccatcagccatgtcaacaactcaacataagaaacatgaggctgttcagaatcccactcctaggggagtaaccacaagagtaaaacaagttacagttaagaattgtgatggccagtttcataattcaacaaggcaacttcactcaacaaatcatctaagcaggtaatagctcacctcgttttgtgtatcttctcaatcttctcaatccccttctcctcaaactcaccctaagtgaccaaacccgacagcatggacaaatgaaccctcagaaagccagaatcaggtgcactaattgatccattggttggggattagaacatcatcttattgctagtcagatattcggatgacaaagaaacaacttagtatttttaacatgtgctacaatttagttcccaggggcggaaattcagaaaggttgcaggaagagacaccagcacgacatataacagaatatatgtgatcaacgactcaacgaggaaattggtggttaaatgcagggctatgtgatcaacgaggaaattcgtggttaaatcgagggctatgtgatcaacgtttgatttctttccttctgaatgaataaattgtataacattcacttcctacataaattgagttttctgaaattaggccaacattacccacgaattccagtgttgtggacctgctagtaaactgcaagcttctataatcctagcgagcacacaaattcgaaagctttcgttggtgtcaagtgaactcatctacagcagaatacaaaatcaaacatgatagctcaaatcttatcaagatactcatcaacaactcaagttttatttcaagataacgcctgggtagctgatacaggtatgcagacgaaagatcacacctatattactcataatatataaaacctggtacagctcaagatgcccaggtgccggagcatgtgggatgctcagaagacgatgcggaactgcggcgcgccctcgccggcggccgggacgagctcccagcggcagggctcgaggtcgtcggacacggggcagtaccccgcgagcgtcacggcggcgccggactccgccgccgacccgaactcgaagacagtcgcgtccgccttccgctgccgccgcagcacctccaccgccccctgagtgcccccggccgccgagacttccgccacacccgcgccacccgttcccttcgccggctcgggcaagccgccgccgccccgccgccaccacgagaagagccccatctggattagggaaatattagggtttttggactttttggtgggcgaaaaaaaaatctgaaagaagaagagatcgtggagatatcactacccagtgggccccacatgtcagcctctccacaagtttttaactaaagctatatgggcttgtgagttgtgatgcgatgggcttctgggcagcccagtaggaagaagcggcccacggagattagtcgtcgtcgtcgtcgtctccctcgcatggcaaatgcagtggaaatctccagaaaaaggaaaaaaaggcgggaatcacatcgtctactacctccaaacggaatcacacctctcatcctctgctttccgcaaaagccatcaccaccaccaccaccgcctcttcttcctcctcctccgcgtacaagaacctctccccgcgtgcgcccagcacacacacctgcgcctcatctagacaggcagtcgatcgatcagtcagtcgccatcaatgccgccgcggcgggggatcgaggtccggcaggcggtcggcgacggagcagcgccgaggtggcgcatgtcgctgctggagaacacgttcagctcgttcctgcagtcgatcggcggcggcgtggcggcggacggggcggcggcgagggccgtgttcggggaggggtcgctgttcagccccttcctgttcggcaagttcttcgacccggccgacgccttcccgctgtgggagttcgagccggaggtgctgctcgccgcgctccgccgcggggccaggaccaccgtcgactgggccgagacggactccgagtactacctcagagctgacataccaggtaaattcaccatctcgagtactggctttgattaatttctctcctgtttttctccatttctgcgtagttaaggtccatatctgctttctgtttgtgcatattgtgattagttctcatcactaatcttgttagtaaaaattaatgagtatagcatgttttagtttgtgtatgctcttccttagttcatagattatcttctttagcatgttttagcacgttctgaagggaaaaaaaactgagttaaccttacacatttgtcagagattatcttgcttgtgcgcaatccaatcttcaggttaactggcaggaacagctgagcctgataaatgtttgtactttgtactagtgttgctggatcaattttctgaaacagaagttcttgcaaagagtgcaccaaattaattcacatgccgtattgctatcagcaagaacttcagaatcagattcagatgccacggagacagggagttttttcaacttcctgtaggaaaccaaacagttgacatttgctagaagtagccgggttataccagaggataaaacttgcaacatgaaagtaactagggtcatgtggtttccccctttttcttcctgcgcttttctctgctttttcactacagtaacattgcgatctcgctgtctctgaatttacatattctttgcgtctggttgcggtgcaccatccaccatggtccaaaaaaaagcagacatttttttaatcagatgaggaagagaaaaaagcagtcatggcgtgtgccggacgattacgaaaccctaaaaagaacctaatcgctttcacattattgtagtgaaactagtgatcgagttaatcaagaagcaactgctgagagactagccaactgatttttgttcaggtgggaggaaatgcgacgtggaggtgagcggcgacgacgccatgagggtggtcgacgtcagcgggctgtggcgggcggcgccgccgccgcctccgccggacggccgggactggcgcgccgggcggtggtgggagcacggcttcgtccggcgcgtcgagctgccggaggacgcggactggaggaaagtggaggccttcttcgacgacggcgaggggttgctcgagatcaaggtgcccaagtccggcgacgcccaccaagcggcggccgccaccgcctgagaatcctaacctcgccggcgtcgccgcgcgattggagagagcaaattattcttcttctgagttctgacagtgacggtgaagatggcacaaaacttgataagaatttctcaaagatatggagggaccaaaaagtgagcaaagatcatctcacacatgttgcatatgcattaacgtccaatccatgtgcctgcagatgatttgtactagtactaatgtgttagcttaccgttaaaaatggatcattaattagcatcgtgcatatgcatcagcatcacagtcacagcatcgctgtcgaattggtcgacgataaattgggtcatcgagatcataaattcgattccggaatacatgaacatatatacatatctaggtcgctgctttgagaaagttggattcttccattttctttcggccatgatgtctcgctatcaccccgttcttttttctctcccagtgcggcaagatgagaatcggaattgacgaaagcaagactgctttttcttcagatcttcaggtaattgtaccgcgtcgaaactttgattggcctgatggctgatggcactcatcattttggtcactggattgctttagatttttggtcactggattgatttagattttcagcaaataaataaaaaaaataaaaaagcattttttttcactctcagtgcgcacctggcagttgttcggtttttttgtatcactgtagcctgatgccctattaactgaattctcatgccactcgattagatgaacatgtcgacaagtgtcactaggaactccctgttctttccgattctttatcagcagcttttactggtgcatcatgtatggtatcctggagtaatctgtactggcaaatgacaagaaagtgcaacctgtgaagtatcagtacaggtggctcctataaaccggagctgaattccatgtccttttgctctgtttctccaacctaacgttcgtcaaaatcaatgagaaaaagacagagatacgacaaagcagggaaacaaacataccccaaattgtgtttcagtcacgctcagagatgctgaatcctgtggattttacccatctagaattggcctacatgctcgttgtgttcttggagagaccgcccctgggatagaaaattggggtgcagtcgtgcagagaatgacaggttcaggttatgtttattggggaatttcagcctgtatctgaactgacaaacaagagtctggccggctatggttgcttccgcagtcaccttctcacgggctaataatgcagataatattttggttcttgagaaaacaacgaggaatgccatattttttatgtaaaatttagtatcttactttaactaatcatctgagttatggaggtattgagagactaagaggccaaattctacactgaaaaatgtgatacataatacctcttcgaatacaataaagtcacgcaataatgtaactactagtctactacaaataatcatcgtgaaagtgaaacatatcagatacagttactaagctgactgatacaaacatgaacaagaactgtctgaattgagcttctcctttgagctttttggtcaaatgatttggggactccctttgtagtttgatcaggccagtatcaagaagccacgtattttactccctctgttttcctagatagtacttcctccgtatcatattataagactttttagcattgctcacattcatatatatgttaatgaatctagacaaacatctatatgaatgtgggcaatgctagaaagtcttataacctgaaatagaggtagtagataatttgttaccattgatcatcactttttcaattttgaccagtacaataattattgttatatggttagtctatgatgaatgaaagtttaatacctatacactttgataatttggtatcttttaaagtacttattcttttttttggaaaaaaaagaagaaaaattgtcaaagttgaaatgtgaatagtaccttgtactctctcctcgagacttcataatatcccaaacgtatctaccataatattagcacaccaaatctcatactagtatataatcaaagcacaatcagacaaggatgttgtggatgacatcacaattgtcttttaccccatggaaagagtccaaagggatatcctatttttctacaaggaaatgaaaagaggatctttcacagtggtcctataagtagggaccatgtcattccaacaagcaaaccaaaacagccttgcaagcttctcaatccacttcactaatcactaaccttgcaaattttcacaactccaaagagcaaaactaaattgtacgaggtagcaaagcaacccaatccttcagcaaaaaatgatcctaacttgcccaatggacacttgacaagtgtcgcggatcgcagccatcggatgcaatttgattggctcttgatcagcctccggatcgtgtagcgcagtggtggctagcacgtaggtagcaacaaagccatggacatggagcatgagctcaggggcggcggcgtcggggcggcggcgcatgggcatggctccatctgcttctccggcgggccggtgctcgtcgacgggcgacgcatccagcagctgctcctccactgcgccgccgcgctcgagtccaacgacgtgacgctggcgcagcaggccatgtgggtgctcaacaacatcgcctcctcgcagggggaccccagccagcggctcacgtcgtggctgctccgcgcgctcgtcgcccgcgcgtgccgtctctgcgcggcggcgccggcgggcgccgccgtggagtttctggagagaggccgggcaccgccgtgggggagggccatgtcggtgacggagctcgccgactacgtcgacctcaccccgtggcaccggttcggcttcacggcgtccaacgccgccatcctccgcgccgtggccggcgcatccgccgtgcacgtcgtcgacctcagcgtcacgcactgcatgcagtggccgacgctcatcgacgtgctgtccaagcggcccggtggcgcgccggcgatccggatcaccgtgccgtccgtgcgccccgccgtcccgccgcttctcgccgtgtcgagctcggagctcggagcccggctcgccatcttcgccaagtccaaaggcgtgcagctggagttcaacgtcgtcgagagcgcgacgacgacgtctccgaagaagacgtcgacgacgctgtgccaagaactcgcgtccgtgctgtccgacccgccgtcgctggggctaagggacggcgaggcggtcgtcgtgaactgccagagctggctccggcacgtcgcgccggacacgagggacctcttcctcgacacggtccgggcgctgaacccctgcctgctcaccgtcaccgacgaggacgccgacctgggctccccgagcctcgcgtcgcgcatggcgggctgcttcgacttccactggatcctgctcgacgcgctcgacatgtcggcgcccaaggacagcccgcggcggctggagcaggaggcggccgtcgggcggaagatcgagagcgtcatcggcgaggaagacggcgccgagcgctcggagcccggcgcgaggctcgccgagaggatgagccggaaagggttcgccggcgtcgtgttcgacgaggaggcggcggcggaggtgcgacgattgctgagcgagcacgccacggggtggggcgtgaagcgggaagacgacatgctggtgctgacgtggaaggggcacgccgccgtgttcaccggcgcttggacgcccaactagttgagcctagcttagcaatctacagtatacatcaagtgattaaagcttaagctggtgttagactgtctattagctcagaagtgacaacggagaatcaactgaggaggaatttctggttggatttagtggatcgttttaaacttctacttccatgacaagatatttcagttgaattcttgatgttttactctcaatctagattgttttagatcaattataaacatgcacctcccccaaattaatatccgtgaattactgttggaatcgaaatattttctggtgagaatgatgattcagagggaaaaaaacggacgtgagtttggatgcttaattgggtttaggcccattatattgaagcctacactaaaattcacaacccaatccaattataattggcccaaaagttatacatcatgtaagattcataaggcccaataattattgggccgtgatgagcacgatccaattgctacccacaaggccacaaatccaatcccatggtcgccccaaccaccaccgctgcatcgccgccggcgatggaccggcgagtccagcggctggtcagcggcgtcgccgccgccgcggccaccgtctcgctcctgtacctcatctcccacgcctccacctcctgcttccccggcgccacgacgcttcccctcgcccgcttcccgcgaacctcctgcgacgccgcctcccgccgcgtcgtgccgccgggccgccgcctcgcgaagctccgcgcctccgcgcgctggcgccgccgctccgtggcactggcatcctcctccgcattcgcctcgctccgtggcctccgccttctagctggctcctcccgtgccctctgcctggccgccggcgccggccacgccgtcgacgcgctccgcgccgagggggtcggtgacgtcaccgggatcgacttcgtcgacttcccgccgctcgttcgccgcgctgacccccaccacctccccttctctgacggcgccttcgacctcatcttctccgacgaccccgcggggttctccggcgccctcttcccgtccaggttcgccgcggaagccgagcgcgccgtccgttctggaggcaccatcgcgctcgccgtcgatcggcacctcgatccgtcggccgtcgcggtgctcttcaagaggtcccgcattgtagaccagagggatctcaccatggatggatcacaggttaggatgctcatcttccagagtaatggcactaccttgaactcgcattaattcgtttatcattgattgatgccatgttatgctaattactgtttatgttcatgttgtaatgttagatgcgtgtataaaactaagctccgattatgtgtaaattaagcaaggaaaaatgtgacattatctaatgccagttgatgtgcatgaatactaccatggacccatgattttccttcagccatcacttttattttgctgctacaaaatactaaatcagcagctaccaaagctaccatttcatcataaaaaacatgtgctgaagcctgaaattgctacttaacagacgatactggaatgccctctaaataataacacaacccaaaagtttcatttttttccgatgtacttgttatgcgctgcaattaggataaacatcaataaacttaaccctgagtatgaagcttcttggagtttggccagtccattttcttcgctgcgactggtcacttgttgctacaagctgcttactacgatagttgattgagagacgttagtagttaattaagctatttgcatctggcgccactgccacactttggaaggagaaaagcatagtatctactataatactacttgaacacagtgaagaaaatggctcacatatgatatcttaagatcttgtgcaatcctttaatggcgtcactattaaacaggacaatttctgataggaaactaatcataaatcagtagatttccttgtatggagtaagcatttagttatctattcttctttcactaacttttggagagtggtaccctgctaagtgtttagattagcatcgaaatataggcataagcaatattgtcctcatttcagaaaacaatgcaggtcaatgttcaccaaggtgccaagccctaatcagaatgtgggattacataacagtgtctagctcctaatttgcgataggactaggatcattcacctagctgggatgcagatcagaatgtaggattacataacagtgtctcttgcttttcatctttccatgcattcttcattttgcatatttggaagaaattattttattagagtaaaggccagaaggccatgctttttctgaaagcgagtagttttgcagagttatgctggggttaccagctttacattcaacccagagcacacaaggcaaaaagaggagggcaaccaaaatgccagaaagcagggtagaaaaacagcttatatctaatcgaagcagaaaaaaccacaaccaactccagaacagtactccttaagcagtgaacagtctcttgcaacgctgctatcagggactccaaggaactgaagggaacaatctcacactgtctcagcgacaccttacactgcaacaaaagatgataagaaaaggaattgttaggggggttagaaccagcttgtgtctgaaaataatgccatttcacacaatccagagttgccaatacgctgcaagacgaagcataatcttaactctagaaagttgagatccagttctcccaatgtcaaggttaaaagaatcctgaaagctaatatagggatcatatcccaccccaaggcaacccgacaaacacaccaaatgaatgtgtctatagggcaagtaaatgaaatgtgatttgcatcctctaactggtcacagagttgacaaaatttagatctcacccaatttcttctctt

SEQ ID NO: 26479 - DNA, 6320 bp, Oryza sativa
ctatagactgacttttggtagtacaattcctgtttttctctgaaagccacaggttagcttatcaggatttgcttgcaaagctacattttgcagcaatccttctagctcttcccaagaagttaactcagcggtcccaaaagacctcgtgaacgttaaaatccatatttggatggaattatgacgaaggtgtctctcttttttgccaatgattgtccacctatccctttatttgcaacatctataatggcataagacatatatagtacaatgttttgttctcttctattgctgttctgttggctttgtgttctcttctacctcatcatgcctgcctgcctgctgaattttcttcgttggagtcttcgtctttcctggatgcatgcatatccacggctggaaaatgtgtggaatggtagaatgattggtctttttctaggtaaaatcaattcaaagtcttttcagtaactgttcaccattgacaaactgcggtaaatgtttgttcttgccgggcctttgttgatgggcgacacctcgaggcccagcgactttccttcggtctatagcctacaattgtacatatatgcacaagtcaagatgccgctacaagaaaaaaagggggcccatatcacacttaaaagcttggcctgccaataattttgatgaatgttttgttcattacctccaatttgaccaaaaaaatcagcaagaaacccatgtcatgtggtagtgtgaccaaagagctttaggtggccctgtagcagaatttggtaatcacgaatccaaatatatgaagcccaaattctcggtactgtaccagacaattggacacagaaccaagcataccatttggcttttgcaacttggggatttttttttctttctgttttgtgcagaactggctgttattgcagaaattcctgcattccaaacaggccaaggtttatactagctgtgtggaggttctgaatatcttcgtttgttgtgaaaaatcctgcactccaaataggactaggcttaaactagctgagctcaaccgtagggtgtgtttagttccacgttaaaattagaagtttgaaggaaaaaattagaagtttatgtgtgtaagaaagttttgatgtgatgaaaaaattgaaagtttgaagaaaaaattgaaaactaaacaaggactacaactaatgaattcttctaccccggaggacgctggagctcccgtggggggtttgaggggaccctttgagtcgaacttgataattgtttacatgcactacactacacaacacaggcagtactactacttaatatctactaggcaggggcggagctagtgtatactagggggtgtccaggaacccgatcaagaaaattttttagctataccttatctattttcatcatgtatacacctcctcaatgcaaacttagacacctatattagtttaaactcaatctaaagtagagtaaattaagtaagtgacaccaccctttattttgctgtagctccgcccttgttactaggcatgctgcaagcatgcatatgctctatataatcctagagcaagctgacaatgcaaccacagtacagcagtcatagcctccgattgattgtgcgcatgtcggtcgatcggcttcacgaactgcgtcgcgacgatgacgacgacgacgacccggccgatctgccaatcacatcatatcggcgcgtgctgcaggccaggctccatcgatcacacgtacactgcacccctcgcacgcacatactgtacatctcgctgttaggtcgcgacgccactgtcgcccgacggcgaccgcactggcgaccgcgatcgctggcgagatcggaatgttcccccgtcctgccggctcgatcgatcgtcccctcctcgtcgccaccgtcgccgtcgcacttgaccggccggccggccggccaatcgtcggagcaaccaccacacaccctgtacgtacgtgtcaccttcctcttgttgcctatcgcctaatcgaccaactgtactgcaagtgtgcgtgtgtgtgtgtgtgcagcatcatcgttcgccagctagctgggtcacgcactgtgtgtcacaagccacgaattatgccgggtagtgagactatgtgtcgactactgccaatcagtagggattgtctgcagtagatgtcgctgatatatgggatcccgggtccacgtgtcagccactgcgccacgggaaatgccaagcaacaccgcaactgtaggagtagatgaaacacgggtgcatgggcctgggggctagcttgtcgtctcgtcgccgatcgatgcaaacgagagatgtggcttaattcctgggcactgcagagcgtggccgttctccagtcccagatatgatgatgatgaggaaggaggaggaggaggccggcgacaaacagccagggacaagctaaggcaatggcaccagctgacacagccatctccctaccatccgtgcaccagctctcacggaatggggctcctgccctacatgtccccttcggttccttcctcctgcacgtgtgcatgcatgcacgccagccacttgggctcactgtgctgatctttttcacatgagatatatatcctattgattaagaaattgaataaaaaactttgtttatactcttttggagcccattagtaacattaaagaatcgtatgtgtttcaatctggatcactattctcgtcacgtacatcattcacacgttgcaatctgatttgtctaggatcaggtatatatatatcgatcccagctcccagctgtacttgtgtgtgcttgtgtgttcaactaccttacccaaccacccaagttgtcacttgcctcttgatgaagatactaatactagtatactactgaatattaatcattggactattgtgtgcacgtagaacaagtgagtgtgcatatacactattcttttcatctcgtattatagcaatctattacgaatctggatatgaacatatgcagattcataataatttaaaatgtttctcgttaagtattagttaagtattagggagcggagaaagtagccagtattccacgtatttggatggataattcatggttatggacggtcaagatgtagacacgttgtgacatggggtgtgccaccctgcaggtggtggtgtggtcaacaggctggttgccgtcgagctaggcgcacgtacgatggaacgacaagcgagcgtgagacgcgcagggcacgttgctatcatgcctcgcctgccccatgcagcgaccggtcgtcccgggagacgattaaattcgatctatcgatctcccaacgctctgggccggctgccgcccagctcgctgtgtgtggcatgtagtgggtggatggatttctcccacgtgtggaaatttagggttcacgattccgatgccggattgaaatccactcacgagcgatatcatcagatttcggtggaatacgttaagaaaaccgataaaaaccaataaaatctgaatattttttattaaaatttaaaattcagtggtatatggtggccaccacacgcatgccaagagaatagtagatatggaataagggagaagccacactggcttaggaggaggtagcaactagcaaatactactctctctgagttgataatagttgtcgttttggacaatgatacggtctctaaaaaacaactttgaccattattttttattaatatgtataaaagtgttaacaaatatatgatcttattaaagtactttttaagactaatatatacatgtagtcactatatttgaaagacaaatatttttaaaatgattcataatcaaagattctaaagtttgacctcacttttatttaaaacgacaagtattatcagcccggagggagtcctagctagtccgcacgcatcgtgacaatgcacatatgagtaaccaaccgcacattgctagtactatccgaaggcaaaattgccacagaatataaaataaaaagtctgctctttaatttgttggtgggcatcgtgagaatgaggctttacccaacaacacctaaaaacaaaataatttgttacatcacaccgcgaacattaaaaatacaatattcacttggttgagatgagagaggaaccacataaagtatttattttacccttgtcttagacttccttcccaattggttgtgcatggtgacggcggagctgtcttgggccttcgtctcatgacagagtggctcttgcacggtgatggcgaagtgatcttcacggtgtttgtggtagcagaaccacccccaagcagcgatggtgttagccctgaggaccaggggattgggcgattggcctcaacaatagcgaaccggcttcgagataatgccaacgaagcgactccatccgtgtggtatagcgtgcgttgcttgccatggcatacttggcacgaatgcactattgagcccactatcatcacttgttgcgtcgttgttgtcgtcgaagccgtatttggagtcatggggatgaggagctgcccatttgattgggtcaaagatcgaaccactgggctaggaaaaaagtttggtcctaggggcaaagtatccatttcacaaaaaaatgtctctcgaaaacaacaagaaatcataaaagatgtgtgcgtgtgatattcacaagtaaataaccacgtctttacagtgttcatggacaaagctacattatcacattgcctccaacaaagatcatattttttttccatggcaaattctttgaatgttggtgattgatagaacaactctgaatagttctaataatgtttatttttctatataaattttaaatctagaagtgattaattatattttggaacggatggagtaaggaataacaaaatgaattatacgtttgaaaacaaacgacctgggaaacaaagctgtagtacttttccagaggagaaatcaacaacaaagatacggttggctaaaacgacagcaaacggaacaatcatgtcgaatccgagaaaaggggcggccctttcttcctcctcctacccctctgctgctatagctgctgcatcgatttgcatatgaatgcatgcattgatcgatcctacagacagatcgatgctttcatttctcctttggattcaggcatcgagtatttggataagcttctcctgcctttttctcttgtcacagtcactgacatcgatcgagctagctctagctatgccagggttaatctgagccaaaagaatcaacacaactacagaagcagtgttgaaaaaatggggcagtgccttttgtagtttttcatcagctgcaatggagtgcaatactgcactggaccaggcagggtcatggtcttctcttgaacaaggactcatcagatcatatcaccagatgcagtcagcatctgcttcgagctgttgctgttcctgtcaggaatctgctcctttttttcactgcagtgtactactagccatgcaagagctagggggacatggagtcatggagcttttgcattctggccgtttggtgcttgtgcttcatcacattcacatgcagtttcatgatcaaatagctcagctagctgctgctgatgctgtcaccagccaatcttcagagaaagcttgcaccaaccaagcacggacttgccgatcttggagctttcctttgcaataagtttcgatgaactttttgccggtgtgacgtttttccacaaaagagaggacacgaaaaaacagcgagaaagaagatgaaaaggtgacttcaattttttgtctctgtattctgtcatgcttcatagtttatacacaaatgggagaggcacgcaagaacagcaagaaagaatatgaaaagtgtaacttaaaaaagaatgacaaagagacagtctatcagggaaaaaggatggattaattggtgcagaaacgtgaaacgaatagattgatccggtcaaaaaaaaggcctccttattgtgttgattttagccacatatatatgttcatgattcatcgtgactcatgtgtacaatcctatatgcttaatgtatcaccatattaacaatgtaaaaatggttataacgtgaaaaaaaaactattgagaaaaatggttagatgcgtggtgaagtaattaaaaagacaattctcagccaacaccatggcaaggaaacatttttcttcaacttatcaacttatggataatgtgtaccagttctcgaactaaaatttctaacagaaaaaaaaaattctatggacgttagtgttgctttgatacattaaactaagctatttgttagattaatatatagtaaaataatatttagttcatcccaatataagcaattgttcatgatatgcccgac

SEQ ID NO: 26480 - DNA, 598 bp, Oryza sativa
ccttgagtacgactacgaaggacatgaaaagcaccgcacaaaacagtggaatctgtgtcgaaacgattgacacgagtggtgaaaataagtcgtattatgggaccatacaggaaatatgggaactggactatggcctgaatatccaaatcccagtgctccgttgtgaatgggttaaagacacaacaggggtttccgttgatgactacggggtaaccatagtcgatcacagtaaaacaggccacaaggatgatccatgggttttagcagagcgtgtggctcaagtgttttatgtgaaggacccttcggatgaaagaaaaactattgtcatatctggaaagcaacagatcgtcggcatcgacaacatcgaagaccccaatgattacaaccagttcgacgatgtaacattgtttactgatcttcctatgcgaattaagaaggttgagagtacaatcgataaagcgaatatgtcgtacgttcgagcagatggtgttgccaaggttatttagtcatagttattttgtaacctttagttgtcattgtgttccaaatgtacgtgcatgaatttaagtcccccttatgttgtactcattagcatgta

SEQ ID NO: 26481 - DNA, 2129 bp, Oryza sativa
  unsure (1)..(2129): unsure at all n locations
ccgctccccgccatcgtcacctacaggtcagaaccccggccctctcccgctcttgctaccctaccgtacgtcgtgctctctcaggcagctaccgcgcaccgcgcgctggactggtttgatacaggatttgcgtccatttagcgcgtgttcatatgcacagcttgcaagttgcaacgtttcgagtgtttcagcttaccatgcatgattattcatgctttgctttgcttttggggttgtatacatttttcgggatggattttgggcgctccctgtttttttcccttttcttttgaatttttagcacagattatttactcaatgcttttaaaagtgtgatttctctaatgcttttaattagtacttatgcggctagactgcgttcgtttgaaacgattgggatctttttcctttcccacgtaaaccacataaacaggaacagtgtatgattaattaggtattggtttaaaatatattaatatgattttgtaagcaacttttacgtagaatttttttaagaaaataacatttaccacctcgtaaaaagtttgcgtggaaaataagaaagtagtagttaaaaaaagtgaagcgaaacatacctgatgaaccctgagttcatctcgacactcaaggctgttgttggcccgatctttcggtgagttgtgataactacgatttgggagaaacgttgacgatccgactacaactgtacaaatccgttgcgttgcgccttagcgatcgatacacctctccgtgggttgttgatcttgccggtgcaagatcacccttatccctgcaagctatcgagaccaagcaagaccgagatataaagcanctgaattgctagatagacaagacgcacaaagataaattgatacacgataaagtggggttccgaacaagcagacggacggtctagccgacacgcgcgctgcaagcgaagtagcaatggctaaacttacaattaatcaaaacccgcgaaactctgaaggggtacctaactatttaaagagataggaggacgaccaagggcactctagggtcgtgctccacctggttggggcgcaccccacttgggccccacttgggccagggtcccaaacgaagttacaagcccaaaggcccatgacaggtgacgcagcaccttgtttgttcatccgcggatgactaggatggaatttggcgatgaggctggatccattggaaagaggactccgtaggctttccatcaagtactcacgggccaaaaacggaggtcgtatgcagattcggcggccgtttgaaatcaacagtgcagcaggtggccgaatcggattccagcacttggagaccttgatcttgatgtcttcttgttcacgcattatgtgagcaatggttgtatccgtagtagccatggtcacatcagtacccgaggaagatccaagctttttctaactatttctttaggcggtgcagagaggatacgacaagaaaaataaaacggcaacttgactaaagagtgaacaattttattccttaatgctggccatatacatattataagagtcacgagctccctcaggaatcaaacactttgtagtttgtactctagtatttcctatactcactccgtcactcgtcaatacaatataggttaattcttcatgagacttgatatagtttttagtactgcgatttgtttcaacaagatgagtttgcgccaaggtacgatgccgtcgatgcgtactagatacatataaagatttcgcctgcttttctaccacatccagaagttgaatttagaagagtttgattttgaagtcattttatgaaaacaattttttaatataggctttcaaaccgctaataaaaatattaaaccatatttttgtttgcttcttttcacgtacatgtcagctgtggttttgaacaatcaaagtcgtatgtacccctgcattcttaaaaaatcaattctaattataaacgtagatatatgcgtgtcaggtttgtaaatagggtttaatcttcttttagacagagtagtaggcccaaataatttaagcgaccaagtagcatgtattttatttccagtacgtgacacttgtgctctatccgctattagtagaacttttttttttagaactggtattagt

SEQ ID NO: 26482 - DNA, 7936 bp, Oryza sativa
tgcaagtagctcatcagctttgcacttcaaagttgtgttttgctcaagttttgcttagtagcaacgtagcatgccttttatttactccatcgcttggcaatttggcatgcctactgatgattatttggctttgatattttattggtcttgcattactgttactttggctggatgctgtagagtgcagacacaagaaacgacctgctgctgcactcaactaaaaatgtttggttgcactggttttatataacattgaatgacgattgaattgtggttgcgctgcaccaatttgttacacagctgttgattgcatcagttcaactgctcccaaactgacaaggagtatcacctgatttattggtggactgtctcaacctgtctcagttggaacctcgtgtaaagaatgcgacaatcgataggtataatctcaccaattgtcaaagttcagttgtaaaaccattaaacaagcttggtatgtcaaaacccaggatcaatatattctgttcatatcttagctagagcaaatgataaatgattcaatgcacaaatgtttgttcatttaccaaccaaaaatgttagaccagtgcttgttcatctatcaaccaaaaaatgagtacatgaattgtacaccagcgtgatccatcatggctcgccggcctccgggatgctttgcagcgtgggctgccagtgccgttgttggtggtgatcaaccacctcgccggcgttgatgatacccgcaatcaccttctcgtcgccggcggcggtcatggacgccatctccagcaactcctgcagctgcctcttgctgatcctgatcctcacctcgacgcccgtcatctcctccctctccggcgacccaagctcgccgtcgtctgacggcgcggcggcgcaattgcccatcttcttcttgcagtcttctgaatatcgaagaggccgttcgtgcgagagacgacgtatttgtagcttctgaagaaggcagagaagcgggtcagaaagggtggctgatgcaacgtgcaagctgcggaatttatccactgcgatacagtgcaaactctgaattccaatgccaggatagacctgctattttctgtctctctctttcctgacccacagaaactgggtttaatgcaactgttcatgcacaaatgagaaatgcgcactcaattccaaatttgtgcttttaatacttggttgttgttcaaaagtgtacattttttggtcaaaaatacctgtttcagtctgaataaaagggttgcagttctttgacggagtaaatacaaaactgggagttgcaaacccgcagccatcatcgtgtgaactttatgggggaaaaactatggcagatgcgatcaggcagtctgattttcttaatgtttacagtttagtgttgaattttattgatgttttcttggaagcatacagacatttcacagcatataaacaatgttttactaagtggtagaaacacgagcatttaacaaatcaaacaaggaagcactcgtagtttctttctgaagcatttcaccttaaacaaaagaacaccacacgtgcatctttgaaatacagcgtactttcctctgataagttgtcacaagatggtcacaagatgaaattcttggacaaggaggcaaatttgaccatgctgacaaattgtcctcttagatcatggttacaggatgaaactcttggacaaggaggctaaattgtttacaatgataaatgaatgctcagcgtcaaaaaaaaaaaaatgaatgctcagtttcaacttttactgagttgcactccgttcgtgtacaaaagttgatttattttagaacagaatgaatactatattgtattcgtcggtacccaccttaaacaataggatttgttcctgtgtgaaaggaactgttcatcatcagaaatatttgtatgcagttctagtaatctcaaagcttccaggaaagcaattatatagttggctaagcccataactgcaggtgatgtgactgtaccacctaacagcaatctttgtcagatccaatttttattcggttcaggaaaagcccatcaattcgataaccactaatcttgaatcttttgcaactgcacagtggttgaaggaagtcaaaatggttcgaatttattgtctgaaaaaaatggtgctaggatcgtatagaaggaccttgcttcgtcagatacttaaacttggaagtcttataactgggactttaatttctagtaacaaattgatctagcaatagagctagtaaaaacaatggtctaagattattgtttgcagtgatccttgatctgatgacctctaccagtatcaactcaattgaaattccaaacttgaaatagtagtatatattagaatgagcgtacactgcagtaccaaaagtgaatagtatccaatgctggatacatctgacacctgataagattaacaatccgaaaatgcaggttctttacaaatatgatgagcaccctgaaataaacaactattacagcagccacaagattgaataaactcatgtgcacaacaaactatagatctttgacattctaagaaccaagagaatcttaaatatcagcagaagcatctatgtaagaatccaacaatgcaactgattactgatcaattaaccacacttactagatacagccagtgtgtgtgtagagtctagaactgcctatacagcgaagttaagagctagccatgttcatatgcccaccattttgtttgtgccaaactacaagataagctccaatcaatggagctgaaaatgagatacagttgcagaatcataatttatgcttcgacccaactgcctctgatcaacgaatttaattgcaccttttgatccacataattgatagataggagagtaccaccgtactaggcttggtgatcagatgctagtattgccaacgcagatattatctatctttatggactactgatggaacagtagttgaagatctctgaacattaactgtttgtagaggatctctgaacattaacttgtgaaccaaataagtcaggagtttacggctcgacattaacgacgaccagtaagtagaatacagcctgcatggaaattttcagaataaacactcgtacaggtacagcaagtgacttgaatccttcattaatttcctgaactgctctgcttagtgttttctgaatttacagttaacctagtactctactatatgatcatctcacgaaaatcaaggtcaaaactacacatgagcattcagacatccaagcttcctttccctcctcccaatgacatatatagccaccgtgattaaacattattcccaacttaattaattcatccattgattaatcaagctattggaattctaaagcactactggatcgatccaaaacatccgcgatttttccctcatcccaatggtccaagcatcgatgctctgaagtctgaacttggcccaaaaaacccccacattttcagatccctacgcagcatcaatcacaagatccaagaaagagaaacaagagaaatagtgatacaactccactactccagaaacaatgaaacatgcagtgttcagatgctcgagctcagatcactatgcttcgagcttgcagcttccatgcaaaccaagagcaagctctgctcagctggcaagactgaactttctgaaacttcaccactcattctgaagctctagttaatcctacacactataatttatttggcagcaaggatcatgctcggattttgtatattagagaactatatcaatcatcccaaatggtctctgtgggggccaaccagccactgtgctgcacacatggtggcgtgatgctctccttgaccatgccaatgggagctgcacattgggtaccatttaattagggtggtctggctaattaagggagtgtgctgacatgattgcaatggcttctctttacgattattcatctccccaacttggagcttgcggctccactcaaccaatatgctgctgatactagtagatgtctagaagaaagcagcagcatcctgtatgcaaaagctttgcatctgcttgccttctctggtttttcatttgaggcaagttgatagccccctcgtgcactcacattattaaccccagtttgcaccaaaggagaaacatggctgattagattagttttgtagggttctctaaagatgtactgataggttgctacctgctagtaactttttatgagataggagatattggtgtccccagccaagtataaaaataatcctcctactatcagatgtaagacattttagagatgagcatatgagtcaagaagaaaattgaatccattttactccctcaaacttatactatcggagcacttaacattctaaacaatttttcggctcagttttataccttaaactattcacctcactcctggtatttctctctttcgctataagtcgtattttacactaaaattatgataatgcattataacactaagaccaatttaaacatcgaggttttaccaagcatataatcataaaaaaaatactcactctatcctaaattgtagggcgtatatcatcaacgactacaaagttagcatcacatgaaagtcagtagataaacaaaacttgcgcaaatcaattaagtcacttcttcggcttcttgaaaactcctatcaatgaaattgatacgttccaaacagaagtatacataacatgcactattgtctaagctcaactatacgaagaacttttgctcatggtgactttgttaatcttacgatataccggtccggtctctgggggtgcacgtataaacgtgtgttcatagaaacgagtgtgtacacgaaaaagaaaatccaaaatatgtaagtattttttaattagaagtagatgagaatgattgtagaattgattgataagagaaagtagataaaagagaatagttgtgattgattgagacgagaagataggtgaagaaataattttatttgaaataaggtagtactaaaaatagctataattaagaacagtggtagtacgtgattttcaatacatatttttccgggaaattataggtggacagtgggctggctccaccgggagaccggcggcatagtgataactgataaggcacacgcacaagcagccaagcacggcatcgggcatccccaaccccaacccccaccccacaccacggcgcaacgcaagcaattcgtccgcccgcccccgcccccgcccccgccccgcggaaccggacgccgcggcgccatgttccccgccctgtgcgcgtggccccgccgcccgcacgccgcgttgcgccttcgactcggcgtcgtcttcaccctcctcccaccaaggggtagaatcgagccacgattttggtcggtcttttggaccagtggcgtacgagctaccaccacgatgcacgcgtcggcatttatgcagaggcgcttagccagcctaccacacacgtcggcagccgacggcgtcctgatgaccactttcatgtgacgggccagctctctactcttccccccgtactaaagggacacgccacgaactccgtgatccaccaccaacgatgtcgttagttggagcttaacccatcttgatatttggtctcgattaattaattactcgtgatgatctcaatcaacacgtttgctgcatgattttgctacaggagaacgaaaggaatgaacgaacgaacggcaatgcatatatatgctacagtacaggcacagtttttctgtcccgtggcacgtgcgatttcaccgtgacatatagtattggctgccatttgggtactactagtactaaccggttgaagtgtgtcatatggaacttggcagttttgacaggacacgggcgcatgtgctgcgacgcgaacgtgggcagcacgtcctcctgcgcccgcccaacacccggtttgttcgccgagctggcacgctcaggcgttcccagctgtgacgtgccgtgacaagcttagatccttatattctggttaggtgggggtaaaactttccaggccctatcacatcggatgttggatattaattataaatattaaacgtagattattaataaaatgcatctataatcttggattaattcgtgagactaatctattgagtctaattaattcacaattagcctagtaaacattctctaattatatattaattagacttaaaaaatttgtcaagcgaattagcttttatttatgtaattagttttataaatagtctatatttaatactctaaattagtatctaaatacatggactaaagttaagtccgtgaataccaacaccaccttaatcatgcgatgtaattaaggatgaaaaaaagaaattcatgtgtggtttatcgacgcaggatgagaattatgacgagatgaggtgatcgatcgcttcatgcaccgcagatctatcaatactgccttaccagcgtttttgcccagtgaagtgaatccatgtatgccaatggaagggaaaattagaaacctaaaataaggcggaggaagacaggtttcgaagtgatattttgccgatacatttctttggtcaaggggcagttaaggcctacacataacagcatattagtttattggagtgacatgtaaggggtactaccattttagaaatgattttaggttggtttcttactttactctatcaaagaaaggaaaattgaacaagtgcaatgcccagccaaaaaagtcatagggttgctagcatatcttaggacaaaaattgaaggttgcaataaaagctcatccattacaaccagcagatatggcatcattccctcttaaactccgctttcatcctagaaaaaaatatatcggtacttttttaatggatagtagtaattttttaagtatacttagcgtcgttttacctcaactaaaactaatgttgtttcgtagtactccagacctttaaatatagaaaaccactcgaagcttgctaaaataatattgattatattttaaaatataatctaccaagaacaatatatacctttaaaacaagatttcatactaatacattttatagttattttgatgaaagaaatatatatatgtttgaactgataatgttttttttgtgtgtgagagagcaaaatgttttagtactaactatttcgccttttaaaatttttgaacgtataactttttgaagtattcagaacttaatgttccctacatggggcacaatgtttcaattagtgttccactcagatactagatcagctactgacggatttacgccattcccaaattctatcttgtattctccttcgaagccagaatgagaaatggatagtgtcggatatctcatcatttatctcttatcctattcatatttttttaatcagacagaagaacaaaaatctatttgcatatctaatccataccatagaaattaaatctaaggagacaattaaaacataaaaaactgcatcaagaaaaatatgttatattactcgttagctattttaccatgtttataagtggactcataatatattttagtatatatttgataataggggacacagtcgctattcttataccctaagcccatatttttcggtagatatagagttggattttggatagtatcgtgtatcttttttctcttccatatccttcacgtgagcttcaagtctggtgggcaaaatattcatctcattttatccacatctatttatctatagtgttattttgctgcatactatttttatcatatattttctttccaatgttatagtaagtgatctttcactgatggttaactgaaacattttaagcgcttgatttttatacttatatcgacatctatgctcaaacaaggctaattcaactcaaaccatttctctcacatatcctaaaaatcataataacaatagtactaacccataaggagtacatcaaaatactt

SEQ ID NO: 26483 - DNA, 787 bp, Oryza sativa
caactgatcgatacagttttcaaccagctagaacctactccccccatcttataataaatttatttttgactcctcatttatcctaaaataaactcattttttaagtaaatgtatcagagtttgtgaaaataagaaataattatattaaaaataaataaagtgaagaatatctatattgagatttgataaagtaaaagtattcttatcttttaagttttgtgttgatgtgtgagataggtgaaaaaataatttattttggaatgaaggaagtattagagaagcttagtgatccgataacaaccgtagtcaactaagaaatcttaggttacatccttgcccaacccaaaagagaaaaacatcgagtgattcaaactgccacgttatcaaaagatcatactcatagagtacagatcctgagacagagcatccttgcctgataaagttccattttaagctgcaaacttaggcataaaccagagctttatataataattctctgaatggacttgaacattcataggtcaaacgtccagcaatcacgtacacctttcttctccagactgacatgaagtacaatggaaaggagtagagcataagcagctgaatattacaatgatgtatcattgccaatcacagatattggttccattacgaatgatgaacatgaaacacctgatcatagcttgatgtgtattgtttccttaaaactcatcatgatcatcaagcaactgcgcagttatgcatgcaaattctttattgcaagtatgatgagattgaacactttctg

SEQ ID NO: 26484 - DNA, 781 bp, Oryza sativa
  unsure (1)..(781): unsure at all n locations
agatattctcaaatgtacaagaagtatgctgaggttacttctaaaggtggtaatagagcttcaagtatgctgttctggaatataacatggtgcatgcatagcaagataccttgggataggggtgccgtccacattggggtacattcccaatgatgtcgcataagcaaggatcatcccttcttcaggcctgaaagttccaagctcggctaatctcagggcatgaccacccactgcagcagcaagacttactgctttttctgaagaactcaagaaaattatcaattacatgatgtactgaaatacgatcaattttgagctttataaccagatgcctcatatccagtttgaaacaagaattgatggaacaaaaattacaaaaaagatatacatattttatttgctaacttaagaatagttgatgtgatcagcatagactgctactgttgattgcaagtgcagaaagagttgtccaaataactacacaaagaaatactagtatttttggggtggcttatgcaatgcactttgacatgactgttccatgaacagtagcagtctattcgagcatagttgacatttagtactagaatgataatgcaagtgtagtatattcagtaaacaaggtactctaccgttttcaaaatacagggcttatttaggacgagaatactaagaaatgtatgaaataaagagaaagaagataaaatgagcatactacccatacttaaattgattcgaaattcgtattcaagaagaaanaatgatgagctacttgcagacg

SEQ ID NO: 26485 - DNA, 566 bp, Oryza sativa
aatgcaagtagtgatttgggagcattggcagtagggaagcaagcccacggtttgatggtgaagcttgggtttgaggttcagatatatgtgaagagtgcactggtggacatgtatgcaaaatgtggttgtattgctgacgcaaaagaagggtttgatcagttgtacgaggttgacattgtcctttggacagcgatggtttctgggcatgtgcagaatggggagcacgaggaagccctgacattgtatgccaggatggacaaggaaggtatcatccccagtaaatcgactatagctagtggtctgagagcatgtgctggcattgcagcactggaaccagggaaacaattgcacacgcaaatcgtgaaatatgggttaggtttgggggcccctgttggaagtgccttgtctacgatgtattcaaagtgtgggaaccttgaagatggcatgtctgtcttcagaaggattcctgatagggatgttattgcatggaactcaatcatttctggtttttcacaaaatgggtgtggcaatggtgcactggatctttttgaagaaatgaagatgga

SEQ ID NO: 26486 - DNA, 10292 bp, Oryza sativa
  unsure (1)..(10292): unsure at all n locations
cttgcgcttaacgaacatgagaacatagtgaaccaccttccacaacatacaagagcgatatgtactaaagcctcaaagcaaccacctcttcaacaggtcagacgccttctttctcacaaaggtctagcagtgataaggtctgtaaatttaagatgatattgctcagtttgcatggccacatttttgttgtgcaattcaatactgcatatagtaacattatagtcaaaccatgtgcacagtaatagtaataacctacatacctcagctatggagagctcaagacgaaactttggaccatcgtaatggtgcagcactggtctgaaagcatcctcttccaaaggcttgcagagctttctaatgcggatcctcacctagtagaatgaatatagcagaatatcagtgcatgaaaccaaaagtaaatgagaaataaacacacgccagctgtaaccattacctgcgctgggaatctagattcacctttacacttcttatcttcccatgcagtgggatcaatattagatcctccaaaactagaagcctgatatgagcaaaaacagttatagcaacaataacctgttagtttctattggggtacattgttgattacaaatagaagtttatgagcaaaataaagtcccaaaagtattatcatgtcacagaaaagttccacaaatttcatttaaagacaaaagtatttcataataattaggcaaaaacaatttcaggcagaaacagtgcagcataaaaatgagaacccagatagcgttaaaaagtagtagctcagtacagaacaatgatgaataccccagaaatgttgtgtaacagtataacaattaacatgcatgcagtgaaatactatgtgcgtaatgaaaactggagtaggccagtcaaatgatgcacagaaacagtaatctggctcatttataagagtatggtacatagtaacatagatttggagtgcctcacaaagtgtgaggggcgaggtgttcaaacttcgaaagctatattcatacttgttggttaaataggctgaagcatcagatgttttccaaaacaatgatataaatacttaaaaagatgctagaataatcaatctataagtgaacatttgcacttaatttcatggctgcttatggatctttcgttttcaagtaaagagctccttatgaaattcataagatgatttatgagtatctgaaaaaggaaattaacacacctcaaataccccatgaagctgatgggtcgtgtagttatagaggaaaagaggtagaccaggaataattgctcggactgaatcacgatatcttgctggcaaccctgcagaacagcaatatatgattatatatcagaaggttatttgatattgatcatcgtaaatagcagcatgaatttattctcggaacaatatgccaagtgatgattcagaagataaggtaagttggatcacataccaaaaagctgcctcttgagatcctcctgcatggtgtcattgttgcaaacaaagatatatccaccgagcacttcattccttggtagcatctcacttgttggcaatgttttgaatcgtttgtcaacagcagagttgctgctgttgttcccgctgctgttacttccattgctgttggcaccactgtttttgccattgacatctttgccatttggactatgcaaatatttgttgaccccaacattcatcttgaacgagttaacattgccattgcctcccttggggtacagctgattcatgttgtaggccatgccgcggaaaggattcttcatagctgcgtcattcatcctgatgtcgttcatcttaagatctagattcataaggccaagattgaggtggtccatcttgctctcatcttggtggtaggataccttatcccattgcttgacatcagggatggtgttcatccgcgcatagtcaagctcattcgtcctctccgccttggacttgttgatctcagccaacttcgatgtcatgagagaccactgacggtcctccactaccttcgactgcccacggaactcatccccgagatgccacaagttgtccatagctcagctcagtctctccaccttcagcaagaaagaaattacccagggccggatccaacttgggaacaaacaaactcaaactggtacttgtattaaggttaaggcgctgaaattaagaggagagcttcttccagatctagaagagaagctagggttaacgaacaaacgcaagcaaattccagaaaaaaagtaagagagatgaatcagaaagaaagaggatgtagatgctcaccaggatcccctcccctgctctgctcgcgagtcgccagatggagatcgccgcctactccccctcttctgttcagccgcgactcgtcttggggaggcgcaaggagcggaggagacgacgagacggggggagatttctcttttattttacgccaagggaaggaatggggagagttacagggaatatttaactacagtatttgccaagtctatctggatccgagaaaccgaatgaattcgaattttttattcgaaaatgtaaacgaatatgataatgctactatccgttcaaaacaaatttggaaaatttcaggaaacgaatttagaatttttttaactggaaatgaagtatttctcagttgattagctccatacttttctgctccaaatatttagatttatactacgtgccatagtactaatgcagttatagatgaatatagttcttttttcaaaaaagaataaagtgtacacctaattgtattattattaattaataaaaattagaagtatcgatttagggcttgtttggcacggctctagcttcaagacataaattataaatatcgatttattgtctaaaaaatatattaagctacatgtcttcattcattttttaagaagttcagcttaaggggtttttatattccgatatcgtattcgcttcatttttttattcgataatattcgattccgttttcgtatccatggttttcgattctaattccgatttcgaaatgaatatggaaaacggaaacaataaaagtggttttcctccgtttctaaagcgttttcatccttactcgagtactccaccttttatctcaatttttttactactttaaaactagctatttatttacgatgactgatgaccaacatatcagcagtactcagagaaaaaaaatccaacaaactaggttggggattgtgtcaagagcaaactccttagaccaccaataaccactaattgacactccacgcaccgccaccatcgctctttctccatgagccaccaacgttcctcctctccgcctttacatgcgcaaccacaccccctagtcactgagatgtcttttctcctccaccatcgtttatgcacgctattgtcatggtcgtcgttgaggtaaggggtgtcgggcttgtcgggacatgggaaggtaggagtcgacccgatgaagatcagagacgctagatcgggctcctccttgctggatttgacaattccctaactgtcgaaggaaagaagaaaaggcaaagagagttagtgtgcggaatggttgtagtgtcaccggatccgaagatggatagaatgggaaggtccaaattaaaatataaagttagatgttgtgtaaatgaaaagaatggttaaatggtgatataatatgaaaaattttaagaatatacagtacaaactgtaatttacctttttttctttagcacaattaacgatgagttatctattatccgatagtctcgtgatatgctaagcccactgcagttttatcatctctgcacagtatggttggatcggtgtacttagctattactaataatctcatgatatattgatacatgacgatataaacttctactaatacgggatggttaattctattaacacaggctcattaattatgataagatagaactgactaaaaaaggataaaaataataccatcaatagtctcatttcctcattgcatgatatatgatgactatctctcatcaatatgtatataattatattggtattttcctaattctttcatattgtttttttagtttttatatgttaatttggactaatattttttctcataattaaatagtaaacagatcgtttttccatatttctccattaaaatgtgaaatattgcattgtataatttgaaagttgtattataagtgtatgtaatttaacgtgtaagatatggacttatagtataatatttggtttttttctctaaaaatgttgcaccatactccctccatcctaaaaaataacgtagtctgcatgtaacacatcatagtactataaatctggacatacctttgtccagatttattgcattagaatatgtcacatatggtcttagattctttttttgggacggagggagtagtaaataggtagttaagtgaacaaccataattttatccatattttacaatatgtcactgagtttgtcaagttctaatatatcatttcattttgcttaactcacagtataatataccatcgccgttcggttagcctccgttaatattatataattttatcgtaataatcgaaatagccttgaacgaaaacttctaaattttgatcaaaaattccgaaatgtcgatcgatcgacgggtctgcgctatcaattatcccccgccgctgatgggaggagaatcgacgagcgaggaggaggaggagaccttggcagcttggctggctcccaccttgctcctgtcagcgagccagggagaggaaaggggtgaggtgtcctctcctcttttagttatagagagcggcggcgagatggggcctcgatttggatgttatttacgtggactgccactggtggtgtactaccatttgtttgtttgctctggttggtggtcggcttggatggatggatgggtgatggttgttgcttgaggttgagctgatgcccttcaatgatgccgaccaagtacacaaattataatataaaaatttatgatgcataaatttcaaattttgaattgatatgccatgcatgtggattagatcttgtgtagtaggagtattcattttggtcataaatatatatctctgcatccatgggctagcttagctatacatggatggttgatgttgatttgttcttttatttcagacaaatgagttagttgcagaattgctttgctccattttaattgttaggtaagctgtagatgcaatgcaaggtagggtgcataatacgccggaagcgaataatttgctgtgattaagagagtttcagcgtgtgcaaattataaagggcgtaattagcctccttggttttgccaacagatagtactcagggcatgcagacattgattttgctaatgacttttaaggcatcaggcatcaatcaaagcttgtggtactctgccggcacacgaaaattcttagctggagtgccaagcaaaagcaagatgcagtccttgatggaccaataggacatttcttaaacatcaattgtcatccctaatttctcttcaagtagtatactacaaactaacccagtacagttctgctcaatcgaatttcttaattaggcctgcatgcaggcacatttttgttcttgacaagacgatttaattaattagctggagtacatgagaagaacacaacgaactgtgttagccaagaaacgtcaactgctgggaactgaacttccgatcaagttggtgagacatccacggcttagaaaccacaagtcagaagttcagaaatcagaaacagttagttagctaggaaaagagagaaaggaacacataaaagcaagggcaaatcatctgtgttatccatcgatccaactccatcaaccacaacgatcatcgccccctgcttttccgatggatgacgcatgcgtgttgcttaattggtttgtgttttcgttgcatttcactgcatccacacacacttcagcctgctgatctctgcattctgcgtgatatcacattacacaatcgcattcaacccgcacaataactagaagatgcatccactctccaaacaaaataatggtggatttttttttattttgttttgttttttaaactccgtcctcgtttgaatgaatgaatataatataaatccaccggccaagctacacacgcatatagactgtatatcagctaaaaaattaagctcttttttttagatgcaaattgagctcattgggatcgaagaggccggtggttttctctcaccttgattaattaagctgtttttaatccagagcgggatgcatgtgtgcgtcgtgtttgggggggcagagaagctgcaagttggacgatcgagttgcttggaacagcgggagaacgagcgcgcggcaaacggccgcggacatattcgatttgtcaggaaatagcgacaaatatatcggcacatgaaattgttctgccgatcgatcgaactagtactaactgttcgtatacgttttgaatttcaaatcgattaacctcttgctgctcttggaatattcttggtcacttggttttgaatttcattatttcaaatcaaatgaattaatgaaagaatgaagtatcaagacacagattgcagtttttgcaataatattcagaaccatcaaccatgcaagcatatcgatcatgatgctgatcagtgatcacaggctaactaattattcctcttgttgctgttggtggcttcttaggatggtatacatagattagataggaacagtgcaagttgtagtagctgaagccattaatcaattagggttcatcacatgggaacaccatgtgcatgcatggatcatggatgcgcccagcttcagtggatgcgtcacatgatcaagcgaaggccgggggccctgaccgtggagaagccccagcaattgactaaaaggaaattttatggctggtcgaatgaacatgtgaagagcataattaaactgcatttaattaattacagtgcctttaagcctgcgacgacgatgagtgaacannnnnnnnnnnnnnnnnnnnngtacacgaggaaacaaggagaatccgatgtaggatgtgagtcccatcaggccatcactatcgctactgcagtactagtacatgttcgacgaatcgatcgtacgatcgattgaggatttgttattttaatcatcgcctttttggttgatgccttgttttcctaataattgatcagatctggttgatcgatctccgttcgaattgaaatcgatacatggagatgcacagcaaggagatcgatgcatgctgctagtaccaaaatgttcgagcctacaattatcgacgaattaaccatctctcacatcacagaaaccaaaatgttcagtgttgctcacgtcgtgaattaaaaaggccaggcgacgtgcgacgccacctgaatcgttgggagagccggccacagctatctccggacagctatagtgagcgcgtcgtcgtttgcacagctatagctgctgcctgcactgcacgcgggtaaggcaggtttcagctttcaggccggccgtccatctcggtgaaagcgcgggagcatatggaataaagttttcaaaagaagagaagagagcaaatggaataaacaaggcaggaacgcaaaaaagaaaaaaaaaagttaatttgatccatgccattgtaaatgtggctatttagaaaaataacattataattcgtatattcataaacgtgccactccaattttacgaaattaaaaccatgccactgctgtcacattttccatcatcctctttctttccgtcttcttccttccttctccagcccgtccgccgccgcccacgcctccgcgaggctctccggcgacgcaacgaagacacggacgcgacgggggcggcggcggcggcgcgcggcgcgtggcgcgacccggaggcgacggcgacggcgacggcacgggtcactcctccggccgccaccttctttccggtgagcacgcttcctttatccccctctcccctcccctttcaaatttagggttagggtttccttctcttctccctttcccgtcgtcgcacgcaccgtgccgtaggggccgcccgtctggtcgtgctccggcgccgacgccgacgccgaccgcatgttcagctctggatccggcggcggcatggccgggacacgggagggttcttggacgccggagaggagaggagaggagaggaggaggaggagagaagagggttcttggttcttggcccgtagccttcaaagtgtcggcaccctccatgtcggcttcagcagccggtgcagcccctccacgtcgctgatcttgttctccgccaggtgcagctccctcagcgctgtgctccccgacagccctgcgagataagattcagaaagtcatcatcgcatctctgcaagactcgccaaaaccctgatgaaattgagagtcatgtagatgtagttgcagttgcaggtttgcgaaatctgaaggaattcagagtcatgctgcagtacagaggagtttcttctttctttttctttccaaaattgcagggttcgaacttgattcttctcaggattgcaaaatctgaagaaattcagtcatgtagatatagttgcagacttgcagtgcagagattttttttatttgctggtaataaggtgtcaagaaagaatcaaccaggtgtttcaccatgtacaaagaattgtactgttatgcaaccgcagaaagccgctactagttcactgttatacacttgagtctgaaactttctgcattataatgttcattgcattagttcactggttttattttatgtatgtacaacaagaaatggattgttgcattagttcagttcaacatgttttcataagattatacttcctcaacatgatacttgtataaaacatgtttatcatagctattcaagcactaatatgtctagtgttaaatgagctgattgggtaattaattctgtacccatgttatattgtatttgatgatgagatccttctatttgattgaaaaacagcagctcctactttgatgctagctagctctagttctgggttttatgtaactctagctctagttccggatatataatcttggatgctgaatttgaatagtcagtgatgtgtataagttgtgcttgttttgtagattgcacacgcacccattagacttggagaagaccaacctcctccttcctgggaccttgtaccctctccttcctgggaccttgtaccctctccaagaggtactagatctatttattccctttgctttaagttgtttatctatattttgtgatgtaaatataaaaaataaaagaagtggtgtaatgtagaccaaaatttcttttcctttcaacatacggttaaatttgtataaaaaagcatagagaatatacaagttctcagatttttcagatttcttaattctgaacatgctcggcgctaactaataaaagatcatctttaactaaatttgacaactaaatttggtaagtgctactgccatgtaatctgctttttcatacatcctgtaagtgctactgccatgtaatctgctttttcatacatcctgtaagtgctactgccatcaattattgttgcactgtgcactctttaagaaaaaaagatccttattgctcttttcattttcccatcaatttttaaatatgcttcataacttggatcttcttaagattaattcccatagtttagtgattcttttgtgattatctttctagatcttttgttgatgtgctaagtgcaaaattgtaaataatttgtgtgctatctatagtactactatggatatgagagcaagatacctcgctagaaagaggagggaagaggaggacgatgatatgatgttgtttattttccctgcactacatttgttgagttatagtggagcaagggaaaagaagcgacaccatacatcaaagctaacaggtgatgagcgtgttcgggagttgcttgaagggcatgtaaaaaattgccgggtagcattcaggatggagccggaaatatttatatctttggccaattaccttagaactgaaaagttggtcgatgatactaggattaaagttgaagagaagctggcattcttcttatacatgcttagtcacaatgcttcatttgaggatttgcaagagaaatttgggcacagtggggatagcttttatcgtcacgtaaagcatttcttcaactcagttgtccctacgctcttgaagcggtttttgaagcctccaaatcctaatgaagttcattggaaaatagaaaaagatcctagattttatccctatttcaaggtt

SEQ ID NO: 26487 - DNA, 706 bp, Oryza sativa
ttaaaaaacataggataggagcgagaaacccatgagttgatcttaaaaatgaagtttaggtgagtttatttacttaatgtagaagaggtaactaggatatgtcaaacattacctgtgaatttttcgctagccccaacagaggacagtcgcggagatatcatgcgagactgataggcacggctctccaccagcccaaacaatagagtgatcgctggaagatggtttgcaattttgcaaccattgcatgcatatgggcaaaaaattctgattccagctcagtggctatgtgaatcaagcagcgtccattatcttctctcattcaactaatagggtacaaaacttgggatggcagtccaccatcatattataattatatgatctacttcgtattctcaatctgccgagttccatcagttcacgcatcatcgacaccagtcatagggtcagcttccttgggctcctcatctccaccatcgttgccctcttcggccagggcatccttcatctgataatccaccttgaaatcgtagtctgcatccatgtcggtcagcacgctgaacttgtttgccttgcgcctcttcttctcggctttcctcttgcgaggatcaagtattccctctgctgtgtacagcttgtcattctgtgtgctcgcgctggccgtcttggctccttcacgctcatttgcatcggacatcgactcatcatg

SEQ ID NO: 26488 - DNA, 6412 bp, Oryza sativa
atatgatagcgggtatttcaaggaatggcttcaggttcttttgcataaagctaattttataattcttttcacaagcctaaaacctagcatagactgatcaaattttagtaccagtgttcactttaaacaacgacggttctgtccaccatccattgtgatcccaaggatagcttcccgccattgaatcgtcatggttttctgaggatgtccaccttccctcctctcgggatgtggctccatcagcataaaattcatcatgcaatatcccatcccccacaagttaagaatttaaagtctagccaagtgtaatacatgtcccggtgctcaataaccgcgagcacggctattcgaatagatttggtttactcacactgcagtggatgtacactttacccgtactccgcaacttgcccaacacatgagcctacgtcccaacgaatgagacttgccacggcaaagcctttcaataacctcactttggcagtatccgctccatgaacttaagccctcatgcactctaggcgtacacggtttctagcagtgagaggagttctggcgctcccgagggggaaaactcacgcaagcctaacatcgcattctgtagttgaacccaatccatgctgtccccttttgggtatctccttgtagtcttgtagtcttgccaagtcagtctctagccatccgtatcgggtatccgccatttggccatccgtatcgggtatccgccagcagactgcttgttcgtccacacacctaagtgaaaccactatgcagggatactgcctccgctcggctatctactccgctaggtctatacccattcgagaagtacggctgtactgaggtcgtttcatgtttaacttcatggctcggtccttaactgaccagggacggcactagcctttaccggacaccacccaagtccttcagccgccccagtcgaaaacatttgtttaattttatttctcctttcacaaatcatgtcatcaacatcatggcaatgtggtgctcatgtctccacatgccgcatctcaattaccttcccaaaggtaattgcccaagcatatagcatttgataaatatgagtatgcatgattctagaatagcatttctaagcaattgtcataattgactagggactcatacgtagacatggttacaaagatttaagggtaaacaataatcaaggcatggcataatcccaagtaggatattcatcattgcatgcaattttatttataaacaaaataatttcgcaattgggatcaacatgttcaaggaatagtgatgacttgccttgctcaggataatccttattattgctataatcttgatcaaccttcacctcttggaagttgcagacgttgcctcacgactaaccgatacacaaggtctataatacgcgagaaaaaccagtattcaaacaacaatcaaatatgcgcgacaaaatgtactattcgtgtttgctaatggattccaatcacgctaggggctaaggtttcttaatctttctattatcaacgtggcctatttaggagttaaccaacatagcatttatgggatacatatatatttggctaatcggtggtttagtctatcaaatggcttatggaaggattatggctaagcatgcatctatctaaataggacgtttatatactagaggttctgttgttagatggatttatgatcaatcaaataatgaatcatgtgtattattatttaattgatggaggctttactttaattatgaacatatttcacttgtcacaataaaaaggataataattatccatgctttgtatgttagagttgtttaggttaatcatattatggttacagattatcccttaataaacaatcctaatttacatttgaactataattataatcatatgaggtcaagatttatactagtatttatctaatatacatgtttgtcatacactccctctaattaatatatgtaacatgcaaattaatactataccgtacaactataatgggacgtatagtatatgtgtaagcaacaatgtcttattattggatcatatatttgagtagttgctttttactataagctatacaatacatgttgattttaagatggctctgtttgtttaaataatggatatcaactgactatatattctacttcacatgacattgtatcaactaatttttaagtggtccaaatacaactagctctgtgattactctcctaaacaagttaaagattcatctaggtgtgtttatatttttgtcacgaaatatgaggctaaacattatttatatactttggacgcatgcgtataattatatagggacatatattaataaatggcactagcatttcctatgctttaattaatttgaaacaatgcttctaattagtttacatgggttttacagtgagaaagcatgttaaagacaattatttgacatctactttacagtatattttcaattttatttattagcacatttttaagttaactattatgcatcatcttgatattaattaacttttaattataaacatattttattaaatagtgaactatataccattggaaagcttatgaatttatatgaatttaggttcaagtttcactcaaatccgagttaaaatgaataagttatgctagtgtaaatattcaaatttgaataattgcgaaacagtactgttcatagcggatttattttaatccggaacctatccacagctcagagtcactgacgggtggggtcaggggttttattatcttttctaccgaattatttttgttagagaaaaatagggagtgggcccggcttgtcagtggctcggctgctctctttctctctctcgttcttttcccatcgtcttctacctccagccatcgggaggcagcaccagggcacggctgggcgcgacgggcacgggccggggcggcacggcggcggccaggggatgtgcggaggagctcaggcggccctccaccggcggcggcggcgcaaggcggagtaggggcgagcgttgcggcacggcaacgtcatgaccgagcttggctgcaagcagctatggtgaacggaatggtttgcgaccaaattggtgagggcgtgagcatctatggcgcatgagggttccgtttttccagaaaaatcgaagggagaaccccccggatggcatgtccacggtgacctccacgggcggagcttcgtagctcgggcttgtcacaattatggccctaatcgatgaaatagttgggggaggtagttcctagaggaataggaggagtaacaggagtgaggacttaccgagggacggcggaatgacgaagttccgcggcggtggtggagccgggaagaagctgcggcacgcccacaaggtgttcgacgaaatgtgtagtagggagaagaaaaggcagagaggggcggacgagctcgtgggggctaggaggtcttttataggtgggtgaggggcttgtgctggaagctaagacggataagctcgccagctcatggccagccgggctagatgctgggctagaggcggttatggcataggcgcacatggcatggcgcggggcgcagggatgggacggcgcgcggcgacggacgtggcacggggctcggcgtggtgcgacgcgacggacgacggcgcagcagcggcacacggcttgccggcgcggggcgcgaggcgcgacgagacggcgcgcgacgcggcagcgaagctgatgcgacggcgcgcggcgcggcgatgatgtcgatgcgacggcgacgacgacggcacgcgcggaggagtggggctcgagaggatgcgaccgtcgacggcgacggcgcgcggcgggatggagacggcgcggcgacggcgacatgacgcggcagggcgacggcggtgacaagacggcgcgcggcggcgcggggcgcaaggcagcggcgcagcagagggcggcagcggcgcggcgcgcgcaggggcggcgcggggctcgagggggagcgcggcagaggagcggtggtggctagggaaccaaatcaaacacctagagggctaatgaacagtgttagccaactatttttgattttatagggtattttgcaattaggaaaaatatactattgccactaattttgtcacaatgtaaaatacaccaagcctaagttaatccatcgaaatttgtattcaaatttaatattgaacatatttttatttttattatatattttctaagtattcctatttttagggctttggtttatttataaattgagaaaagttgcaaattaaatttgtattttactcctcagcagttgagtgaccatattaagtgctcaaatgtgaatttccccaaaatttaatattgtccaatttttaaatatatatcctagatttttataatttcctatatttgggattttggtatttatctgttttcacacatattggtttatctttttggattggttttaccaccacatggatttctataatttagcatttgtgattcaattcaaattatataatatctaattattttttcccagtaaaactattctatagatagagttccatttatttgaatgattatcatttcctaagtgtttatatttcatggcacacatcacatggttcaagtatttaatatttgatccataaattaaattggtaattaaccttccctttgtctggctttgttttctcgtgcgtaaatatttatagagttcataataaatatcttatttttataattgttactcagttgtatagctttagcttaattttcagtggtgacaatttatagtttggcaagcaatagcaaccataagatccagcatgatgcaaaagttttaaaaagttcaaaattttagtgatttttttattgtcttgaattttcaggatgttacagaaggcatatatggttctttttagcataaagcaagttttatttgcataaaacactttcaaatcagatttgttttcaaataaatttcagcaagctagtacttagcatatgggcatcaaaagtaggcattaatcatccatgacagcaaggagatcattctcaaatctcatcacaatttgaaggtaaattttagcatttagaagaataaatacaagtctatactcaatatatatccacacgtcgctcatgaccgcgagcacgactaacactttacccacatgatgcgaaataataatcatgcaagagcatggcacgcgatacataagtacccgatttattactcacaacaaatcttttccaaaattcatgatttagccttacaccagcacgatacgtgtctctccatcctaagccatacacgttatataaccaagaaccgttaagtggcaggcccacgccttaaacttaacgccgtggtggcggacacaacgggaacccaccatgtggcacaatacagttgtattggacacgcttagtcacctaaactaccacatcggggtaaacaggaagctcctctgaattatacgaactcatacacaccagcctaccagaatataaggctaaaccataaataatttactaagcttgggctatcccatactagcacatgtggttgtactgtatatgtatacgaaatgaactgacattgagtgaagtccttaggtcggtttggacacactctccccctacactacaacaaaacatgtatttaaagacatctcatttgggtcctagagacgttttaaaccatccttagacgtatgtagagtcgtttcttaaaagcgtccatccttagacgtatgtagagtcgtttcttaaaagcgtcccagaagcgtctttgttgggaccgtctcagaattgtagagatgctttgtaaagcatctcaaacatatttgagacaccaaaatagcatctctacattcgttgggacgtttttatggatgtgatcaataacgtctctacagctattaaagcgtctcatgatgcgttgttaagaataattaatacgtattatatagtcgcatatctatatattgtaggatatcaggcttgagaaattcacaccatttacatccgatcaaacatcatactactataatatcgccatcaacagaacaatgccacaaaacaggaacacagtacaatccaatcgatgaaaggtaattatattaagagcaactgtgatcaacatgtcaggtaaacatacatacagaaaatgagatttgaatcatctccaaaaagaaattataactgttcataagctaatactatagctttagctcctcccatcttcatgatgtagcattcctatacaatccatttgcattgccctgcaaaatatattgtttgtgaaccaaatcagtagttattatgacccacaaaaaatgtatgaaagctagcccaaagaattagaaaacccatatatgtattgtttcatatcagatacacctgttcttgggatcgtt

SEQ ID NO: 26489 - DNA, 3238 bp, Oryza sativa
agtgaccatattaagtgctcaaatgtgaatttccccaaattttattattgtccaatttttaaatatatatcctagatttttataatttcctatatttgggattttggtatttatctgttttcacacatattggtttatctttttggattggttttaccaccacatggatttctataatttagcatttgtgattcaattcaaattatataatatctaattattttttcccagtaaaactattctatagatagagttccatttatttgaatgattatcatttcctaagtgtttatatttcatggcacacatcacatggttcaagtatttaatatttgatccataaattaaattggtaattaaccttccctttgtctggctttgttttctcgtgcgtaaatatttatagagttcataataaatatcttatttttataattgttactcagttgtatagctttagcttaattttcagtggtgacaatttatagtttggcaagcaatagcaaccataagatccagcatgatgcaaaagttttaaaaagttcaaaattttagtgatttttttattgtcttgaattttcaggatgttacaaacctaccccccttaaaggaatctcgtccccgagatttagtgggactacggtgtcattaaactagttcgactaaaatattgtttgatagacagacatgctaatcgaatgtaggaaatccagggtcttcgtggcttccggacgtcatgagttgatgagcgaagcgaagcgacactctttgtacttccgctgtcttggtcagcaacggacttagttggcagtcttgtggcacatgatccgtcttttcgcaaaggaagcacgcgatcttcgttgtagggcattctccattttgatggtcttcgtcacagtaggggcattgagtaacgcaattactaccgtagtgtcctatctctccgcaacgactatatgccttaatcttcgaaacttctttggatgggtctgaaactctatgctcttccgggctgatctgtgaaggcagtgtttcttgttcttcattggtgtcttgagtacagcctatcgcataatgtccaaattgtccacaagaaaaacaacagccatctctctttcgttgccatagttgtagctcttcaacttcttcaggcaaatcaccgatttctattcccattttactgagatcaagttcagcatatgttattagtgatgacgcttttcttttccgttttcccttccaccaatgtggtgtagttccttgtctacgaaattgctgatacataggttttggatagggtgaatgtggcatcggttttggtggtatttctgccctcattttcctttttgggtgtcagggtatattccttacttgtccatttcctagctttttcttagggcaatccaaggcacaatgtccttcctcgccacatctataacacgtgacatttatccttcgttttgctggagtcaggtggcacctttcattcgaagaatattgctttaggtgattcagattgatggtgtagtcttcaggctttagtgaggcttggactcgtcctttgttcttggaagcttggggaggatcttcaaggagtagcatgggctggtttattcccatattttgggggtcttgtagcttggaggagttcttgtttctcgatgtctattggtccatgtcttcacgtcctgtggtaggttcttcttgttagaagttagtaggttgaaagttagtaaactactatactaggcatcaatagtagcatgacaatgctgcattgttgtttttcttcatcatttgttcaatccttcgttccttaatatttattatgaatcttgccgtcgagggttgaggttacaccctttgcagttttactatccaatgatacttcaaattccttgtacaagggcgaatataccttgatatatagtattccttgtccatattttcccacaagttattgatttcctcgaggtttttccatcataggctaccccccttaaaataagaaattttgaaagcaatttaaaaggagatatgcttttgcgttcacaaagtagattttttttttatcaaaatgattttgcacaaatatcctttggaagtgatgtttgcaaaacatttgaaatttccaagagatacattttcttaccaaatataatttgaaaatagattttttttttcaggcaagattttgtataatcacacatgtgtttaacaaaaagcaacatggcaactaaaaacttttgtaatcaatttttctttgaaaacaacatttgattttatttcgcaaaagaaaactcttgcccatagggccaaaataccatatagattgtatgcatggttcaaagttgaaacaacaatacttttgaacacctcaaagaaaaactcatgaaaaaaatttttttttttactattattattattattattattattattattattattattatttttaaacaaagctttaggcaaataattattggaattcagcttggaaaaccttttgaaaggaggctttcgaagacatgcactgaaaatttggttttgaatgaagttttattttggaaaactttgcaatacattatttggaatcacaatttcacaaataattttcagagaaaattttcttttcaagctaattttgaccattcccaaaatttaatataagttcagagcggctttggggacaattttgcaattaaatagtttgaaacaaacatttcctttctttttgaagcaatctttcttcgtaagactatatttcaaagtgcaaaaattcatttgtttttcaatattttctaaagacaactcataaaacaaagttttaaggggattaaatccatataagtttgacttgtccttggaattttgaagcaaccctagaactaaaatccaataaattccactctcgttcatccttcgcccatgtactattattcaaaacatggctccttttattaaatttccatatatgcataccatcttatgttccttttcgatccataatattccgatccttatatgtttatggaaacaacttagcaatcttacatggctttctcatggataagcagtctgtttctcttctctttattgtccttcatgatactcccatgtcgcagatcgagcttctatggtcactaacggcttagtcgagacttcacttctactatacgagtgtgtgactagaggaaactagtactaacaacaatgagttatcatgattgatgag

SEQ ID NO: 26490 - DNA, 10609 bp, Oryza sativa
cataaatatatttatgtctataaacagtgagcttgctatgcttatggatgattcatgttgaggatacaatgtaccgatgttaagcaccgtccctttttgtttaaggcagtgcctcgtattcatgtaatgagggagaaatgtgtaatacagacaagttccatgaggattcgtttgaaagatgcggatatgtgatcatgtgtataattgtttactgacaaaggagacctagggtctcgtgtcagaggaactatattctaacctcgagttaataaccaacctgtggatggaaaagaaaaacaattaaactgtgttgggttaaaaagccaacgagacagtagttgaggataggagtttggatacgccttttacagatcaagataaggattgttggaggaaacccctaagggtacccgccatgcctctacattgataagatcggatatacctgccaacagataaggagatccaggagacatcaatatttgagaacataatagtcgatggttggtaattagtttatctggtatcagaaaaaggtcaaaggtgatgtggcagaagaacaatttggatgctccccatctcgaggaagcactaaagatgaccatcggcaattaaaccctagtggtatagatacagatagcaggcaatgtatttccctgaaggtagtcagtgcagcttttgacgaaccacatcaaggtttcactgaaaggcagcaagccaaaggacctcatcatccccagaagcgttcgcaatccacattaaagaataccacctgttagagataagccgaaagaagattgataaaagagattggcaaagatgttctctagcatgaaagaagtaggccgaaaggtgattgataaacagaaacatgctctgcatcgctcacggaagacccctgattgtaattgccccgcaacagtcaccttgtcattaagtaagcgagatgacctaggtagaagtgtttctatgaagacaaggagtgaaattttcagctcggtatcggatgctacacggagtgaaaagtgcaagcaccggttaccaggtaatgccatgtcctgggaggtgatccaacgggaaagaactcatcaaggttaaaggtgtaaaggaatacgttgagtgctaactgaggacaacctgaagataataacgggaagtaaactgaatgtaaagaaagtgaatccgagctgcttgttcgtgggaactattcccagttatgaaccaagtgatatgttcgaagatagtctatagaggtcagattaaaatcacctctcacaacgaagcttcagatctggcaggatcacgatcagacaataaggagtccagcagtaaaactatttgggaagacgtcaaagtatatcaagtgggataagctggttctcttgggaagcataattcaaaggcaaagctatcgacccttgcatcaaatagcagaagtagctatcacccggagacccggaaagctaatatgaggcagttggtggcgagttagaagcaaatgacaagcatggtatcttagtaatgacgagctgatctcgacgcatgacatgaagttgataacttgtatgaggttgactccaaagatatgaactatgcgaagttctggaactgaagccccatcttcaagcgccgcaacccagtcgaagtcagctaaaggttcaaccctggttcgagtcaggtgaaaagaagattccacctgcaacaggaggtcaagccaagcagttccgagtggtgaagttttgctgaaagtttgtgaagacggagcggaagaagtcaatcaagaagagaagaccgcccaacctatcttcttgctagcctcctcgaatctcggggacgagattcttgtaaggggggtggatttgtcacgtcctgataaattcatcccgaaataaaaatcattttccaaaaggaataatagaattaattaaaattcgaaaagaaattggcaaacactaaaatacgtacaagaaaaattcaaatgtggcccggagaatttttgttaaattctccttggtctaaaaggagccctcaaattttagtggaattttcagagcacaaataataattattaagaaataaacaaagttaaaaaggatttataaaaagaaaaaccctaaaagaagtccttttccccccttcccttcttgggccggctcggcccaattccctccctctctctcctctccccgcggcccatcggcctcctccccgcgcgcgcgccgctgacaggcgggcccgcccgccaccctcgctgacgggtggggcccacctgtcatcccccacctcgcgccgcgcccgccgcccgcccgtgccctagcgccgccgccgccgccgaatccgccgcatcccgccgtccccgcgcgcattaaagtggggggaattattccccgcgattccctctcccgtttcccccgctttcccctctctctctccctcggattcgtccgattttattcccgcaatcctcgccggcgtcattgatggagccgagatctccgcggccgattcctccccctccggccgctttctccccctcccggtgctatataattgttccccgtgcctctctcctccgtttccgccgctcgccgctcgctctccccgtcggattcgtgctcgcgccgtcgtcctctctctccaccgtcgccgccgagcttcggttcgccgtcgtcgtcgcctcggacttcctcccgtctcggcgtcacctccttcggcttcgccgcgtcgtcgtcgacctcgtccgctcctccgtttcgcccgccgaccgccggagcaccgtcgtcctcgccgtcccgagccgcgccgccgtcttcctccgctccggtcgtcgtttccgccgtcctcgtcgacccggggtgagccgaggaccgctcctttcgcttcccccttccctcctctctctcgggcgccgctccgccgcgccgttggtcgccggcggcgaccatcggggcgtgggtgcgccgccttccgtcggccgtgccggcgaggccgccttcgggcgcgccccgcggctgccaggtgggcccggccgtcagccgcccgcgcccgcgggtgcggctgacgcgtgggacccacggcgccggccggcgtcagccgcgtgcacctggtccaccgtggaccgaggggctgacgcgtgggccccactcccgtggacccggtccgcgcgccctctctcccggctgacgcaataattcgtttttaaattaaaatttaaatgaagaaattcgcaaatatctatttaaagagcatataaacttcaaatggccatatcttggccatttgaactcggaattggaccgttcaagtctctaatttttccttaagaagtcaagaacccatttttgtgctttatttctgctgttttatggagtttagtagagtaaaagccttttcttttccgttggtcgtgtagacgctgcagcttcggaagattcgctcttcgtggaagtagaagccgacgtttgggaaagcgagcaaggcaagtcacatcatccttgaacatattgaatcccagtttatcaaattattttgatttaaattactgcattattgctttatttaaattcccgcgttatcactgttttatttagccatgcctatttacctttgttatgaccttattattattgttattgttattattaccttgttcaccctagaataaacaaaactccaactagtgggtactctattcgtggttccactagtataaatttaggtagatgcttcgctgattaattaggcaacattaggtgattttataactttagactttgggaattctcatatcatttggacactatggaattgttggattatggtggaattggacatacacctctcttcctctttcaaaacccctaaaacctgttttcggtggggtttgggtgcatgccagttgtgggaagtagcaccccggccactataaggattaagctcgggcctctgttgcaaagcactaccgtactaaccacatgtttaatgggtaaggcttaactcggtgctcaggctagtcctgaacaaaaggacacggatagagatggatgaagtcgttgcgacgatggatatctctgaggcaaatgaaggctacgcgagctgcggctcggtaatcgagatgtctaggcaaatgaagactacacgggtcggtgcccgttagtcgagatgccatggcactggactagtacgcgggtggtctcacccctatgagtgtggcgcacccggtctagatcttgttgctaggggctcaaccctggcctgcctgtcccgggataccggccgtaggcagggttgggtcggtacttttgttcacggctaggatgggtgaagggttatgtcacatgtttacgacgggttccaaggccatggaatgcggagtaaagatgtgtcttgtgggtaaagatgtacacctctgatcagagtaaatctattcgaatagccgagccctcggatatgggcaagcctagcaatgtacccaagtcagtgttttaattcttaaaatttgctcagcaactaaaatgtggaatggttggcctgggttggcttgggacgagctgggacccaggtcgggttgccagttcggtctgaatcatcgtaggccttgggttaaggcaggttcgtgtgggtccacggccttgattaataatattgtgtagctctaggatcgtctttataaaataactttgggcaactaagtgacttttaaatgctgtttactgcaaaacctaacccctattattatccccttgtaccccccttgcattaatcatgcatctgccggtgtggcttgctgagtactgtggttgtactcattcttgctcaatccttcccctcttcagtaagagaagctttggagaagatgtcttaggtggagtcctggcttataccccagttgagcgcctgtgaagatggagccgtaggcccgctagtccgctgctgtttatttttgattgtcaggccttaagtgcctttgtaataatgtaaatattatcgatataataaagatgtgcctttcgtatcatgtttgtgtggtgtaccccggcttttcctgggacggggattaatacactagcgttcgggaaaaggaaattttcccggtcgcgacaactataaatcaggacagttgtgctaagttcttatattttgggacggagaaagtaaaaaataatttgtaagtaaaacctttatatgcatgcctttaacaattgaaaaatcaaatgctataaaataaactgcaatgagcaaaccacaaaatcaacttcaaaactaagttttaaaatttaaattttggtttatgagtataagtaaaacgatgatgctcctaatacgacgagagaagcataggacctttttttttaattaaaactgatgcagaggacttccatgcaccttgttgctagtcagccagccaggtgtttcttcatcagttccttctgaatgcagcaaacaactgccattgctctgtttgaagctcaagttcaggctgatgttgttgcaagcagtttctatggtattcacatgaaactttttcagatttcttctatttaacgactcaagcatttcacaagatgaacatgtaaagtatgttgccacttcctccaaatgctttggtacggaaacgcacgcactttccacttgattttgccaaatgccaagcatcacatcttaatgttgtcagaactgacacaacaaactcaaactcttaagaaacaaaataaacggctgttttcacatcctcaaactttcagatacctacacataaaggcattcagaggtagtgtgacacaatgtttttttcttggcaccggccatcaggcagagagcagagtttggaagataatgcacgagacaatatgttgggggaacactactagcaccacaaagtaaactgatatgcgtataaatcaaatactcctacaaggtaagccgcgcagcaggcaaaattgcttgcaaaatcaaagaattttttatgatgtaatggtctcagccaaaccattcacttcccccttaattccattctccggtttccgaagagtatatctccaccccaacaacataatcacaatcatccatcacaaactcaaagacatggaaatgcgaggggaacaccactattagcaagaagatagaggggaactgtttcaaaggtgcttactcaaagtgacaaattttaagttccaaagtggcaaagtctcgatccatgtcaactactccaaaaaaaatggtcttacttcactatagtatatcatgtacttccatgtcattgtttcatgtgcatcaaatttactaattactagtattgtcaaaagctcgcagaagtagaaatatgatgaggaaagcaaaaaaatataggcattcattgaaatgtaggtgctgtttggattgagaaatgagataagtgtcacgactggaaataacccaacgggcgttccttacgtgcgtgcattattccttgtcccaggaggcaaggtacaccaaaagttgatacaatttagagtttaacaagcggaagcgtaattaatttattacatgggcggcgaagacccagcacacaagaagacaaacgaaaaacagcggaagactagggcgacgactacaggcgcttgacggcaggcacgagctagacaccaaagccttcatcatccaggggctcctcttctgggtttgggaaaaattgagcaagactgagtacaaccaccgtactcaacaagacacacccacaagtgcagaataaatgcaagggagtacaagggagccataatatagggggttagggtttgcagtaaacagcattaaaagtcacttagttgctcaaagctactttgtaaacacggtcctagagctatacaatattattaaccaaggccgtgaacccacacgaacctgccttaacccaaggcctacgatgattcagaccgaactggcaatccgaccctgggtcccagctcgtcccaagccaaccgaggccaaccattccacattttagctgttaggcaggttttaagagttaaaacactaacttgggtatattgctcggcttgcccataaccgagggcgcgactatttaaaaagggtttattgcgtcagccgaggggagggggcgcgcggaccgggtccatgggagtggggcccacgcggcagcctcacggtccacggtggaccgggcgcacccgggctcgcaccggtcggcgcccggggccccacgttgtagccgcacccgagggcgcgggcggctgactggcgggccccacgcggcggttactctgggcgcccgaatgcgggcacttcgcgtggcccgcgggaggcggcgcccgcgcccctatggtcgccagcggcggccataggcacggtggagcggcggtcgagagaggggaagggaaggggtaaaagaagcggcggtccacggctcaccctaggtcgacgtcgacgacgaaaaagacggccggagcggaggaagctggcggcgcggctcgggtcgactgggtcgacggcgttccgacggtcggcgagccaaacatagggttgcacgaggtcgcctcagtatgcgacgaagcctaaggaggcggctccgaggtgtagtgtggtccggggctatgacggcggcggaccggagctcgacggcgacggtggagagagagagcgacggcgcgagctcgattccgtcgaggaggaaggacgccgagagacggaaacggacggaggaggtgcggtgagggtttaaatagggccgagggcgagagagggtggccagggaaggaaggaaactggcgcgggaggtccggccgccatcaatggcgccggcgagatttgcgggggcaaatccgcccgtttgaacgcgagagagagagggaaaaatggggggaaagggagaggggatcacggggagtgattcccccctctttattgcacgcgggaacggcgggaggcggcgggattcgcggcggcggcggcgctagggcgcgggggaggcggcgggagcggcgggaggaaggggatgacgggtgggccccacccgtcagcgagggtggcgggcgggcccgcccatcagcgacgcgcgcggggagaggccgagtgggccgcggggagaggagagagagggggggaggagagatgggccgggtcggcctaagggagggaagggggacttttagggtttttctttttataaaatcatattaactttgtttatttcttaataattattatttgtgctctgaaaattcaactaaaatttatttacgcattttaggcttttaggaaatatacaaaaatcctccaagccttatttgacttttactttgcacattttaattgttggaggctttcacacggattttaattattctaggcataatttagaggatgtattttagagtcgttttgggacgtgacaacaatcctcacccctaagggatggtttggcgaatcgggttcatcatcactactgatatcataaacaaccctcaaagatgatggaggacaaacacaagctaaactataacggcgacgggcgatcgcctcttggcgaaccgatcttctaaaatttcgccagaagctcgaactatctttgcgacgtgatacacgatagcgatcgtagtcctctaaagttcggcctggatgcacgcgcatccattcagcaacacttacaaccttatagctgttgccattaatcaacatctcgcggtaaataggccaaaaagggcacttaatcttcagcatgctttttatcgccacgaacttctcgttcttgttccgccatttctcaacgggaggtcgaacgcatatctttcggccacaagcctgctagcaaagcacaaaaggaaaaagtgcaaaaaaggagggaaatatagacgaagatcggttccactttcaaacgagaacaattagataagcgaaaggataatacttcatcaatagaacagagttcatattgattacaaggcgaaagcggcttaaagccgaacatgcaaaaagcctatatacaaaacctaggctaccagaaagcccgaaaggaccaaaggaagaaaaaaaataaagcacacgagggcgaagggcctcacacctcagggtggtcttggcctccatcgccttcgccctcgtgcccggtggcccgttccgatggcccgggatccctttcggtgttggcagcggcggcttcctcgtccctcgcgatcctttcaaggttctcgcggagtcgagtcttcgcacaatctcgaccaccatcctcccaaaaccctcttcgaaaggcccttaaggtagccccagaacactgcgtgttgctaggccattcttctttcacgaaataggggaaaactcccgatgtggtcgctgccgtgcgcgtgcaaaaggctaaggacgaatcccgtcgaaacacgagcgcagcagtccccgtaggcgcctgccacttcgatgaccgagccggccgcttcctgcgtccattcggaaaagtcgaacgcggttccaccttcgcccggagcaccttccgcccgcgccccaaggtcattaagggtcagccggagagtgtaacaggcctgcttggcagactctgtggccggtaccagtgtcgcggcggcagcttcggccgacacaaggcgagcttcgagggatttaatcttctcctcggccgaagcaagttgtcggtctcgttcggcatcccgcttgttcgccgcttcaaggtcagcatggagagacttgttgtcccccgaaagagccttgttttcagcattcgccttctttagagtctccgccacaatgcgtctttcgtcttccttgtggcgaaggtcttcttcggacttccgaaggcggaggcggtacccatctagcctctctaaggcagatttcttcatgcttaagtgcgcggcaaggccctagacaaggagaaacaaaaaacattacgaaaggacaaaattcggcgcgcagaaaactcatacccgcacaaataggctttccacggccgcgcagctttcgccgaactcgtttagctcggtgaagagcccaaggccgtcggtcggtgcaatgacctggcacacaccgtccacaaacggagtgatctctggccgcgtggcgaaattagtggggacgaagtgtgggcggtgagcgtcatgtccgaagcggtcggttcgactgccggagcttttccctctcgttgacggacaggcgaaggaaccgcctcaacccgttcgtcctcggaaacaatcgccttagcggccggcgccgaagcactcccacccgtcgccgcttcagcatcgctagcaggtggcggagacatgcgcctgctacgagaaggtgcgcgccgcaaaaccggcgaagtaggagtcccgtcggactcttcgcttttcgaaaagccgcgggcgacttgcacaaccttctctttctttttcttcctcctggcggtcatctccggtttcactgctgtgttggatatcgccaggagggtgttcgccacaacgacatcttgcggccgcataggcgaaacatgagaacctaccccagatttcgcaggggtaggactgggagtacagctatgggacccatcatcctcagaaccagcctccccatcttcttcttcctcctcctccccatcactttcgaccgcccccttcgcgctgcggcg

SEQ ID NO: 26491 - DNA, 5669 bp, Oryza sativa
tgcactacaactcttagaatgtgaacagagtgatccaagtggtagaaatattttcaaaaggccaattttgaccaaaagtcaattttatgagaaaaactataattctggaaaactactacttgaaaaatgtttcaaaaggactccaatatgttttccaaactttagtttgcaagaaaaactatttgtaaagtggaaatgcattttttggccaaaattctagcttctaggatcttgttttggagcaaaactatttttctctctacaagcatttctaaagggaatgtgaaaatgagcccaaaacaagttagatagagttggtcatttcaaatgtttttggtttttgaaccttatccaaaaggccaacctattaaaagaaatttgatgccaaaactcaccaaaaatcttaactaggccatatatggtcactttctagcacttgggtgagtttatttcttaaacctgaataattgcatctttttggctcaaaatcatatttgaacattatgcatattagtttctctcaaataccatctcatgtgcttcttttcgcttttttttaaaggtatttgagaagagagcttttgtagcctttgcaaaaaaaaaaggcctttactatcaaatcatgaatcaatggagcaaaaaagagagatgcataaggggggtgggcaatctgaatcaaatccatattactcttgctctcaaatttgaattttccaaaaagttgcatctatagcctttcaaaagaacctttttggtcaaaagtcaaaaaacttatttaaatggcccaaatttgtgaaaatcctttcaaaagtatcccaatatgtattttaaatcttttgcaaggattttggagtaaaaatttccatttgtgaaacaaaatagcaaaattggtctcaataatatcttttaggatcttgtttttgcggaaaatgttatatttccctaaatcaaaatctattgagtttttgaaaaagttgtatataaaaattttttagagttgatcatttcaaacatttgtgtagttcaaagtttttccaaaacaccaaccattcaaactctacaaccatttgagtttcagccaaaatcttgacttgaccatttttagcctaaacttgcatatggtgggttaacccttttgagccaaagctctttgtgaatattggcttagaagtgtatctataaccctcctaaggctttacaaatgtcaaactccatggatttaaaatttgaatgtgatttgagctctcaactcaaatttactcaacctgaaggcctacaatgctcctttttatcttttcttttgataaaaaatgatttttatgaaattctttttggaaaagttactcacaagtataaagatcatatctgcaagggttcatctcatttggatttgatttgcaattattttgactctttctcattttgctcagcttgctggaattttcagaacaagcatggttttaggctgatttgtgatttttatatctcaacatgcattgcaaattggaaggagcttccagtatgacttttgatcccctatagttgaaacttacttgtaaatttttgtttgaattgtttcagctcttttggactctgtttgaatgctttttaaagcccttcttgagttgtgaaaaatttggaatttcagcttgctgacatcttgtgatttttgttttgtctatatgcttgagatattgtcacgtcccaaaacgactctaaaatacatcctctaaattatgcctagaataattaaaatccatgtgaaagcctccaacaattaaaatgtgcaaatctaaaagccaaataaggcttagaggatttttgtaaatttcctaaaagcctaaaatgcgtaaataaattttagtggaattttcagagcaaaaataataattattaagaaataaacaaagttaaaaaggttttataaaaagaaaaaccctaaaagtcccccttccctcccttgggccggcccggcccatctctcatcccccctctctctctcctctccccgcggcccactcggcccctccccgcgcgcgcgccgctgacgggcgggcccgcccgccaccctcgctgacgggtggggcgcacccatcatccccttcctcctgccgctcccaccgctcccgccgctccgcttgcgccaagcgccgccgccgccaaatccgccgcatcccgccgtccacgcgtgcaataaagtagggggaatcactccccgtgatcccctctccctttccccttttttcccctctctctctcgcgttcaaacgggcggatttgcccccgcaaatctcgccggcgccattgatggcggccggacctcccgcgccgatttccttcccctccggccgctctctcccctttcaaccctatttaaacctttcccgcgcctccctcgcccgtttccgccccttgccgcaccgtctcccaccggaatcgagctcgcgccgtcgccctctctctcctccgtcgccgacgacctccggccggccttctccgctcgccgggaccgtctcccgccccggcgttgccttctccggcttcgccgcaccgccgtcgaccccgtccacccccttgtttcgctcgccgaccaccggaacgccgtcgaccccgtcgaccctagccgcgccgccgccttcctccgctccggccgcctttttggtcgtcgccgtcgacctagggtgagccgtggaccgccgcctcttttcccccttcccttcccctctctcggccgccgctccgccgtgcctatggccaccgctggcgaccataggggcgcgggcgccgcctcccgccggccgcgccgagtggccgccttcgggcgcgccgagtggccgccgcgtggggcccggccgtcagccgcccgcgcccttaggtgcggctgacgcgtggggcccacggcgccgaccggtgtgagcccgggtgcacccggtccaccatggaccgtgaggctgccgcgtgggccccactcccgtggacccggtccgcgcgccccctcccctcggctgacgcaataaaccctttttaaattaaaaatttaaatgaagaaattcgcaaatattcatttaaagagcatataaacttcaaatggccataacttggccatttgaactcggaattggaccgttcaagtctctaatttttcttaagtcaatatcccatttttgtgctttgttcctgcttgttatatggagtttattagagtaaaagccttttcttttccgttggtcgtgtagacgctccagcttcggaagatccgctcttcgtggaggttgaagccgacgtttgggaaagcgagcaaggcaagtcacatcatccttgaacatattgaatcccagtttataaaattattttggtttaaattattgcattatcgctttatttaaattcccgcgttatcactgttttatctagccatgcctatttacctttgttatgaccttattattgttattgttattatttccttgttctccgtagaataaacaaaaccccaactagtggacactctactcatggtaccactagtatgattttaggtagatgcttcgctggttaattaggcaacattaggtggttttacaactctagactttgggaatattcatatcacctggacactatggaatggtttgattattgtggaattggattcacacctccccctctattcaaaatcctcaaaatggttttaggctgggctcggggtgcatggttttgatagtagcacctcggccatataaggaccggtcttcgggcctctgttgcaaagcactaccgtacttccacatgtctagtgggtaaggattagtttgtggctcagtctggttataaacaaaagtacacggatggagatggacgaagtcgggggtcgatggacatctctaggacaaatgaaggctacacgagctgcggcccggtagtcgagatgtcatggcacagggccggtgtcctgctgctaggggctcagtcctgcctacctgtcccgggggttccggccgtaggtggggttgggtcggtactcttgtttatggctaggatgggttggaaactatgtcatgtcttccgtccgtataccgtggtggtatgtggcacgtggttacacgtgaggaagatgtgtcttgtgggtaaagatgtacacctctgatcagagtataacctattcgaatagccgcgccctcggttatgggcaagccgagcaatgtacccaagttagtgttttaattcttaaaacctgcttaacaactaaaatgtggaatggttggcctgggttggcttgggacgagctgggacccagggtcgggttgccagttcggtctgaatcatcgtagaccttgggttaaggcaggttcgtgtgggttcacggccttgattaataatattgtatagctctggaatcgtgtttacaaaatagctttgagcaactaagtgtcttttaatgctgtttactgcaaaccctaaccctttatattataacccccttatactcccttgcatttatcctgcacttgtgggtgtgtcttgttgagtacggtggttgtactcagtcttgctcaatttttcccaaacccagaagaggagcccctggaagatgaaggctttggtgtctagctcgtgcctaccgtcaagcgcctgtggtcgtcgccctagtcttccgctgtttcctgtttgtctttgtgtgtgctgggccttcgccgcccatgtaataaattaactatttacgcttccgcttgataaactctgaaatgtatcaacttttggtgtaccttgcctcctgggacaaggaataatacacgcacgtaaggaacgcctgttgggttaatttcggtcgtgacacttgtataggattagttcctaatgtttcattcttttttgtacatactcttgattcacacaaacattttgtatgcatacatttaggggtagcaaatcctatactttagttatgcatgtaattgatccaagtttttcattttcatttaattgggatctctgcatttgagtatacattcgagtatatgacacttgtggtgttgattagtactcatcatttattcatatcctttttcatacgcgatcggttggtcagcatgtggaggttgaccaccggatcattgagactaataattttattgagatgaatgagagaaataggtcccaaggattgcaaaggtgttgatgctcaagtgatatcattacacctaacgataccaagaatgacaaattgaaaatgttgaagatgtgggatacgaagtggctactatggcaagacggtgaagggcaagcggtgctcggtcatgatagaccatgcggcagtgatgggcaagcaagatgctttgcgccaaagaaccaaatccggtggtgaagggcgagtgacagctttgtcatgatggaccgtgcgaggccatttgaagctacaagtaaccgcatcaatcatttgaagaatatatgtgaaacggtttcggcatttgtgtactattaagagggaaagatggaaagaaggcattcctattggtataattctcttcctatttacatttgagtttaggaatgccgtactattaagagggatgtaacgtcgaggtgtttgtgtatgtctcggtgctaaagtgacctatcatagtgctaccttgagagaaacccaagctttaacctatcctttgagtagt

SEQ ID NO: 26492 - DNA, 4860 bp, Oryza sativa
tattggtataattctcttcctatttacatttgagtttaggaatgccgtactattaagagggatgtaacgtcgaggtgtttgtgtatgtctcggtgctcaaagtgacctatcatagtgctaccttgagagaaacccaagctttaacctatcctttgagtagttttagaccttgtttttggttgagttgggtagttctctgaatgagctttccatagattccaatttcatcaaaaacggactcccgagcgaaaagttatagtcgttttactctgtgcttttcggaaattgcgaaaaattatcggaaactccgaaaatttttcggaaaactccgaaaatttcggaaattccgaaaatggctgtgaatttgagaatggctcctgtaaattttcggacatatccgaaaatgctttttgaaacttctgaaaattacagtattagcctccaacggctagtttttgaggggctctggtatataaactcctccaccggcctcctttgagttgctgttgttcttgggcaacattagacacatccaaacccaaatagccatccccatttcccatcctttgtggtgcctctttgtgagggggatttgagaagggaagagagttggattgagagattgagaagttgagagctagtgagcttcactccatactttgagtactcgagttcatagcaagcaaatatattcgattgtgtttgttactcttggggactaaggtctcatagacggctaggcgtcgccggtgagcatccaaggttgtgttgagccacgaaaagtttgtgaaagcttcgattttgcctccgcaagggaagaaatcaagagtgaaaccgaggagtgtatttgtgtagcctcgtgaggaaagggttgaaatagacccggccttgtggcccctcaatagagatgttggatccgtggattcgaactttgggaaacaaatcaacgtgtcccctctcttggtttgctcgttcttgcgatctctcatatcgtgcttgagcttgtttttacctgatctacttgcatgcttgattaatattgttggtgaccctatatcttgtttagacaccttttttgtcaccttttgattcatatacattttagttgttcaagctacaagttcatagctagtgtttattccgttattcgctgaactttttggttgagaccggaacttccaatcccataccggaagtttgatttgaatcaaaaattctcatcactctaatatgctatgaagttgtgataattttttggaacgcctattcaccttctctctaggcaacatcaaggtcctttcaataaagatttaattgcaacgaacacaattatgtaatcggattgtagatcggataagtaatttttttagataatggaatataatatcccagcctttgctcaaaaagaactacagccaattattacaaagatctactccagaagagagtgtagttcaagacaagttgaacacaccaaacaagagaagagaggacccaaactaagaaaagaaaaacaaaatatggagctagaaggcctcgtccaggcctaggactgaagttcgccaatgcatagaccaatgacaatatccttgcacgaagaggtttctccaaaacagtgcccccaaggaggatgcgacgtggatcgccgccaccgctcgttcggaaccgaagcaaggctttcacccggagaatatggtagggaaaggaaaggggtatgctaaaacaacacctccaaggaggggaacgacaccaaaaggcgtcgccgttgtcagctggccaaatggctctgcaaggctttcgcccacgattcccagtccaaacccacaccaccaattcgcacaagaaggatcgtcgtcgatcaacaacattgtcccttcagcgatttggccaaggccaccacccacaattgttcccgccgtcaacggcacgcccgcacccggactcctccttccccgccgctagacccctttcccgcctccacataccgccgccgatgacgacgcaccatcagccggatgatggccttcaaccatcgccgccataggtaccatcgtcgacagccgccaccgccactgtcacagccaccaccatcgccagccgccacctttagccaccatcgccaccggcaccgccaccggcacagacacccccgtccagccaccaccgtccagccgccaccgtcagccgccaccgtcgctagccagcgccgccatacgccagccgtccagatccggccggattggcgtggatcggaggtgcagcgcgaagcgtgggtcgccggcatcatggaggaaggcgacacgggcacggcgttcacagccggagcattgacgagggcgccgcgcctccctcgcggcggcgaggttcttgacgagggccggcgtcgcggcacgcgccgcagtccgccgccgtcgtcgccaacttcgtcgccgccacatctgccaccatcatcgccgctagccaccccccttgccaggtccgcggagcggcgccggcgtcgaccgagcccgtcgccgatcaccccggccaagcggggagaccagatctggcagcgccgtcgcccgtcgctggagccgcggagagccgacaccgtggagcgccccaccgccgcgcccaacgccacgccgtcgccgtgccgtccccgtcgccacgacctcgccgtcccgccgccctcgtcgctaggcccgcgccggggcgaggtaatatgagagaaaattttataaggaaaaaaagtaatgtataacataatagttaagaatacatgcatgtatgtgggcatgtagtagttcttctcagttctcacgtcactagttaagacaaaatcgatccccgcaaaaaaaaaagttaagacaaaattgagattactctcatgttgacgagagaaacacacactggcctaggagatctgcttagctccagtgcaggtctaaaaggttgatgagatgcggacgtgccagtcagtttgatcctgcaactgacaagatatgcaaacagcagataaaatccacatgagcccttctgcactataaattaatatatgaattaacaaagatggaggagagaaataatcctgaaaataattggaaaaccattttcactcatgtttccacccacctattttaccctagcctagtttgccacgacctgggcccacctggcagcctccctggcttgcccacgccctgtccatcttctcctccaccgctctacccgaccagcattcaagaaaaacagccgaaagagagaggggaaccgagagaacgacctgctcgacgcgtggactcggcgtggcatcgccaagctcgccttcaacctctcccagacgcgtcgcccatctccacttcacacccagagccgaccagaccaagagaggagagccctcagcctctccgtcaccctcatccttgtcaccgaccgtggagaagacgaaggctgccgtcgtcgtcaagccgcgcacgccgtcatctctttttcgttccatacttctctctccatgccgagcaaatcctcttttgactccactttgtttcgtccgctgcagcgacgggaacgccgccgtgcccacgggtgttgcagtgcgtgcaccgagcgccgccgcaacgacatcgtcgccgttgccgtcgatttaggccaagccggagcgagctaccacgccaccagcttcgcgtagtcctcctctccatttcccctcaaaaatcccaaagaatggcgcatcgaggaaggagatcggcgtcatcctcctcaactcgggtcaccgttgccatttgccgaatccatcttctccggtgagtcccaatccgattccatgcatcagtagcatccctgtgacctcaataaccccatgaaaacacatgcatgtcaatttgatgagtggatcgagtcgttgccgtcttcccggagctctgcaccgtcgccggaccatcttcttcaccgctgctgttgtccagactttcccgcgcctcgttcaagcttcggtgagcatcgttgagcccataggatttcattcatgcatttcattcacttagaatcgagcaccaactcaacatgcagtagcagcctaagcacagccgccgctcggactcgccgccagctactccgatgttccctaaccaagaaaagtagaggaatggaatcaggagagcgttctcttcattttgtcttttgacctcaaccccaaacgagccaccaatcaccgccggcgagcttgacaatctcacagccgcctcccctgtccatggcagtgctggaggttgaagacgaggacgtcatcctgtaaataatcaaaactaaaagggtcaatatgtaactttcttacccaatgacatatgggcctaggactgcgggtttattcttagaaaactcagatctttttgcatattgatctctcactgctatgtggaccccctggagagaaaatctgagaatatacaagagagatacctagaaattgtaaaatccatataaaatcaaatatgactcattttgagatgatttaaatttctctgaaatcaccaaatcattaactttaactttatggcataaaaacttgcactcacagtacaaatttagcctctaaaattcatctaatataaatcatacataaagcatatacaaacttataaaatgcatataaaattcatctcaactcattttggaacaaactcaaatcctacagactcaccaacatgcactcattggtaaagagaaataaaataatatacttattttataccaaaagccactgaaacgattatctttaaaaatagtaaattctagataagctgaaatttagaggtttatataaaattcatcttagatcctttttgagtaaacctaagttctgtagaattaccaaaacat

SEQ ID NO: 26493 - DNA, 9032 bp, Oryza sativa
  unsure (1)..(9032): unsure at all n locations
gggggttttgttgatggtcgttatcgatcagtttcgaccgtcaatattaccaaaatagaggagaactagtgatgcttgcaatgcataaatatgttagaataataatattccactagtattaggtatactaaccttttgcagagattgacaataaagtgaaggagaatcgacatcaacagaaacgataaatcaatcggacgatgtcgagaaccagacttatgtatgaataggccaagaactaaaaattgatacgatgaattgggccaaaattcacaagtctgcggagaagaacaacagaggaggccaccagccaaaattgggctggattgggccagccccaggttcggcaccttccctagcgccgttggatccaggttttggctggacggcgtggatcactcgccaatgacggttggagggcaattccgaccattccaaccgccacaaccgtcattggcagcctatttaaggacttcaccttctcacttcactcacacacctcaagcaatagctctctcatttctctcaagtttagtttagtagtatctagctggtggaataggaataaagtagaaatcaggagtccggaagccttcggaagagttcgggtatggctctagcagcttttctcttctcttttgtaagctttgtacttttattagaatactcttctaaatacatttatgaatgcctattttacattatgttcatgttatactgaatatacggctagcttatctgggagatgctttggtgcgggtataatgtttgcttatgcaattactctatgtcatgacgatgatattagagtagtatctggtagtttaggcgtggtgtctagattacgggatatcattatttggggttatatattgcggatgagaggtgggccgctgatggtgacagctcagtacgggtattcctccacgccggtatataattctaagttaatttcctgaggagggtattcctccgtatttagccccggttgtatggtcatgacgggctgccgtaaggaactcggcagttaggggtggcttttcgaagtaccaggagggcattggatagagggtattagctagtatatcgagtaactagatactatgtatattagaagtataggaatagattatctttctcttttctttccacttagcttagataatatattatgagaatgagtagtttatgcttgtgtgtcactctacccttggattatcttaacccctacttagaatatgattatcacaagcaatatataaattattagtccagttctctttatatgatcttcccatgggataaaataaatacgatacccttggaatactctcgggtgaaatgctacaatggtatatccgtgcgcttgcggatgaactctataaccataatataccagaagtatttctgcgccattgctgggaattatatttctagtagtatcgttaagaaataccaacacccggagacaaccccgcctgcgcctcagcctcctccgccgacactgcgcccgccactgccggccccgccacggtctcctggctgatctggctgcgggggtgccagatccgcccacgacggcgccggatctgccccctccggccgccggcgtcgacggcgagtaagagaggcggcggcgagagggagagagagagcagcgcggcaagagggagacgcgaggggcggcggcgagagggagagagagcggtctggcggcgagagggagacgcgaaggacggcggagagagggagagagagcggcgcgacggtgagagggagaagcgcgcggtggcggagagagaggcgaagaaaaagagaagagggagtggcggcaaaaaaaatcgagagagggataggtaagtaaaaatatgagtggggcttcgtgggctaagacacccattgtgtataggagtatctctaccgggttgctttagatcttgaggagcccatccagggatatcctcaattacgagcttaagtttctctatgagtgtcctcggttagtgagaacactttaggagtggctcacgttatgatgcgctcaggatgttctccaagagtcctttaccctgcgccacctcctggctcaccggggaatccgtagttcgatctcaacttcgctgttgtgcttgtcgggtttgtgttcgaagccttcaccagcccatccgtaggcccctgcttctctggcatgtgaaaaaaaaaactgcatttttgttttcaggttctacgagcatgcaaaatctgcaggtctggagtagcagcaaatttatttatttgctcaatgttgagttggcttgacatgtattgtgctttagaaaatgtgtgtttttgacagaggccgtgtttagttaccttcaaacttctaaaaattctgtcacatcaaatatttcaacacatgcatagaacattaaatgatttgataatatggtgctaaagtaaatatttggtaatgatagattaattaggcttaatagattcgtctacgtttaatactttaaatgtgtgatttgttttgttattagtctacgtttaatactttaaatgtgtgtccgtatacttaaaaaaaatttgaccaaagaactaaacacggccagagttgttagttatactagaagtttaagcgcggtgccacgctgcgcacgctaacatatgcataagattaataagagcatctccaacagcctctccatcacactctccaaaccaaaatttagccattttaaacaaaaatcatactcgaacagcctctccatcccagaatagccaaactccttccctcgctagccaaatttggccagcctactccacgtgccattcacttgccatccgtggatcccatcacctcccattcacttttcgcgcaacgtggcgagggcatcggtggcgagggcgcggcaacggcgtggtgaccgagggcgcggcgacggcgccggtggccgccggcgagccccatgaccccttccctcctcgccttctcctcctcctccgccgcgagaagaccggcgcctcccccttcggcgcaacgacgaggagcagccgcgcctccgcgagccccccgtcgcctccccctccggcgcaacgacgaggagcaaccgcgcctccacgagccccacctcgcctccccctcctgcgcaacgacgaggagcagccacgccgccgcgagctcgcccccgccgcgcggtcgttttaccgcttccggaccgacgacgacgacgtggtggacgtggccgtctccggggaggatggggacggcggcggcggaggcggaggcgggagggtacgcggtgtccgtcgaggtccctggcgctcgcgggcgggagggcgggctagtgcttcgcgcctcggggtttggagagggcgtcccgctggcaccggccgccggcggtggctccctcgcggccgagctctccttcgacgcgccccgcgtgcccgtcggcgtcgggccgggaagcccagcgccgctcggcatgtccatctcaggcgatggcgccgtcaattttgcggcatggaaaggggaaaaagaaggaaagagaagagagagagaggggaagaagagtagaggctgacatgtgggtccattgttattttggagagaactaatagagagtttgttggtttgactagccaaattaaatagagagttagctatatcggtgtttaaagagcgtaatttggagaagctgttggatatgctctaagaatcatataacgaaggtatattggggtgtacggtgcagcaaaatggttgtataataaattaatagaacatgatgcggctcattttgctcacaaatgggaacagcataattttaaatttactcgttcccaagctccaccggcggtatgactttagtaagtttgctcaagataagaaaacaatctcagcgaaaaagcaagtctatccgatgatactaacagtttggcaatgtaggatagatcgcccaggatcgaaggaataggacctaccagttcgttctcactcaggtctctgagaatcaaaatttgaatataagaattcattatctaatcatacagaaactactgaacctatggattgaaatgttgtggtctactcatagaacagcaagagcccgcataaggccaatcacatctggaattttcccggtcagtctattttcttgaagtgacctatgtaacacgaatagaaagcgcacaacatagaggctataagtaagcatctataagcatgagaagatacgaacgaaaaatcacataacaagctagaagatttgcaataactaaggaatatttatagtgtggctacttgaagaaagactattttgtaaggtatttctctagcgttttggttatatgaaatgtccctacaatacatataagaagttcgcgtcatggtgtctgacactcatgaacaatgaaatatcactgaaatattagcaagaacatacaaaatctcaaagctagtgcagctccctatgctcactggaatggtccctgtgagattgtttcctcttacatcactgcagatttggaacaataaccacaaccaataaggataagttgcacaaaactgcttgtctaccatattgcctattcaattatctaccatattgcgaggataagtataacaatcataaaacaaaaatactgatttgcatttcagcaaaccagtagaaaataatcatatatgaaaaattaacaggagatgtggttgcacaccgggaggggaggagacgtcgcgccatgcttacgacttgagataaaggtaataggacaaaacagaagcatgttcaagatataattaatgtgtccaatacattgcattcgatatatgaaacggaatatttgtacatgtaagcttaataaatattgaatgggtacaggaagaaagtaccatcgacatgagctatcaaactgaatatttgccttcaatttgtcgctaacaggatgttcacatcccttcatgtatataaaacatggtcaagcacatccatataccatcttggctatgtctacgtgcaataatccgaccgtagttcgggattatatttatatagcttggaggaaaagttgctactttgaaccattacatttctccaatgaacacaatcacatttaccaggattcatccattctctttcatttgtcagctccattaggaaacattcaacatagcctataactttttgtagcttcttgataaaaaatctgcatgaccacatggtaaagtaagtaaaaaagattttctactttcagctttgatatttagttgtgcatacagctccaaattaagaaccgagatgcattgattcattctgaaggactgcaaaatagaagaaaagaaaatgaaggagaaggaagagaactcataccatttggatctgttcagtctcgccagcggctgtgtcgatccaaattcagacatccaaacatatgagtttgatcattcaaagaatgagaaacatgtcgtaaagggagaaaatgagagaaagcagctacctcaagacttgatattaaattcgtggcatgaatttcagtttggtttaatacttgtgtttaatcttgcgatgtatgtccctgctaacactgtaacacaacacaataaaaagtaaggcaccaaccatcagagtagtgccaacttaacattgtaaaaacacaaaaatacctccatcatcagtgcaacaccgatgcatccatgcaacatgttcagaaaaatcttgcatttagcgatgcatgtattcctgcaatagtcacggttttatgttccaaaactgcatgtatagctactctgtcctggtcattcatcttatcaaactcatcaatgcagacagcacaacgatcagcaagaactatggcaccagccaccaggccaccagactgtcttctttcccctgtccacaggattttgttcaggacttctataggaaccaaaagaatgtacgaaagaaagtttcaacaattaccagtctctcgatcagaagtgacagcagcaggcaaaccaacaccagacgaaacccttccagtagttgaaagggcaatggtcatgactgctctacggagctgggaattggcaattgaaggatatcactgtgacctgctcccttcgctgcccacgtcgccacgggactgcaccaagccgcctcctctcgccgcccaactcgccgttgggatggggagacccggaaccgcgaggcccacgtacggtcccgccaccagcacgttgaccacaccagcaccaccggctcactcagatttgcagcccgcgggggcggggggggaccgacgcggctcggaggcgcgtaaacgcgccagctctaacgggcggcgcgcacggccggatccgccgccgccgaaggccggtcgtgcggcgacggatccgccgggggacccccgttgccgtcactggtggtagggggccacgggccaccgaatgccgcccgcacggcgggagctccgccgaccttgctcgtctccgccgccgccaacaaagtctgcaccgtccccttgccgactcgagggcagagagctcctccgcgccgctgacctccttaacgcctccccgcggaggtccaccccccagatcagcccagcgccgcctcgttgtcggagaggtcccacgcctcgtactacctctcggcnccatcctcaccggcaacccgnccaccatcaccatcaccggaaactcctccttctcggccttcatacgaacctgcagcggtgacggcgcacaggaagggggcggcggcgcagcacaacgnaaagaaggtggaagncggcgcgcgggggnacggcgacagcacgcgagggagggggcggcagcgcagcacancgggnaggaggtggaagncggccgggaggcgacgggcgagnagatgncggcggcgcgcggggagggggccgcggcgcagcacagcgaggaggagttgggaggcggccgggcggcgacgagcgagaagggggtgncggcgcgcggggaggggccggcgaagctccacgtccttcgatctgcgtgaggtggggaagggcggcgaactcgcggtcgaacccggcgccgccgccaagctccccgctgtggtcgccgctgtcgagttccgcaagctcctccacgctgacgatttcttgctccccggctccccaccgcctgccctgttcgccttaaggattttagccttctaaaatttaccagtgagactgcgaatttctttattttgtgccactttcttctcttttcctcgttttttttcttttcctcgcgttttcttttctcccgagagttgtaggacggcattgtccctggcttctgcgtacagatcgattggatcaaaccgattcatccttctgctcgctgttctatttcgcatcgcccaggggagaggcggaagctacggcggcgcacggcaccgcccatcaccgcgtgccctcgttcccttgttgcgccaccaccattgctcctctctctccccctcctccgaagaaagggaaaaaattgagtgtttttggataacacttcatacttagtactctctccatattttaatatatgacgccgttaactttttaacaaatgtttgacatttcgtcttactcaaaaaaattatatgattataatttttttattgtgacttgatttatcagcaaatgttctttaagcatgacataagtatttttatatttgcataaaaattttgaataagacgagtgatcaaacgttggttaaaaaatcaacggcgtcatatattaaaatatggagggagtaccttgtatgaacagctactggatgcttttgtaatctgaactagaggatgctgcaattggttgcttttaatttgtaatctgaaattgattgcctaggatatgtaatctggatggtattctcagatttggcaatttaaacttgttagacttgttcatctatggtcaaccattatgagtatatgttgtcgaaaattctggtcacatgctgtcaaattttcggggtacatatgctgtcaattttttttttctgtactatcttttcgtgttttggttacatgctgtcaaaaaaaatacagtagcattgctgtcaaaatttccagcaattagctgtgaaaatttccaacaaaattacagcatattggattcgagaaacgcccagggctcttccggctagctccataaggtggtgggctagacgatctgggttcgaagtctcaccccttctaattatttgatattaggtcattccttaatattcgcgttttttacagcatattggattcaccaatttctcaacttgaacacacatgacatttctcggaaacatatccttcaaaaaaaaatatgtacaacgtacaacacaattgatcatttttttggttgtaacttataattacaactatgtatactctttcctcacaacactagttcaaaacagaatggagcgaaaatacataggactagcacaaattgattcctttacaacaagtgttctccaaaacttgttttttcccctgtaacaagtcttttcccagaatccaattaggagatgggactgggtgctgggtgcttctcttttgcagtgctgctgccagcggtgggcgatgggactgggtgcttcttttttgcagtgctgctgccagcgatgggcaccggcatcagcggcgggatggtggtggtgtggaggcgctcggggttgtctattggcggcggcggaaggggatgtgtggcggtggcgtcgcttgttcgtcggtgtctgctcccgaatcccaatcgatctgtacgcagaagccagggacaatgccgtcctacaactctcgagagaacagaaaacggaggaaaagaaaacgaaacgaggaaaagaggagaaagtgttacaaaatagagaaattcgcagtctcggtggtaaattttaaaaggctaacggattaaatatcaaatcctagcgaattggatggtaaatccttaaatttctcgggtggcaaatccttaaggtagtgtttggttgctgggatgagatgggatgggatgggacgaacccacttttaggggtgtttggttgaggggtgggtgggatg

SEQ ID NO: 26494 - DNA, 3000 bp, Oryza sativa
gccgccgcctccaggaccagcagccgcttcgtccgcgaccgcctccgtctccgcgaccagccgccgctttgtctgcaaccgcctccgcctccacgaccaactaccaccgctcgtccgcgcctctcctcgcctccgcctccgtgcgcggcatccgcctcatccgcgaccgccgccgcctccgcgtccgaccaccgcttcgtccgcgaccgcctccgcctccgcgacagactgccgccgcttgtccgcgcctctcctcgcctccgcctccgtgcgcggccgccgccgcctccacgtcagacgccgcctcgtccgcaaccgccttcgcctctgcggctgactgccgccgctcgtccgcgcctctcctcgcctccgcctccgtgcgcggctgccgcctcgtccgcgaccgccgccacctccgcgtccggccgccgcctcgtcctcaaccgcctccgcctccgcctccgcgaccgaccgccgccgctcgtccgggcctcgcctcgcctccgcgaccgcctccgcgtccgtgcgcagccgccgcctcgtccgcgaccgccgccgcgcgcgcctccgcgtccggccaccgcctcgtctgcaacctcctccgcctccgtgaacgaccgctgccgctcgtctgcgagctagccgctgggagccagacggccctaacggtccgtgaaagttctccatcccatcccacctcaatcccttctatcaaacaaaaaactataaccatcccataccacaaaccaaacagacaactggaaccatcatatcctaaaaaactgggataggtctaacccatcccactttgtctccaaaccaaacacacgctaaatttcttggggggaggggatagatgtgatgtttttttcggaaaaaccctcgagtttttcatgtttacagcgttaccctctaggagtagaactttatcttcttcgtgttgtatttctataaaacccgagggttgtttcgtataaaatgaacatgatgttagtcggtggaagaacgtgcgcgctattccgttcaaacacgagaagttttttttgtaaaactaccagcacgcgtcattgagaccggtagaaccggtaaaaaaaaaggaacggctccattgcacacccaatcgaggagcttctacacctgcaaaggctgtttagttcgcgaaaaaaaaatttttgggtgtcacatcagacgtttgaccgaatgtcgaaagggattttcgaacataaataaaaaaaaactaatttcataactcgcttggaaaccgcgagacgaatcttttgagcctaattaagtcgtcattagcacatgtgagttactgtagcacttatggctaatcatgcactaattagcctcaacatattcgtctcacgatttcaatgcaaacgtgcaactagtttttgtttttatctatatttaatgctccatacatgtgtccgaagattcgatatgatgtttttggggaaaaaaaattgagaactaaactgggccaaagtacatggcacagctgacgaggagccaaaataaatttaaaaaaaaagagaaaaagggtagcactagggcttttattaattgatgatttgtcgaatccaatccactcgcggatggcaatctccaaaaaaaaccactctatataaatttactgcacaaggctaacagtagatgcatgtttttctatagaaatttcatttgtttgtcaaatccaatccactcacgaagaagaatgatagaaggcattgagtgtgtttagttcacgccaaaattagaagtttgattgaaattggaacgatgtgactgaaaagttggaagtttgtgtgtgtaggaaagttttaatatgatggaaaagttggaaggttgatattattaaatcttcatttcttcatttcttcttgtactagagtagaaaaggttgatattattaaatcttcagatgaagtttcagctttgttgattcttgtggttatcagggtactgaaatatataaatgtattgaacggcaataactattaagatgttaatgcaatggttgtaatatgtgaaccattacaaccattataatggcaattacagtgaagcttgattctttgttattatgtaaatgcaaatggattgccttgtttatagagtctacaaaatgtagcttgaatcaagatatatggtgggaaacatgcatttgcatgtggctatataattagcaatatattaaaccattcattttatttttgcctgaatcatatgtttgatttgtactattatagttgtagcatttgcccatgtatttgatttgtactattatagttgtagcgttagcatgggcaagttacaaaaattgcctgttgatgatatgaagaaatatattgccatgcttgaaaaccctttatctgccttgccttgcatatgctttatcattcacaaccagggaagatgctttatcattcacaaccagggaagatgctgccaggtagtcctttcttgatccatagtagagcttatacaaaatcatatatgcgaatattgcagtgagtatccgtaaaattttgtggaatttacgtcaactaattaagttttgagattatgttgttaatattggcttgaagataatatggatatgggcgcaggctggtaacatgcttgagagaggataaaagattttctcaaattttcaaggtggtggatctggtggtcagttgatagaagatagtgtgaatttggtgcagaatttattgtaatttgagacttttgagtattgcggatgtacggtgacgaatgacgaaagctttacaactaataagtgtttactactatctttagttttatggtttgtttgattttataaaaaacatattctaactattgtactgttatcttgtccggatataatgataggaattcgatagtgttcctagcagcttgacaaatgatatgcggtatccagcattagtgatgttagtcagcaatgctcacatcacacctcgacctaccttaacctaacaatagtgtcct

SEQ ID NO: 26495 - DNA, 9378 bp, Oryza sativa
gttatagaaataaagagatcgatcgatgcaaagggatgaagaggaggagtagtaggatggacgtgataaagcggtaaaggtaaaggggatcagattcagagagggtttagtgatccaagaaaggctctggatttgagcccggataaaagcagtatatccccagctacatatgggcatgatacgtacattccctttgggcatttgcgtttgcatgtatatgcgccccatgcgaatgatgcgagatgcgtttctcgacgcatcttgcgcgtaggatgagatgaaacaagcgcagcgcggcgctctgtcgcttcagtagctagcttaggtgcagtaccacgtttccttcagataaaacacacgtcgcgtgcaattcagggtttacagtctcgtcgagccttcgaaatgcgagccctagaaagataattcctctttttttaattcattttggtattgacttcgaaaaagctataaccaattattatagagtttgcagaactaataattgcgaattacagaattatagctttgattaaataatcataaagaagagatcataaacaaaacaagaaaaattactaagaaaatcctagaagaataacatctttcgtacgcgaatctggatatttgtgtagtcttttttaagagatcatttcaatccggttcgggaggctcgaatttaaaaaattatagtgaaattcgtcgaagctgtgagccttggtgatattcagagtggtgttttggtatccctttcttctttacagagcatgtaccatcgtgggctttagtctcgtgcaagagataagggcttgcgctcttgggccggaaaacattgggccggttgatgacgccgtccatgttccccgtaagacatttcttgatttctgatggctctctgcatctctgatcactgtaattgagcattagtgcacgatgttatctgaatttggttcaagtctctggacaatgtacttgagcatgatgttttctgaatttcatgcaagtttttcggataaaaaaactccaaatcctagcatatgtaatccacacgtactacatattgtaacatcctgtttgttcttgcttcgacaactttctgaattctgatacaacgaaactgaccactctagcttgcatatgaaacatctctaagaacaattagttaagaacctagaagagttaaaacacgtagtagtacatgtaatcgatcacctctcacactacaggagggatcgatcacagaatctgaccaattaaacacgacatctacaaaaacaatcacctagaattgtactccgtactacacaacaaaaattaattaacaatcataattaattcctaaaaataattaagcttcgaaaccctactactaccaatcgagcgattaactgacggcgattacagcgaagcgctcgatcggatcggagtccggtcagtacccgccggcgccgccgctccatccgcctcggccggcggcgcccatctggttgccgccgatcgccaccgacggccgctggttggcgttggtcaaatactgccggacggggtcatccgtcggcggcccggcgagcgccaccggcggcggcagcggcgccgtgatgacgtactgctgcatgaccagcacggacgccatcttggagaactcggaggagacgaggaggtcgccgatggggccgagctccggcgactccatccactcggcgagcgccgacgtcagcggcgagctcgcctcgccggggtggcggccgacgatgtacagctcgtgcgcgttgtccagctggctgcggatggcggcgaccgtctcctcgctgttggccaccacctgctcgacgtagaggatggcgtcgttgccgaggttgcgcgaccggaactcgttgaggtactcctcgtccatctgccgctcgctcttggcgacctcggggacgacgttgatggcgcgggagtgggcggcgggcatcggcggctgcggcggcgagatcgccggcgccgtgtaccccggcgggattaagcggacgatggtgaggcacacgcccgggttttcgaccatccgccacgcgtacgcgagcccctcccggtcgtcgggcccgccgaagaagaggagcgcgacgtggtgcacggccgccatcctcgccgcggcggcgctgaggccgcggtcgacgaggatgccgacggagcacggcgccgacgcgaggatgctctcgttgaagccccggagcgacgcgttgatgggctccatgccgccgtccaccgtctgctgcttgtggaacgggagcacgatgagcgagacgtgcttgtcctccgccagcacgcacacgtcctcgtgcatcgtctggtacggcgacaccgccgtgagcgcctgcaccgacacgccgccgaccatctcctcgtagctctcgaacgcgttgaagatgtggtcgctggcgccgcccgggttcgacgccgagtggtgcgcggcgagcatgttggaggcgcggccggtgagctcgacgaggtggagcgcgtagatgaagatcggcgagcgcttcgtcgggttggagagctcgagcagcgagatgatcgacggcacgttgcgggtggtgtgcacgcacgccagcatccggagctccgcgtcgtgcttcgaccgctgcaggttccgccgcttgtacccgaccagccgccgcgccggccggtacaccgtcgtcaccaccggcgtgaccagcgccgtcatggccaccgacaccagcaccatcacggcgaacgactcgtcgtcgagcacctccttgtccctcccgatgttgaggacgatcatctcgacgaggcccctggtgttcatgaggaaccccagggcgacgccgtcgcggaacgtcatggtgtaggagacggcgatgaggatggtgcccatgatcttggcgaagctggccatgacgaacacgagcacgaggaggcccacggtgatggggtcccggaccttggtcacgttcgtgcggaggccactgatggcgaagaagagcggcaggaggaggccggtgacgaagtcctcgagcttctcgattagcacgacgccgagcgggccgctcggcatgacgaggccgtacacgaacgcgccgaacacggagtggatgccgatggcgtcggtgcagacgccggcgaccatgacgccggtgaggatgagcgtgatgtgcacgtcgccgatggcctccccctcggggacgcggcggacgatccaccacatgagcgggcggacgacgtagaagcaggcgagcacgaaggccaccccggcgatgagcacccagagggaggagaaggccgaactgttgacctctgagatggcgatggcgagcgcgaggaggatccaggcgcacatgtcgttgacgatggcggcggacatggcgatccggccgaggtcggagttgagcagcttgacctcggcgaggatgcgcgccagcaccgggaacgcggtgacggagagcgcgacgccgaggaagagcaggaaggaggcctggtgcacgttcttggacacctggtgccggaagatgaacgacgtcgccgtgccgatgcagaacggcagcgccatgccggcgacggcgatgatgagcgccttcttccccgacctcctgatggtgttcacgtccatctcgaggccgaccaggaagaggaagtagaggagccccaggtgcgccaccgtctccagcgtcagcaagctccgctccgggaacactttcaccgcccacgtcgaaacctgccccatcaccgacggccccagtatcacgccagcctgcatcaccaccacgacgacgacggcggcgacacagttaaccaatcgaccaatgagaatagaacaatggcggcggcgaaggtggcgggcgacgtacgaggatctccgcgatgacgcgaggctggcggaagggcttgaggaggatgacgaggaggcgggtggtggcgacgatgatggcgacctggaggaggaagagggggagggagaagtcaagaggggaggcgccctgccagatgccgtaggcggtgaccatcatcggggagtagcagacgaccgcgccggcgccggtgccggccttgccacgcgacatctgggacgcggaggtggcgttcttgatgagcgggaccgcgccgcccgtgccccccgccgccgccgccgccccactcatgatcggggccatctcggcgcatcggcgcgtcgacgagagagagagagagagagagagtataagctggtggcgcgcggcggtggctgtgagcttctcgttttcgtccggctccccgtggcgcgtgcgatccgatccccacactgcctaattttgacgtgccctggccgtcgcagctaaaccagttgaagtgaaagctgcatgttcactatcacaaaagtgtataggccggcccacccgtattttgcggcccaaattttcgtgggctggtttgggtctcgatccaaatacaggtgggtgggcctaaatgggccgagttcactgtactgtttacccatgatagggaaaatatgtagtactccctctgttttatatatttcgctagtaataacaggcacgacagatgtgtgtttctttatatatatatatatatatatatatatatatatatatatatatatatatatatatatatatatatatatattaatatttgtaatattgtaccaaccaaatttatacatctcgtcgagacacaaccaaaacaaacaataggaaacattaatgataatgtggagaggtggtgccatcgtaccaactcactctcagttccatcatacgtgcatgtgcggccatgccaactgcctacattcctccacatataacttgcttctttatgcccatatccatcactacaactagttaacaacttataataataatgctgatatagtctcatctctgcatatcaaccaacatacaacagaagttgcacaaatttaggggaaagaaaaaatgttaaccaattttttatcggaaaggctatatggctatcgcatgtttttgttaggctgtatcattcgttttttggtcccttggattttgtttgagattcgtgctatctagacttttgttttcttttgtatgtgggcttttgattattgtaagttcgggcttccatacgtgggctaaatgggcttctttttttttttacatttttgtgggacccactttgtgttgccgacagagagagatttttttgtgagagtgtgttaatggtgggacccacatacactattcaaattttgaaatccgcaccggagagagagattgtctgaatcagactagagagagagagtgtgtgagagattcattttgctttttgcctttttcctcatcgtctcgtccggcgatttcggcggagatttcgtcggcgacttcgggaggcgacgacgggcgtaagctacgccgcggcgtggattcgtgcaggctacgtcgctgtcacgcccgaaaattcactagtaatttccgaacttatttgtgcataaaatcctcgtccaggaatcagccgaggtacacaaactgacaatttaatatacagattcatcaaattaactaaaacgataaatacttacttaagaggcacttagtcctcaccatgaagaaaactgcagcggaaaataaaatctagcgaagctccagctccactcccacaggcagctcagctggggtataagccaaacgtcttctcctcctagatcctttttcttcaactgaggttgattgattattgcaagaatgagcatatgacatactcaacaagccacacagcaaatatgcaagtgcacaaggataccaaaggatggcataatataggctcatttgcaaaagcagcatttagcaaaacatttaagagaaataaaacagtggagtaattaatcagaaattttaatcaacactgaacaacacacccatgctgcacaggcccaaccatcctgaacaaccatacccggctgtacagatctaactccaaaccaggagctaagcaaattattaccaggtataacatccataattattgtgagaggtgtgagactaatcacgaaaaacattgctcaacccgcccataaccgcgggcacggctattcgaatagttttactctggccagaggtgtaccactgtacccacaagacacagccccacaacatgtcaccatgtgcctcaataccaccacggtacctcggaaaggagttgtgacaataccccttgcacaacacaatccaccacagcgcacctttcctggatcataatcacccccttataaacaaggcatggactccccagcgacccccgtgggcttatctccgccacttctcagtctggtgctccgcaatgaatcatgctatacaaaaggtaaagccgttgcccacgctggcttgtggttggcacggttaatgtttcacaacagtagctcgcgaaccggtccttaattgtcatgagcacgactctcaaaaccatgtgctcacaacccaccattatcaagttttagttggcaagtaattaattaaccaatcacgattgaccatcgtgaactatcattaagccatcattaaataataatgagtcataagtaatcccaatagtgtgctaatgtttctaagcatggctaagcaatcatatctaatatctagctgaaccaatatatatagctcaactagtcaagttataataacccaaggtatcaaggaataaagtaatcaatgcaaacaggccataacaaaggaatagattcacaccacccagtgacattcgaaaataaatgcacagttgaaataaatagagaatttaaatataggatcaacatgctcaaaggattgtgtttaggatctgtgtgacttgccttgcaataatcggtcttcaattaatcttcttgaatacttccggcgcactcacgaaccttcgcaacgacggaaacgacaagctaacacgcaaaacgaagaaaaagactaataaaaaccaaataaacaatacataaaaagtaaacaaacatgtagatcataattttagatgaattatgagacttgaacggcctcattctgacttcatatgaatttattatgaattttacaagattaaatctaattaaagcccatttaaaaagaattaaataaatttaattcaatttatggataattttaatatgtagatctttattttatacaacttttgcaacttgaaccacattaaactgagttacaatgaattagttatgaattttcaaagattaaatcggattaaaacacttatatggattttaattgaattatgacgcaataatgaattatttttgaaaaggaaaagggaattattgcgtcatcaaaggcggtccgggtgcacgggacggtctaaggaaacgaacggccgagatcgattctatccaaaacgggcggccgagatcaacttgatctaccgcggttcacgggacaaggcgacgatgacatcagcggtgacgtcagcgatgatgtcatcaccggcgacggctcggccttgcgcgctcgtcggcgaacgacggcgcaacgacgcaaacggaggacaccaacgggtagaggacaacacggcgaactcaccggtgaccaaaaccacggtggaagagcaacggacggcgccggcgacaaggaagaagcggcgacggtcttcgggtcgacggtgacggcggtgctccggcggtcttctgcggcggcgaagaggtggacggggacggcgacgacctcgcgatcccgatggtggcgacagcgaccaacgacggcggctgcaacggcggcgcggcgcggctgaaccgacgacaacgacagcgacggctagggctacgcggaggcggcgctagacgcgacggcgggctaaggcaaaggtggcggcggatagaggagagctcgagggtgcttataaaggggctagcgagcggcgacggaggcccacggcgaccggcggcgagatggaaagctagggttggagggagaaaagtcgatccgaatcgagctcaaatccgtcgatttccaaacgtaattgaccgaagtttctataagagaaaaggaagaggagatcgaggagattatttcccctcaaacgatttcaccggaaacggaaaggatcgaccggattggaaagcggcggcggctagggtttcggccggcagcggcgcgaggaggaagacgggcccgacaggtggggcccacctgtcagcgggagagagagagagaggagagcggtggcttggttgcgggccgacttgggccagggagggagagagaaagagagaggttttgggccggctttcggcccaaagccaaaaggaggatttaaaaacatttttctatttaaattattcatgaaatgatattccattgattaaaaatacttccttggctcaaataaatcccagaaaaatctaggaactatagaatcaagtaaagtatttaacaaaattttatctaacccaattttatattgagatttagcaaattagatcttctcttttaagatcatttctaattattccttttaaacaacaatttataatttaaggatttttaaacaagaaaagctcttaacaattataattagatcattattgatcaaataattactgaactgttctttgtatcatttaggaattgagctctgaaaaatccgagaaaatttcagagagttgacttaatcatggagaatttaataaaaattaaatccatccatgctttatatttaggaaattttatttcccacatttaacttcacttgtaaattaatgaacatttaatataaattctaataataatttattaaataatttataaatcctgaaacaaaaatcaggatgtgacagtcgcggcagtgattccactagagtttgcggtgtgggcttctccatcttgtcctcgagctcctcctcctccttttctccggtgagtatgttttgattcttctccagcttcatttgttagcttgctgctcgattcgttgttgttttgctccgctagttgtgctccttttgccgacggagagagagagagagttatagaaggagaggttgacgatttcgtcgtctcgttctcatcgtctccggcgacgcggcggcgatttagcgaggcgacaaggctgctcttcggcgagccgactcggtgtctgctgctgttgtggaggtgtcgcaccgtcgattgcgcaagattattccagtggctttcctttttgttttttttccttttttgttcatttccatctcctatttagcatgctacatgctgttgtggagctgagaagtaatgatctgacccgggaggtcggtacatttccaattgagctgttgaaaagcatctcttaagtcgatttgagacgcaagtctctttttgacccaaacttaaaaagaaataaatcacttagtgatttcaaaatgatttcaaacaaaag

SEQ ID NO: 26496 - DNA, 5788 bp, Oryza sativa
aaaaaaattggcatacaattttgcaggagagaaaagggaaaattcctaattgcaaatgcacagtgaatagttacatgcataattgcataccaatataccattcaactttacaaactttacttttgtctctgaaaatgaaagattaatgtgtaaattacaagtaaattattaaggacaattctataaaagaaaacttggtggaaaagaagtaaacccaaacctttcatggatcaaagaaaaccactgcaattggtatcatgccttataatgctcagcttcgttccaggaagaacacctatatctttgtcgatacctatttgagagctcaataggaaacaccactgctctcccaataactaaatcaaatgtgaacagtgcacacctcagctagccttgaaccatcaccggtgatgttctggctatcagccatgcctacacaggcaaaaatgcagacaaacacagctagcgccgcaagctgaccagtgccaatctccatgaaccaagagatcccaaatggcttcttgactaaatgaactttagagtccggcaagaatattgtgttctctatgactttactctagcagtcattctcgataatcaagttcccatagttgaaaatgggggaacagagttcgcatgcatcaggtgagataatcatttgcttcagattcctagaaatgaccaccacaagttgcttcaagaaagagatcaatggccgaatctccttctcagcaatcaagaaaccccaaattgttggcaagtagccagttcataatcttgctccacaaaaaagtgcagtttttaccagcgcttgcctaccaactacttgatgaaatgctcaaatgacaaaatggcaagcacagctagccttcagggctgcaaacgcaaatagaaaggggaaaagatgccatcaaagtcataaacgtgctaattaatcagattgactgtccaaagaaaaagatcaggaattacctagcgcttgccatctgatcgacgcagatatcgtccagagcggacatggagacgaagaccccagtagtatggagcgtaaatcaggaaggagatggcgatgctagcaagaatcagacacatgagtcctactgttgtatccatctcgcattgcaagcgagggtgagcggctgccgccacggccagggggaacgatgactaaacagagaggtggattggtagagcgacacagccgggacggtgatggagtggttgagtggagcacgactggaacggtgagatggagtggccgagggggtggggggccgggccgccggggtggagcggcggccgggacggtgatggagtgaagcacagtcaacacagcgtggtggagcggaggaccggcgcgtccgagatgatggagaggagcgcatgcaggcgagtggagccaagtgtgatcgagggaaaagagatggcatatgtaacgctccgcttttcgtgagacgttaaaaactaattcggtaaaatcctaattgcgaaaattttcgttctttgtgtgcgagtctaagtcgtgccaagatctcatttcaaatctcgttgttccctctcatcgaaatcaaaatcctccacctcaaattcctcttccgattcaagtctccaaatcaaattccgaaattcagtcgcatcctttgaatcctcgctaaacgctcgctcccaattccgaaaaataccaaactctatcttgagccttccttgattcctccctgaaccctcgagttcgaatatcgaatttgaatccaaatccaaactccaattctctccaaatcagccttctctgtgaaagtctattctacctccctctggctcagtgggccgactcttcttccccggcccatctcctctcagcccgctcccctcctcatgtgcgttgcacgtgccctacctgagagaaagcgcctctctctctcccccgatctctctctctcgttttctctcgctctctctcgcccgcgctccgcgccgccactttgtcgttcaaacccgccaccgccttcgctctttcccgcgcgcgcgcgcgcgtggccgaccggccggtcgctgccgccgtccgccttgccgcgcctgcgccgcgcagccacccagccccgctcgccttttgccgacgtcgccactgtcatcgcctggttccgatgcccccatgccgcatccttccaaaaccaggagacagagctcgtgctcctctctctcgttctcatatcctccttcctcccaaaatagcaagggagcaaagctcgtttctctcctcttttcacctttttccttagccggcgtcacgcccgtgaccgcctctgccgccgcttggccgctagctccgagcacgaccgccagctgccgccttgaccgccccaaggtcggtttgaaccgacctcccgcgcgaaccgacctcgcctccactataaagccgagtccctcctctcaatccctcccgcttcagtctccaccgctgcagtgccatcgccgccttgctgccgccgtcctcgccttcctccgccatcgcgtgtgccgggaagccagcgtgcgcgcggagccaaagaggactctggtcgccctctctccctccccttccccggcccgagaccgaggtgatcccgcctgtgccgtcggacgctcttcccagcgatctcccgacgcggtagctcctgttctccctccccactcttcctcccccctagcttgcgcgattgctagcctatactttcccaaacgcgcgtggacgctaccccgagccccgccgccgcccggcatggcctcgccgccattgccgtccgctcccggaggccgccgctcgtcgccggctctcctcggtgctcctccgtcccatcaggcgccggaaacggattccttgaaccccgaagatgttcccaccaccgtgaatcgatccctctcctctcccggcgagttttcctctttccctcgcaggcggtgacctccgtcgcgattcgtcgtcgtcggcccttccccttctaatccgtcccgtaggctcactcctcctcgatccgcttgtcgctccggtggtattccctcctcccgccgtgcctcgcgccgccccgccgacgcgcgccgctgtccgccgtccatctcggccagccttcgtcttcctcctctcgccatccgacgcggccgccacgtaggcgccacgtcggctagaccaagtcaacccgccagcctcgtccccgctcgcgtgcgctcggtccacggaaagcctaacggctgtgcgtgggcccgccacccttcggtccacccggtgcaccaaaccgcgcgccactcccatccgaaccctagcgcgcgccacatgcaccgctcccacgatgagccgcgccaccgacaagcgggccccactcgggaccccgcaaggtggactcggcccaccggccctctctctccctcactctccccgcgccccttgggccgcctctctgggccggccggcccattagtttggccgagccgcgcctctcctctcgggccacgcccaagccgcccgagggagtctaaatcacatccctccaatttctttccaaaaagggtttaataaattattaaatcctttttcctttgattagtaaatccaataaactttgaaaatccatatattcccaaccgctcatccgattgactccgttccacttccagtaattccgtaaaattgagatctatttaatggcactattaattaggctaaataggatctttcttttgggtcttgtgtaggttttcgattgtttgcgtatagttgcggttaccggattttcgtcaatcgtggttttctcggagattcgtgaagcttcgtgaagaccttgagcaaggcaagtcaccctttgatcaatttctcctataattggaaagtcattattattttgtttgcaacttgcattattagaatcactcacgtttaacttgcttggcctcggtttgcatgccaaaccgacagacctacctagtagtcgcactaattcctgtaggctgtactaccctgactccttatcgctccacctttgtggtaccacggtatccgtgctctctgagcgcgtataccaaatatcccacatacaccgttgtttatcgaaaacttgggaaatgggtttgtaaagccttgaaaacccgacatgtggtgtcggtgtgtttaaaaataaaatgaattgtgaaaactcgcgatgcgggggttgtgcctatgtggcactgtcccgtattcgcatataaggaccgattcctgtgggaaacgcatcgagcataatcaaagtgcaaccacaaggtggaatgggacaccctggctaagtaactagtcggttcagggaaacctcgcatgccaatagttgggaacgccagggcggggtcggttggagccaaaccgggttcctggtaagcaaggaagagaagcttgctgaattaccgatcgaggtggttggagtttgatttgtgaaaactaaaatggcctatatttatgtgaggatttgatccttctatgtggcatgaggtaaccctgggtcggcttgggaaaggctttgtcgcgagcctctgacaccggccagtgtctggagtaagttcgtatcttgtgggtaaagtgtacccctctgcagaggttaactaactgttcgaacagccgtacccacggtcatgggcgggtgtgaggtggttcccgttgcgtagatttgtttgcctgtactttgtgaaaagttgttgtggattgggaatcgtaaccagaatcagcctatgtggcagatggatgacctgagtggtcagaaacgaatctgtgtgattcgggatgtctgcgggcatcatagactaggcttcccgagtggaagcggattgctttgctgctgggcagctggactctgggagtccgagaaaatgaaaaaggctctgggagccgcctaatcaagtgaaatggctctggaagccgataagtaatgatctgactcggggggtcgatacattgccatttgagttgttgaaaagcatctcttaagtcgaatcgagacgcaagtctccttttcgacccaaacttaaaaagaaataaatcacttagtgatttcaaaaatgatttcaaacaaaggatttacaaaacaaccttgcctctcttctaagcttgcattaaacacctaagtccccgtgacttgctgagtatgaaagtactcaccttgctctatataaatatatatatagttcctccgccctgaagagaagatgaagtgaagtgaagaatagggtttcgccctgattcccagctgtcgcctgtggtgttgggtgttagaccgttggttccgctgctgctgttgttgttggtgtttgcctcgtccgtgtcgtcggttgtattctcgggctgtctgagctgcaaccaaggttaaggtaaataagtcctctatttattttaaggattgctatgattcatatttgttaccgtgggtaccagcaccatgtcctgggactggtaccgagaccgcggtttcgtaggaagcggttcgcgccgttttcccctacgacacgctcctgtcaggtgtcgttgtacgacggtaccagattggggtgtgacatttaatttcatatttccttttacatttataatttgttttatttaattttttcagctcttctttccaattctctacaagcgccactggtttgttttcattgttcatctggaagatgaaatgtttgtctttcttgactcattacatgaagaaggttctgaatatcaagatgaagttaagaatagattggtcagtttattttcaaatttttaaatatatgtattactgttcaatttgtgatttggaat

SEQ ID NO: 26497 - DNA, 1532 bp, Oryza sativa
cactgcagcgcgccgccggggacgacgtcgaggtcgacaatgtggacgaggcgcttgccgtggaacgcctcgaggatggcctggttgcacgccaggtaggcgaaccgcgcgaacggcgcgacgttgtacagcgcccggaacgcggcgttgatggccccgcacgacggcggcggcgccatgggcgccacgacgccgacccacgaccccaccagccgcgccgccatggccctggcgaagtaggccacgagccgctcgccgcacgacgccgcgtacggcgaggccatctgcgacagctcgagcagcgccccgttggcgcccgcgaggttgcccaccgacatcgccgccgcgcactccatcagcagcgcgatcatccgcacgccgtgagcctcctcctcatcctccaccgccacctgttcgacgtcggcccccgccatcgccacgcccgtcctctcctccgccgcgccgccttcctcggagtacacctccttgcacgctcctaactccggccgttgctcgaacgtcccggccgccgccgccgccgccggcggctcgacgaactccggcgagtcgtcctcgccggcgcaaccctcattggcttcaagaaatcggtggtgatgggacaacaaaggctgctgcagtggcaggttgctgctactgctgctgtatagatactggtgatgatcaagaaactgcatcaagcctagagaatcttgcatgtctgaacctcttcccgtcataagttgatttatcaaggatcaatcaatcaagtagggtttctgcatagctgaagatgagtggagcaagagaaagcaatgtgcttatatatactccctccgtctcacaaaaaacaaacctaactggatgtgacatctccagattcattgtactagctagaatacatcacattcagtactaggtttgtattttgtgggacgaaaggagtactttttgtggcaaccagcagaggctgcttgcttgtttattatcaaccgcaatcaaattttaaattttaaaacttaattttagaatattagctgtagctcaaataaaatgtttccattaccttaaaataactatagtgtgtgcaaactccgtagtatccaatacgtaacttaaaatattgaatagggaggatatctagtcctctgtcttttccgaattttttcataactatttatgtactttacaattggaaagagattagagcgccctagttatcatttgagtagtattactaggtcaacctggaagctagtggcagtgtgagagcaatctacacggcaggaatctgcgaaacatcaatctgatgattctttggctgtattcagattggccagtgtaagcttggccggtacaatgagccagcagagctgcatggttttggtaagagtctttggtaattggttaattagctcatagtttcactgaatatttaagcagctaatgatcatcctgatcacatgtgtacatcaatccggtattttccagaaaattcagaggtaaatttattggagcaaagcaattctgcatct

SEQ ID NO: 26498 - DNA, 1307 bp, Oryza sativa
  unsure (1)..(1307): unsure at all n locations
ttgacctggtattgttacaaggccatgcgaacatatttatatatgtatatatcctgctaattaattcagnctacaagccaattttttggggggcccccgggtttaaaaagaaaaattttggttaaaacccccccccgggtttggcncccctttaaaaattttttttaaaaaactttttcccaaangcggatttaaatttataaattggggccccccaatttttcccccaaaatttgcccgggaaaatttccgggataattgnnaccaaattgttaattttaaactacgtatatatactgaagctgatgatgcctaccgcttgcctttgtctgcacttacatggacgcatccaggagatattgcagagacaaacctggcaaacagacgacgatcaggaccaaaatccaagtgattagtgactgattttgcatttcttttagataatactccctccattttaggttataagatgttttgagtcaaagtcaaattgattcaagtttgactaagtttatagaaataaaatagtaatattttcgacccaagataaatttattataaaaatatatttaattattaatttaataaaactaatttggtaatgtaaatttactatatttgtctataaacttagttaaatttaaagcagtttaactttgactaaaggcaaaatatattataacctgaaacagagagattataaatgtattacatcttggcctattccataatacacggtcaatgagtctttaaaagaacaaagaaaaagagtgtgggacatatctactcttaagtaacagattttgtacgcacgagtggttttcaaataatcaattgattgattacagtttagttaatcatcaaacaagcaagctagtaagcatttggcttccagacagcgttgcatctccttttacccaagtcctaatctgtcttgacgcattgacttcggttggcgctggacatggccttgaccatccccttgcagatcttccggaaccagaggaggttcatcgccgacatcgccggcggcaccgccatcatactgtagaaccctagcgggaacaccgtcctcacctgcaaattaatcgaacagccaggaactaatttaacaacagactgtcacaaagctgaaccctgaagagaagacgattggttgattatgattacctggtcgaagtgaaggtacacatgagcgaagaagtatacgaacagtatgacgcgagcaacctgcatacaagaacaagaagatcagtatcacttggagtataagtgaattgttagttttttttcatcattttaatatt

SEQ ID NO: 26499 - DNA, 6218 bp, Oryza sativa
ctcatctaagtttaaataaaccgagagcttgacatgccagattatgaaaatgcgaagaatactagaaatcagttatgatactatgtagcagcaactagaatcctgcttagatcgtcagaagagatgcagtagcttaccccagccccatcttggacagtcaacaagcaactgaagcagacaacattcagttgcttgttgacaattcactgtcattcttaaatccatttgatgcagagaatacttaattcttactgctaattaagcacattatgcactaatgcaatccaaatcatggctcatgggtcttgtgatctcgtaggcttatcaaactaactgttccagatgcttaacagtccgattctaaccgagttaacactagtaatcaagcgaccaaccatgaaccatctcatgaacaattgaccaactattagacaaaatggtgctacaagttcagaaaaatgaatatgcagagaaacatcctctccgtgaatttaacaaatttaccactcattctgccctgtttgcagagcagaatatcctctaatcaatccttagtttgtacaaattgtcctctaatcagtactagtgaacatattaacaaaagcctgttatctctaaatgattttggcgaccaagaagccctctgctactaaattgtactcaacattctacatcatgcacacaatctaggaataaatcgtggcacagaaagtaaattcagcaccatcagtagtagcaatctatagaagaacaaatgacattcagacgatcatacaacatcgcatgatgaaagaaaacataaacgacctgcatctttcacatctagctgaaagcctgaaactgatctgtgaacagttaacaaactgaaatttggcttcggagaagaaattcagctacattgcaaatccatttcatgcaaagaattcttctatcaagaaaattaagcacggataattgggcacattttctcattgcattattattaactgcataaacaatgatgcatagactcaatccaagtactgaaagccaaaacgttgctgcattcatacaaatcatcagaccagagtccagagatcacatcacatgcattgcgttcatgcaagtctgactcagcaaggagaattatactgattgatcgagaattatcataccggatcaggaagactacatcatccacccaaacaagaggagaaggacatctcgaacaaatcaatagcgaatcatacctgtaccaggacgatcaaaactaacatgagcaatctcaggggagaagccacgccggcggtgagtagtccgacgggccttgctccggcaagaacttgtccacacgcggaacccccgccgcatccgccgccggtagccacttgccggtgtctctgcaggggtatttccccgcgacggcgcgagaagcgaacactgtcgactcgcggtagagcctcccgtcatccaggaagtagacgccctcgccgaactcgtcgcccggatagtcacccgcgtcgtacgatctggagcagcctcgcgcgacgaacagcatccgctcacccagcgactccagctccttccagccgtgcagggccttgttccgcttcctcggcggcggctgcaccatctcgaacaccttgaacgccgatgtcgtcggcggcgcggcaagaggagcaggaacgcgcctgaccaccatgaggagattgccgcgggactccaccaggtagcgagcaacgacgtctccgccataatcgcgccggccacgccagaagcgaagaatcaccctgggcgccatcttcatgttgccgtcgccgtcttcatggaaatcccgtgctgtgaaaacatggaggtcttcttctgcggtgaggaaaaggaaggctcccttgtggtgtatgacatcctccagagctggctcgtcgatggcactagggccatgccccatcgccgcaacctgatcctgggaagcatttgctgactgaacgcgccagaatgcgtgagtgcgtcgagcagcctggaagggccagtaggtgatgatggcggcggcgacacaatcctcgtcctccggtggcgaagagagcgtcgcggcgagcatgatcacaccagtgttagggacagggccgtctggccgccccaattcagcagccgtcttgtccgggcggacaaaaaaggggaggttgaagcgcagctgatggtcgcggaggctgaggagcgtgttgcggcaggtctcgccgaggaagatccagccgccgtcgtaggcgccgaagcagcgcgcggcgcgcgcgccgtccgggacgccgaggccgtgcccgccgcagccgcggagggcgcacgagaaggaagggccgtcggcgcgcgggacgaggatccacgggagcgggcggagatgcggcgcgttctgcagcggcttgacggcggcgcgccagtcgtggcagacgcgggccatggtgcggcggtcgacgaggcacgtgaggcggttgtggacgaggcggagggcttccgccatgaagtcgcgcgcgggcgccgccgcgtccatgggagaggcggaggcggaggcgggggcgggggcgaggcgtgaaggtggcggtggcgagggttgggcggcggcggaggaggtggaacgcgacgaggacgcttcgtcgttgtgcgccatgtttgaacttggcttctggaagcaggggaagagaggggaacagagtggattggtttggaagaagaagcagagaaggccagccttttgccagccgagcaagtggttgggcccaatttatagtgccggttttcttgggcctgaagtttggatcgctgctctttgctgagcgtttcttcttgggcctaaatgttttttttttttgagaacgtaaagttcggatgtacatatggtgcagaatcgtgtctagcagacaggagaaacaaatgggagcagggaaggttaacccttttttttttttttgagaaaaggcattcaagcaggttaacagttcagatggacagatggttattatcctacaggaaaaaaaaagagaaaaaaaagatagaaaaagttattggtccaatgaggtcatcatctttagtaacataggcacacatgttttctgtaggcgatatggttaatcttttcattagtgctgaactgaaggatgctcagttcacagctcgtcctttacagagagaaggggatgaggaaatgttgatacatacacaggatgcttatctctgaattccttgttcactttttctgaacttgtgcatcagtctgatggtacaacaaaaacactagattagacgctcgccaagccgtgcttttgccgaaaatatacagacatggcacccatccgacctcaaaacaaaaatatgcatggcagagctggcatcacaaacgaactcccagtttgaattttaaattcccggaaggtcacttatgaaaaagaaaaagtaaagccttcataaattttagcccatttatccgcctcaagatttggggcccaagaaagctggccctataaatgaggcccagtcccccatcccccttccaaaccaagcacatctcctccttcttccagaagcagaggaatccatcggttccattcctcctcctcgcctcgccaccggcaagccgcgcctccgcctctccaatggactcgccatggcgcgacctcgacgccgacgtgctcggattcatcctcaagcgtctcccgtgcctcgtcgaccggcgccgcatggcccgagtctgccgcaactggcgcgtcgccgtcaagcctgagcagccgcggccggggacgaggccgctcccatcgatcctcgtcccgcgcgccgacgggccttccttcgcgtgcgccctcgccggttgcgccacccacgccttccgccccccgctcccggccgacgcacgcaccgcgcgctacttcggcgcctacgacggtggctgggtcttcgtcgccttcggccaaatcctggactacgcgctactcagcctccgcaacggcacgcgattccacttccccgacacgggcacggacatggtggccgcgaccctctcttcgccaccggatgtacgatccacgcgttcatgtacgatccacgcgtgatgtacgatccacgcgttcatgtgttctggcgcatggagcatcaagttgtggagaaggcgactgctgttgagttcgtcaccacgtcagttctggaggatgtcatacaccacaagggaagcttccatttcctcaccagggaagaaaacctccatgtttttcctgtagcgggcttccacgaagacgacgacggcaatctggagataccgcccatggtggttcgccgcttctcgcgtggtgggcgagattacggcggagccatcgctgttcgttacctggtggagtccggcgagaatctcctcatggtcgtcaggctcgttcctcatcctccccaactgccgccggggacatgggcgttcaaggtgttcgagatggtgcatgagacgcccatcaacaacgacggggcaccatacgcttggaaggagctggaatcgctgggtgggcggatgttgttcgtcgcgcgaggctgctccagatcgtacgacgcggacaagtatccgggcgccgagttcaacgagggcgtctacttcctggatgacgggagactctacgatgaggcgttccaaatcttgaatccctttgcccagttcccctgcagcgacaacggcaagtggctgccgccggcggcggcggcggcggcggaggcggttaccggccgcgtggacaagctcttgccggagcaaggcccgtcgtactacacgccgccggtttggattctgccgtgagactgccatgttcttagttagattgtctgatgacttgttgtcgtgttgatatggtttgttgatttgtgcaatcgatgatgtgttctcgagatccatgtgtgcttgcaattgcttgatccatcatagcatctcttcagtactctgctattttcaccatgttagactaatgcagaaattgttggttctcatgactcagattgcattaattagtgaatcattatattgcaacgaacaatgattcagtgtgggggatcctgttcatgccaatttttcaggctaatcctcctcttccctcgccgaaagtcgcttaatcagcatccacagtgacagttatgctgaatcagcttgattcatgtcgaatttcccatgggtcaataacttgagactcgtattattttaattttctggagtctgtgagttcttatcactttttgtttattgagttccagactgaacagtaaagaatctgcaagtgatacatcgaagtcgtagtgaactgccaaaattttctcgtggttattgctggtgattaaccaaccaaccatctaaattttaccaacattttcttaccatcattcacaagatcctgagtgcaaattcagaaaaatgaacgggcaatgcagagataattatcctcctctccgcgtgtcaactttttctctcatttgatccactcttctgtagagcagggagggcagaagaacatcataatctgatcagtagttcagtactagtgaacagaataccatgacgcctaacatcaggctgtgttactgaagtaatgcctaaatgctgataactttgggtgaataaccatctgttaactgtttaaccattcttcacaacgttctaccttatgcaccgtcccgtactgccgaagcgccgccgccgtccgagaagggagaggcggtgtagcgaaaagaggggggggggggggaagggacgcggacgacgacgacgacatggagatggcgcggagctggaggggattgcctgcacgccgccgccgccgatccggtggggaagagaaaagtgagagaagggagagagagagagagggggaggaataaaggatgatatgtgggccccacatgtcagtaggtctcacatatatttttttaaaattttaatgctatataagcgtcacgtggcatgaagaccagatcaacacccccacgacaacaaaaccacccttcaaaattgctagagaattcaaattacactggtttcaatagttcggtcttacccgatattttagttaagggtcacgaattagatttgatgaacagttaaggaagttaaagtggatttttttccgaaggtaaaatgtctttctacatttgagcccattaatcttcctcacggggaagatgcacttgggggcttggggcccaagaaagctagccctataaatgaggcccagtct

SEQ ID NO: 26500 - DNA, 843 bp, Oryza sativa
gctgttgttttcgtaattgattttatttgaactcttttctaaaaacatctaggtgagtgcttctcaaacgacacggttgagacagtgcgtcccgtccggtcagagtatgtgcaatgtatcaatctttagatcttagaacaaggttggcacccggccaacagtttttcaaacggccacccgggccaacaacttttcaagtggccacccgggcctagctgatcccgtcagctgctgattttccaaacatcgaaccctttttcacaacagtaatttcacaagcagttgtcaaacaaaactacgctaggaatcacctcacatccgcccatgaccgtgggcacggctgttcgaacagtttgttaacctctgcagagggggtacactttacccacacgatattactaacccggatcacccagcccgtggggatcagccacgtcgggagacctccaagctttcatgacaaggcatttccaaagccgacacaggcttaccatatgccgacgagaggggtcccagaccaacaacaggttaggtcctagaccatactgtgccaggaagcccaggggtcctctctgacaccaccccggcgaatccacatgtctctcggcatcatggctcccctgataagctagttactcagccaggggtgtcccattccacccatgtggtcgcacttgtcctatgttcggatgtaattccaaagaatcggtccttaagtgcgggagcgggaaaaccgtacacccgtattgttcccgggtccgcggtttagaaattcatttagtccccagcaccgaccccagtgtcgggttttcaagtctttttgtaaacccaagtttacccaag

SEQ ID NO: 26501 - DNA, 9147 bp, Oryza sativa
  unsure (1)..(9147): unsure at all n locations
aaggatctacgtccgatgcaaccgaaaaatgctctggtcgagtcacaccagatcaccaatgattaataattagactatagtgttagccaaaaattagctagattaactatattattagcttagccgatggcatcgctgagcatttctttttcttcttcttctttagagaatcatgtgcaaaagcatgcgtcgcactatgtaattatcgccgtgttaatttgtcctatatagnnnnnnnnnnnnnnnnnnnnnnnnnnnnnntgactaattcaagatgatctttttgatggttcatgcagtgctcgtaatgtgatctgatcatcatcaggttaaaaatatcagcctctttgcattattttataatcacgctgaatgtacgacaggatgatgtttaattgcgttttattagatttgtggatgtgtggttttcaacggccaatgtacatatcgggttagttgccattacaaaacaatgtacttaataaagtaagtttgaaatcctgtaattatgcccaagctggaattgttgttttcagcattcaatcgacagggtggatgatgcaatgttgaagaagatcttttctgtgcgtgcgtcttaaatgtggttaactgtgaggcccagctgccctctttgtccacactttcaaatttaaaaaattgtaggaattttttagcacgaaaaagacaatacattgttttaataaaagagagaaaaactcggtcgacacacctaaaataattacattgtattaaaaatataacaagagacatgagtatactctatgtcacgccccgagctagtcccgactggaattagcccgtgacgctccaaattaacctgttaatcgataccagtcccaggaaacagtgctggtatcacaggaggatagaatatcacagcaacagaggtctctttattatagagtaggagtacagtcatgttgggctgtggacagatcccgagctcacaactgcattacaaaagggaaacggaagccgggacttggaccaaacaacacaggcgcgacttgggaactaggccgaaaccctaaaagtcatcgtaaccggcttgctcctggaagaactcctcatcaacagggtacgcttcatcttcatcagcaactggggggtatttatatagagcaaggaggagtacgggagtactcagcaagccaggggaaataagtgtttaatgcaggcttcaagggaaggctgttgttttcgtaattgattttatttgaactcttttctaaaaacatctaggtgagtgcttctcaaacgacacggttgagacagtgcgtcccgtccggtcagagtatgtgcaatgtatcaatctttagatcttagaacaaggttggcacccggccaacagtttttcaaacggccacccgggccaacaacttttcaagtggccacccgggcctagctgatcccgtcagctgctgattttccaaacatcgatccccttttcacaacagcaatttcacaaggcagtagtcaaacaaaactacgctaggaatcacctcacatccgcccatgaccgtgggcacggctgttcaaacagtttattaacctctgcagagggggtacactttacccacacgacattactaacccggatcacccagcccgtggggatcagccacgtcgggagacctccaagctttcatgacaaggcatttcgaaagccgacacaggtttaccatatgccgacgagaggggtcccagaccaacaacacgttaggtcccagaccatactgtgccaggaagcccaggggtcctccccgacaccaccctagcgaatccacatgtctctcggcatcaaggctcccctgataagctagttactcagccaggggtgtcccattccatccatgtggtcgtacttgacttatgatcggatgaaattccaaggaaacggtccttaagtgcaagagcgggaaaccgtacccccggtacgttccccggtccgcggttttagaaattcatttagttcgcaagcaccgacccaggtgtcgggttttccaagtcttttgtaaaacccaagttttacccaagttgtttctcagattttaagtttgaaggcgaccgtcgatactcgcacagagtgcacgaatatcgaggcgcaactgggtggttacaaggggacatggtataacaattaacaaaggaaggatcaaatgcaacaaattaggcaggtccgccaatctgccttgcagacggaacaacagattaagtgtgatcctatcaatgcataatattttgcaagcaatataattaaatttcaagtataggctcaagatgttcaaaggtggcttgccttgctcgagatccagagcttgatcctcgaaatcctcgcactgcgggtcttcgggctccgaaactacacgcgaaacgggacaactcaacaaacggcgaaaataaagccctattaatgacctctaagcgtgccattagatagatctcgagatttggggaattttggaagttgaacggagtcaaacggatttacggtggggaagatattgaatttctaagattattggatttttggtctaaaggaaaaggatttaattaaatcctttttggaaaagaaaagaaaagaaaaagggagagggagggaatatagacttccctcgggcggttagggcgcggcccgagagaaagggcggctcggctgagcttaacgggccggccggcccaagaaggtggcccaaggcggcccaagacgcgcgcgcgcggtggaaggagagagagagtccggtggaccgggctcaccacgcgcggtcccgggtgggacccgcttgtcagctgctcggctcaccgtgcggagggagcacgcggcgcggcgctagggtggaggatggacgtggtgcacgcacgcggttcgcggtggacgcaggtgcggcgggcccacgcgcagcctcacggctcgcggtggaacgcgcgcacggggagggactgaccggggtcggctcgacccggtttaggctgagctggcgccgatgtggcgcctacgtggctgccacgcgggccggcgagaggtagacgacgacccggccgcgaatggacagcgggcggcggcggcgagcggcggagcgaaccacggcgatacgggcaaaagctagcacaccgggcggttgttcgtgatgaggggagacgaaccaacggctcggatttgccgggggttgctcgacggcggcggattgcggcggcggcaaccggcggcgggagaagggggaaacggcgacgaggtcactaggggctaattcccggcggcgagagcatctacgcggttacgggaatccgatgctagcgtcggattgggcggaactacgccgagcgaggccggcgacgagcggcgcttccgagctcgggcggcgacggcggcgagcacacggcgagcgacggcaacggtcggggcggcgccggctaacttcggggaggctactcgagctactaccgaaagctaaggaggggagatggagcgaggaggaagaacggagggaggcactaccgtgcgggacgggcgcggtgacgagaggccgacggcgcgggagtgatctctccggcctcgggccgaggaagaggaagaagagggcgcgcccggagtccccttccgcgtccacgaacgcaccggctctcccggcgcttggcgatggacggcggaggcgagacagagcacgggagcggcggcaatggcacggaggcgaatggaagaggaagggaaaggggaggctggggtttaaatgggcggcaatgtcggtttgggaaccgacttgcgcggtcaagggcgcgagctggcgctcggcggtcgcggccaaggcggcaacagggaggatgacgccggcgaggaggaaaaaggggaaaaggagggggagaaagggggcttgcccctttgccgattcgggaaaaaggaggaggtgagcgggggcgacgcggcagagggaggagggatgctgcctccgtcccttggcggcttgcgcgcggagtggcggggccgggcgatgacgacggcgatgacggcggggcggtttggagcggagcggcgacactggcgacaggcgcgtgcagaggctgacggcggcggcaaccgggcggtcggccaccacggcacgcgcgcgcggcttgcaatgggaggcgcggcggatggagtggcacggctcgggcacgcgcgctggctcgcggggtcaagcggctacgcggctgcaggcggcagggcagcgggaccgggcggcgctgacgcgacgcgacacgggcggcaaccacgcgggcgtgcgcgcgaacgagcgtggggagcggcagcgagggagccgagaggtaagactcggctcggcgcgggcggcgcggctcacgcgcttgcgcgcgcggcgcgcgggcgaggcggagcggagctgagcggggggagaagcggagcgcgccggggaggggagagggcgaaagagagagagagagcgagggcgcccgggatagagggggggccgggggagagatgggccgagcgggattcggcccatcgaccccgggggaggcaaaatggacttttgcggaggaatgatttggaaggatttggattcggaattgaactcgacgatagatcggggattgagatcttgagatggcacggacactagacaacaagcgaagaaacaaatttcgcaattagggtttttaggagataattttcccgctaggcgccacgacggaacgggcgctacactctagtaggagaaaaaaaacataaacatgaaagaaaaaacataaaaaaagagaaaaataaaaatattttaaattcctagaagaaattaaaccagaatttgttgtcgcggattcgtaccattggacgactagaccattggtcatttagcttcacccgataaaatacgaattaccagctgccatattcttttaagtctaagcctcaactaatgtaatttacgtagctttgcctttaattttctgctttttgaagttttaaagtacagtgctaatggatatttagattcatgtgtagggctgcagccctagctatcctatttttgtctctgcccctctgctagctatgacagttgcatttctgatcgatataaactcgtatcatatcgttgtactacaagtttgatatagttgaaatttatgaataattgatgggttattatatgaccgtatgaagtaacttttacaaaactaaaaagatattattcaaaaaaatttccagataattttatacagaaaatatataaacgaagaattaactttttacaaggttggcaagcttgaaatgaaaatctaaaataataataataaaaagagctgcacctaaataacagaaaaaaatcaacgcaacttgactacccgttcttggtcagctaacgatataaatctcggactgtgattgggtgtacgagtcgattgatgggatcatttccttggcttccactgataataataataataatctcccctaataaaaaccatgtttagccatcgtaatctccagccgaccacgccgcgtgctgacgccgccgccgccgcccccacgcgcgtggtctacctcatcgtcgccacccgaatatccccctcgcgccacgcgtcgacgccgcgccgcccctccggtttctatccgattccgcgagagaatttttgacttttcgccggttcgagactctcttgggttcatgtgcaccacaggattttggggtgtagcagatccggcgccgtagtcaatttaagattttcaaacttcatttttggatttttttttccgttcatttctatatttgatttaattttttaattacacgaaacgcgtgcacacacaccaacgccacactcacactcccacgaatatgtccccttaacacatgctctaataaatggaaaccaacgttacatccctgatctaactgcaatcctgttgaaaactcacttgaatatgcgtaatattcgtgtgcatcaagatttaaactctgatagatgaaataacatcattagaggtttcccggtattcgattttagtttagagccaataaaagtagaaatgtaaacttttatatcatgccttcgactaacgaaaatatgaaccgcaacaaataggctcgaacaaacaagtccattgactttgactacttatccttttcattgatttctatcataaataaatatttaatgttcagaataagatttagttaaacttataatattttgagaatcaaatctggtcctaaacatcaatattttttttaccttaaggagcattttaaggactatgatttttcattttgtaatgcaaaaatagggactaaagttttgaaaagaaaatagtagaatttaaacagggttttactgactttgaaacccttttttgctaagttaaaaaaatcaatatttttcttttgctagaggcacattctaacataaccgcgaataaacctgaatttttttaaaaaatcgtttcaaaattggcaaaagcctggatctaatatgcttgtcagttaagcttccatctagctagagtcctttgtccaaagcttcaaagtactaatcttattaaaaatctcacttaggactaatcttcctttgcacaaaggtgaaaggtcattattagttgatggcgtcccatgtcccatacacacgtgacagccatcagccacataacccttccaacccaacctaattatcccaggggcattcctgtccatctcccgtgtatatatactcaccaccacccttctcgaaccctgacctaatcaccacctcgctctttgcatttcttgatttctcctcgatcacctagtagttgatcgagcaatggcggccaaggtgcaccccaacctggccgtgccgtcgctgatccagccgccgatggcgccaccggcggcgatggcggcgggggacagcgtgatgaagacgaaggcggcggcggcgggcggggatgtggtgctgacggtgtggaggaagtcgctactgttcaactgcagggggttcacggtgttcgacgcgagcggcgacctggtgtaccgggtggacagctacgcggcggactcgcgcgcggaggtggtgctcatggacgccgcgggcgtgcccgtgctcaccgtccgccgcaagaaggcgatcggcagccagctcgggcttgggggcgaccagtggctggtccaccccggggaggagacccgcctcccgccgctctacgccgtgaagcggacgccgcagtacgtccgcggcggcggcagcgtcaagaccatggcgcacgtcgcgccctgcggcgtcgccctcggcgccggcggcggcggtggctacgagatcgaaggctcgtacctgcggcggagctgcgcggtgtacgacgcgcggcggcgcgcggtggtggcggaggtgcaggcgaaggaggcggtggggacggacgtgttccggctggtggtgcggccggggatggaggtgtcggtggccatggccgtcgtgctggcgctggagcagatgttcggcaagccctccctgctcaggagctggtcctcctaataattagcctgtttctttctttctctttttttttcttttttttttggccttgaatttccaacattgtttgggcctgagagcagaagagttgctcttggctgcctctttctctctgatcctgaaatgaaacctcaaattgggtgtcactgtacactgaaaagaaaatccctcttggtgagtatggttttgggtcttttttttagcagaaaaccagagggatgaaagtgtaaatatttctaagaagaagaagaagaaaagggggttaattaaagcaggaaattcttccctgtctatctttctcctccatttcttgttataagctaccagccttccactgttgcgaggcaaaattcccccccccccccaattaatactagaattaactaacaatatattgtacaaattcatccaagatccacatgcccaaaacatggaaaccattttaatcgctactactatgtactccctccgtctaaaaaaaaactcaacctaagaggagttcggggttccttctagtacaataaatctggactatttttatccagatttattgtcttaggagggagatttctcttaggttgaagttttttttggacggaaggagtacatttctgcatcttcttcacacagcgtctgaaaccacaaactgcatgtctgaattgtgaacatcaaaactgtctgttctccaccttgcagagactgtacatgccaactctgaaccagagagactagacctactactgtctctgaactctggaagagaaaaaaaaaaaaagggcgtttggtgccttgttcctttccagaatactacggaccgacgtcgccgcctcgccggccaagcactcactcgcaccagctcagctgcatatgagctaaggatgatatctgcaagcaggctgatcatcatgaggctggctcctcctcctctcccctcgccgaaagtttcgctcaaccaccatccatgacgacggacatggtcagcatcatcttctcggcttagtcattagcatcaccctacaaggattaatcgcgcacgaaaaacgagacaagtcattagcacataattaattgaatcgtaattattaaaagtttgaaaaatggatttatttgttttttatagcaacttatatatagaaaattttcgtacgaagcacactactttttaacagtttgagaagcgtgctaacgagtaccgaagaaaaaaaaatctttatcttgttagagtttagaaggagaccagcttttggactgaacggtttgcatcttgctcttgcgagcacgcagcaaccacgggcgcgttagtgcgttacgttggtacgctgcgtacgcacgtacgctaggagcaaacacggcgccggtattgccacagtgggggcagtggtgggctggtggccacttgttgctgctcgcggtcacggatcgcggcgaggctgggtctgttcgtggatatttagattttgagaagtggcgtgtgggaatttaaattgtgagaatatacaaaaaaaatcagttccatggactctgtaactatatcttctctgaacgaaaaaccgatttgtttaggagaaacttttgattctggagaagatgtaactgtctgaagctatcctaaacaaaccgatatctattttg

SEQ ID NO: 26502 - DNA, 16725 bp, Oryza sativa
tgaacggagtcaaacggatttacggttgggaagatattgaatttctaagattattggatttttggtctaaaggaaaaaggatttaattaaacccttttggaaagaaaaggaagagggaggggaagtagacttccctcgggcggctagggcgcggcccgagagaaaaggggcggctcggccgagctaaatgggccggccggcccaagaggacacggcccaatagggcgcggggaggggagagagagggcgccggtggaccgagtccatctcgcgtggtccggggtgggacccgcttgtcagcggctcggctcaccgtgcggagggagcacgcggcgcggcgctagggtgtggagcggggcacggtgcatgcgcgtggttcgcggtggacgcggatgcggcgggcccacgcgcagcctcacggctcgcggtggaccgcgcccgcgagcggggccggagggagcggctgaccggggtcggctcgacccggtcttggccgagctggcgccgacgtggcgcctacgtggctgccacgcgggccggcgggaggaaaaaggggaaaaggagggagagaaagggggcttgccccttgcctctttgggaaaaggaggaggggagcgggggcgacgcggcagagggaggaggagctctgcctccgtcccctggaggctagcgcgtggagtggcgggggccgggcgatgacgacggcgatgacggcgggggcggtgtggagcgaagcggcgacacgggtgacaggcgcgggcaggcgcggcaggcgctgacggcggcagcgacccggcggtcggccaccacggcacgcgcgcgcgggaagcaacgggcggcgcggcgatttgagcggcgcggctcgggcacgcgtgctgactcacggcgcagacggcgcaggcgcggcacgggcggcgaccacgtgggcgcgcgcacgcggacaacggcgtgcgggaagcggcagcgagggagcggagagggagggctcggctcggcgcggctcacgcgcacgcgcgcgtggcgcgcgggcagagcggagaagagggagagcgagagcgagagagagagagagagagagatagccggggagggaggggaagatgggccgagagagattcggcccatcgaacccgagagaggcaaaatagacttttgcggagggactttcgggaaggatttggattcgggattgaactcgacgattgatcggggatttgagatctgagatggcacggacactagacaacaagcaaagaaacagatttcgcaattagggtttttaagagatagttttcccgctaggcgccacgacggaacgggcgctacactgctggtcgccatcagcctggccactgacagcgaccaccttggttgtcgcgcagcctgcatcgcccgtgccatcctgatcgcgaggagtcaaggagcttggggagcgcgtgcgacgggatctgtagcggcaggagcatcgggagctgtgcctggtctgtgagcggccttggcggccatcgccgtgcgctcgctggcggccggaaggatgcggcgtgcggctccggtgtcgcaccccttccgccgcccgcgactcaaccgaccggccccttccaatgatgacatcgcgcagcgagcggcggcgtggtggaatatcctcagcgtggcgccgccgcccgtcatcatcctcatcatcctccgggtcttctcttctctgtggcggtgccctgcatccccgcctcgctgccgcccgtcgccgaggaggctgggttccgtcggcgcagcccaggtaccactggaaggtgcgcaccgtgggtatcgggcctcccgaatcagacaagtccgaggagggcagtccgctcaccccgaaagaaggcgagcggggcggtcctggagtccagtcctccatctcgtccagatggactatgacatgcggcagcctccccctcggcggcagcgcgatctcgtccggaagcggcggtgtgatgccggaggtgacacgcccagctcccggcgggaagaaggtggagagcactgttcatggcaggagatcaggattccgcatccacatccagcatgagaagatggccgtgttctgccactgaaccgacttatgctcgatgcgatcgaagaggcagatgggacccatgacgccctccaatcccgccctattccatgcgtactgcggcaatccctccaggcagagccgcacacgaaaccaccagttcgggtggtgcacatgcctgtcggcgctccatggcgtgatggtgaaccttcctccatccagagtgatgaagcctctccgcgctgccgcggcctgcccctctgggaaatcgaagaagacgaagaaatcttccgggtgatggcgcgtgactcgcaggtccgagatggggatcccaacctgctgggtcagtgcacgcgccacctccctgggggacgtctcctgtccctcgacctcagccgagatgagtgcgccatgatagtgaaggcgctccagctcgtgctgcatgagctccgtcatcggcaccgttgcatagccgactgccggccgttgattcggcagaccaggtatgtgatccatggtcaccgctggtttgtgcaaacgatggaaaaccgaaccagggcgggttgttgttggttgctgttggttcttgctgggaagtggtgggaagatgagtcgggattgaatggagggggcttgcttggggaaggtgaggcgggagtgaatgggttgctttgatttgtttgggcagcggaaggagatgtgtccactgcgtctacaagtatagcagcggatgggatccctgcaagctgctgcctggtgatctgaagcgaagcagcggaagcacttgccgtgcaagatctccttgaacttttctctgagatttagtggattgaaggaggtagctgggcgattgaagacgacctgagaggttgatgaagaaggattttggcgcttccgccaccaaaactttggttttaccgcttgccattttgatgaaagatcttgttcttctgcctcgatttgagacttgcttgtagctcttgccggggctactattatcgactttaatgttgctttttctctggccttcttctctgcatcttcctcttgtgccttttccggagggggcgtaatggcgctctgtccctctcctctctctgcagtaatgtcgagctcctcttcctggcttcgggcattgatttcctgatggaaagccttggacgccggagatggagaagctgctttgcgtgctttggcggtttgcggattgaatgtctccgctgaacgttggtgtagctccggagcaatgacgtcgtcctcatcctcctcggcatccgttccccagtcaagggcttggatagcagtggcgaggcctgacttgcttggggcgaaggcgtgactggggaggtgagcgcggttgtgcggtggccgccctggtcggagtgaccagaggcgcagggctgtgggcgccggtaacggttgccccgccgacgctcaggttgacgagctccccaggctctcgctctctcgtcatttctctcccctacgactattcgctattaagggttgccccaatttccttctcttcacttctcttgggtctccttctgtgagtgatcgaaaaagacgcaaacaattaaatatttatttgtatagtttcagtgaaatcaataggctaattttcgaaaatacgtatgaagggacatgtttatcggatatttgaaacactctcataattaacattatattgattgatatctggggagaagacgtgttctatatatcagcggtcgcaaaatttcaacaacaaaatgaattcaattaatgaaatcttaattatacaaaaggcagaaaggtaaagctactcattaatatcagtttccgcatagttgttttctcataaatttactttatactttaaaatataagtttttttagaggtcagctaaaatgatatggcttttggaataaagacaaacatacatgaaaaccctggtccacacagcacgacatgctggggaggccaacttacaatatgccttatgcaattttaaaatactactacctctgttttacattatactcactgcatgcatgtttggcgaatctaaacaacagatacatctattatgtgttttatagtctaatttatatgaatattagtgaatctaaacaagggatagagaggctaataaaatgcacacagttataatgaagataaacgaaaactatataatatgtcatagacaaaatataattcttaaatacttttaaaaaacaaatatagtattaaaatatattcaatgatgggtttaataagctagttcggtgttatagatattactatatttttcaaattttaattttaaaaaaattcaaaacatcttatatataaaattgagggagtcgtaagtagtgcgtttgctaataaaagtatatatacacacggaaataaattgaagtattaattcttagaggctggacctggacgtcgtctctcattgtcaccgccagttgaactctcaccgtgtcgtcggggttggtgattctgtaagtcatctccttaatgattccggggtttttggacagcatacttgcgaagccatgcatcatcccagagttgtatttgtcttggttttctgcataaacatcttatattatactcctaaaatatttagaaacggaaggagtatatagggacgcgatgaattatcaacacgtaatggcaatggtaactaatttgattagccgttgttgcatgcaggctgcagctagcggctagctttaatcgatatcgatcaatcgcgtgatgccgtgatcgcgtatgataattaattacagagatgaacttaccgatgatctgctccagcttggcggtcagtctcatcatctccgtttcatgcagggacgaggagctagccccaggcccagctgcagagaggacggaggacaagtagacgacgcccgagagaagcaccgccgcgtggacgcacaccgccaatgcgaccggacgcgcctgtatccccaccgtcgtccgggccgcatgaccagggctcccgcggcaaccgccgcggcgacggcgacggcgacggcgcaacgcggaggccggcgtgcgtaaggtttaagggggccgcgacgcgagactgattggaacttactatatatcgatcggtacccttttcgatcgtatattgtgtttgttggtgcgatatgttcccggatgggatgcgtttcgtgcgttcgtacgtagtcttggctcttgacactcttagagtttctgaccggccaaccgccgtgtccatatatgtaggggtacaggtattttccgactgcacgtccgacgagaggtttatgggaaaaatatgcgacagaaattaaaatgggatggctgatactgtccaatttcaaatctgagtctataaagaaatatgagttaggatatgagaagagttgcatccacccgtatatcccatgttatgaaatatatatgaaaatcccaaaatctttgctgtcttgatgatactatttctgatcgatttcatggatacacaagttactcggtcgtagcaagtaattagtcactgaatttgtttttgtccgttctatgattcattcatatacatgatgcagaatgttgagtacgtcagtaagcactaacacatagggatgggttaacgtttgagatgggttattgttccactgtgatcatctcactactactgaacagagaatgtcctgctctgcttcgacacaaggagaaaagctgatacacatagaggaaaggatgctttctctgaatttcctcgtttacatttcttaactttgaggcatcctggccaatggtgcagtaaaaacagttcattggagtgttcgctgcttaattacttatttggaacgccaggccgtgctgaggaaaatacatgaatatgcacccatacgagttaactagggcctgtttagttccaaaaacatcacatcgaatctttgacacatatatggagtattaaatatagataaattaaaaaactaattgcacagttaggggggaaatcgcgagacaaatcttttgagcctaattagtccatgattagccataagtgctacagtaacccacatgtgctaatgatggattaattaggctcaaaagattcgtctcgcggtttttaggcgagttatgaaattagtttttttattcgtttctgaaaaccccttccgacatctggttgattcatagttttggaacatcgaaaaggttctctctcttttcaagagaatgtgcagtctgacaaaatcacaaaatgtactgttagacagatgctacacgttaagaaaaatgcgtggggaatgcagagataagcatcctctccatgattctcaaatttgccattcaggtgttactgaaagcttcagatatcatcagataaataccaactcttaactgtttagccaattccacagctactaaattgtactcaacattacatcatgcatataatataagaataaatcgtggcacagaaagtagaattggtagcatcaaaagtagtactggtacagtactacagtagtacctatagaagaacaaataaaacacaaacgatctgcatctttcacatctagctgaaaagcctgaaactgattaactgaaatcagtccccagaagcaattcagcttcattgcaaatccatttcaggcaatgcacacgattttatcaggaaaacaaaagcacgaataattgagcatataattttcacattacattataatcgacttcaatataatgcagcattaatgcaatcaaagccatggaaacagataatttctgcactaatgtaatccatcagatcggagactaagcacatctcagacaaatcaacagcaaagcaaacctgtaccacgacgatcaaactcaacacgggaaatctcagggaagaaaccaagccggcggtgagtagttcgacggggcttgctccggcaagaagttgtccacgcgtggaaccgccttcggcgccgacgccagccacctgccgctgtctctgcaggggtattgccgcagatttggatccctgaacattgccacctcgccgtagagcctcccgtcgtccaggaagtagacgccctcctcgaaccccggatgcctcgccacctcgtacgatgtcgagcagcctcgtgcgacgaacagcatgcggccttccagcgagtccagctccacccagtcgtactcggcgccatcgttgttggtggcggcgaatgccgtcgatcgcctcgccatctcgaacaccctgaactccgacgtcgtcgtcggcgacggcggcgaggggcggagaggaccagcgccagcagcgatcctggccaccatgaggaggcgcccgcgggactccaccaggtagcggacaacggcgacgtcgtcctcgccgtagtggccgcgcccgcggcgagggaagcggcgaatctcgatgggggctatgtcaagctcctcgtccttgaagtcgtggaactcggatactcgaaacacgaggaggccttcttctccggtgaggaagtagaaggcatcgtcgtagtgtatgagatcctccaggcctgatgccgaccccgcgttgctggcgtcatcgccgttcgccaccatcgcgggcaagactcccatgcggaagaacgcgtagatggacgggttggtgacgtcggggaagtgggagaggatggccgcgccgatgcagcgttggtcctccggatgcgacgagatggtcgccgcgaacatgaccacgtccgtgtccttgtccggcggccgatcgtcgaggtggaggacgtcggggatgcccgaggggaactcgtcgcggaggatcgcgttcttggttgtctgggcgacggcgaagaagagccagccgccggggtgggcgccgaagcagcgcgcgtcgcgcgggatgtccggaatgtggaagcggtgggtggcgcagccgcggagagcgcacgagaaggagcgctccccatctcccgggaggaggatgtacgggagaggcctctcctccggcggaggatgcagcggcttgacggcggcgcgccaggcgtggcagacgcgggccatggtgcggcggtcgacgaggcacgtgaggcggttgtggacgaggcggagggattccgccatgaaatcgcgcgcgggcgctaccgcgtccatgggagaggaggaggcgaaggcgaggcgtgaaggtggcggtggcgagggttggccggcggaggaggtggtggaacgcgacgaggacgcttcgtcgttgtgcgccatgtttgaacttggcttctggaagcaggggaagcttggggtggtttggtttggaagaagaagcagagaaggccagccttttgccagccgagcaagaagttgggcttgggcccagtttatcgtgacggtttgcttgggcctgaagttttgatagctgcactttgttgagcatttcttcatgggcctaaagaactttggatctgtatgatgaagttaattggcccgtttattctttcgtaattatatatgccgagaaatgaatgttagctacagaggaatgttgtgctgagggaatgtttcatctcatcatcatctgagatccatgtgtcatgtatgcaggagtactaccttttcataacatctcttcagtacttttctggcatttttaccatgaacttcatgatgactcaatgtagaatggttggtgttcatgacttggattgcattggtggccgccgcctgctccactgcaatgcggtgttcttgtatgaacttttcaggattaacgcaattgtctcctggcatgaacgtgcagaactattttgtaccatcagagacatcagacagatgctactactttcagagaaatcagaaatgtaatgggcaacgctgagaaaaccatactcattgtgtagcacttaacttttttttctgaacagatgagtagaacatcctctgttcagtagctgtgattcagtgaacagagcaacaaagcacctatcacatacctgtatggctgtgtttcaaaagatgatgaccacattgaacaaataaccatctcacctgttactaacactcaactttttacatcatgtacatagtccaggaataaattatgtcacaggaaaaataaatccagtggtaacaataatagtaattgcagaagaacaaataacagacatattatttactactacgaggtaattaacttgagtgaaacaccatgcaattgatcacaaagcagctagtactatcaagaaagcaaagaaacgatcaaattcttgcaagatgacgatgttatctcagtatgacaaattaagaagctgagtgttgaaactaatttatagcatccaccaaggattcagaatttctgactagatctcctcagaaatgaattgaagcaactgaaagaaagctgcagaaacaattcctcttcattgaaaatacattctatatatgcagcatggtgcactaatgcaatccaactcatgaacaccaactgttttctgcattctgtaatcatgaagtatataatggtaaacataccagaaactcagaacgtactgaagagatgttatgataggtgacataggtcgatccttgcaagtatacaatggaacatcacagattgtactaactggacaatcaacaacaactgccatatctgaagttcagaactggctgaaagaaaaaccgaagaagttcagaactggaatgaaaacaacaactgttcactgatcactgatcagcaccacaacaacatcacacggacacgtcgatgtgaggcaagcacatctcatccagatcgatcggcagaaagctcgatcttactggagaaaccaagccggcggtgagtagtggttcgacgggccttgctccggcaagaacttgtccacgcggggaacctccccggcggccgccagccactttccgctgtctgtgcagggccagcaggggcatcgcggctcatcggcggcggcggcggcagcctgatccacgaacaccgccgcctcgcagtacagcctcccgtcgtccaggaagtagactccctcgttgaactcggcgcccggatacttgttcgcgtcgtacgatctggagcagcctcgcgcgacgaacagcatccgcccacccagcgactccagctcgttccaaccgtatggtgcctcgtcgttgttgatgggagtttccagcggcggctccaccatctcgaacaccttgaacgccgacgtccttggcggcagtcggggaggatgaggaacgagcctgacgaccatgaggagattctcgccggactccaccaggtagcgaacagcgatggctccgccgtaatctcgcccaccgcgcgagaagcgacgaaacaccatgggtgctatcttcagattgccatcgccgtcttcgtagaactcttctacttcaaaaacatggaggtgctcttgcgcggtgaggaaatagaaggctcccttgtggtgtatgacatcctccagaagtcgcccagcaatggtgttagtacaggtcgtcgccactgcaatctgcttccccatgcgccagaatgcatgaacgcgtggactatacaagctggcccggtgaaagacgatggcggcgccgacgcagcccttgtcctccggtggcgaagagagggtcgcggcgaccatgacgatgtccgtgtcgaaggctggtctccccgcgaagtcccagcgggcgatgtcgggtaggtagaaccgctgctcggtgcggaggctgaggagcgcgtggcgcttgatctggccgaaggcgaggaagagccagccgccgccgtacgtgccgaagtagcgcgcggcgcgcgcgtcgtccgggatgccgaagccgtgcccgcggcagccggcaatggggcacgagaaggaaggcccgtctgcgtcgcgcgggacgaggatccacgggagcgggctctccggcgggtgctgctcccccttgacggcggcgcgccaggtgcggcatacgcgggccatgcggcgccggtcgacgaggcacgggaggcgcttgtggacgaggcggaggacgtcggcggtgagaccgcaccatgaagcgtcgtccattggagaggcggaggcgcggcttgccggtggcgaggaggcgaggcggaggcgcgctgctgtgtgttggggattgattgattcctcctctgcttctcgaagcggaaggagaaaggggggatttggtttggaagaagcagaggtgggttgcttgggccaccaaacgatgtaggccttatatattgggccaattggcttgggccacgagttaagagaaaatgttatccacgccacacaggaataatgtttcatctgagatccatgtgtgtacccaatgcagaatggctggtgttcatgacttggattgcattagtgcaccatcatattgtgttgttagtaatgcgttttcctcatcatagaagagttctttgatcagttgcatcaaacggaatttgcagtgaagatcgatggattgcttcttgagactggtttcagtcgcttctcttatcgggatccaattagaatcctcagtgtatgacacaaattagtttcataactaattcaatcatactgacataacacggtgcatcggtgtcagctaaccagtcaacatgctgatgccttgtctttgttctcctgacatactagttgttttgtgatcagttgcatggggatagctagatgcagaatgtggtcatgaaaaagtagactttctacagtacagcccattaatctgcctccagaggaagctacttttgggccccaagaaagctggccctacaaatgaggccgagtccgatctcacagtggcccacccacttcttccaaaccattccaccatctccttccgtttcgagaagcagaggaaccattccaaaccattcccgccgcgcgcacacacagcgcatcgcctcctcgccatcggcaagccgcgcctccgcctctcagatggacgcgctgtggcgcgacctcgtcggcgacgtcccccgcctcgtccacaagcgcctcccgtgcctcgtcgaccggcgccgcatggcccgagtctgccacgactggcgcgtcgccgtcgcgccgcagccgcagccgccgccggggacgaggccgctcccgtcgatactcgtcccgcgcgccgacgacgggcattgcttcgcgtgcgctctcgcaggctgcgccacccacgccttcggccacccgctcccggccgacgcactcgccgcgcgctacttcggcgcctacgacggtggctgggtcttcgtcgccttcggccaaatcctggactacgcgctactcagcctccgcaacggcacgcgattccacttccccgacacgggcacggacatggtggccgcgaccctctcttcgccaccgggcgacgaacgctgcgtcgccgccgccatcagccattcctgcatgatgaacaatccacgaatccatgcattcgggatcctgaggcatcgaggtgtggaggaggcgactcatgatcctgctgagttcttcaccggccatgctctggaggatgtcgtacaccacaagaaagccttccacttcctcacaagagaagaaaacctccatgttttttcggtaccggacttccacgaagacgacgacggtaatctggtgataccgcccatggaggttcgccgattctcgcgaggcgggcgagattacggcggatgcttcgctgttcgctacctggtggagtccggcaagagtctcctcatggtcgtcaggctccttcctcatcctcccctctttccgccgacgacatgggcgttcaaggtgttcgagatggtggagacgcccatcaacaacgacggggcaccatacgactggaaggagctggaatcgctgggtgggcgggtgctgttcgtcgcgcgaggctgctccagatcgtacgacgcgggcgactatccaggcgacgagttcaacgagggcatctacttcctggatgacgggagactctacgatgaggcgttccaaatcctgaatccctttgcccagtaccgggaatacccctgcagagatcacggcaagtggctgccgccggtggcgccgccggcggcggttaccggccgcgtggacaagttcttgccggagcaaggcccgtcgcactacacgccgccggtttggattctcccgtgagagactgccatgttcttggttacattgtcgtggtacaggtattgcttgcttgctgccgatctggcatggcattgtgcttggcttacagcgaattcaccgtctgatttgatgtggtggttgttgatttgtccagttagtgcagtcgatgatgttttctcgagatccaagtgtgcttgcaactgcttgatccatcatatcataacttctcctcagtaccctctgccattttcaccatgttagagtaatgcagaaattgttggtgctcatgcatgaattagtgcatcattatattgcaatgaacaatgattctgtgtgggggattgcattagtgcacatgcatgctttggatcggatttccagtgaagacgaaactgcttgtgcagcttgctttcagttgcctcaattctcttctgaggatctagccagaaattcagcttgcttttagcgctgctcgggccggaggctgagaagcgcgtggcgctcgatctggcggaaggcgaggaagagccagccgccgctgtacgcagccgaagtagcgcgcctcgtgcgcggcgtccgggtctccgggatgccgaagcaattatttttattaatttttttaaaaaatattttttatgtttaaaaaatattatttttttcgctttttattcgccaatacttctctgataccgtatcgcgcgagtatcggccgtatccctgtatcagatacgtatcccgtacgggaatggcaacaaaatgccgtatctgtgcatcatgcagctcggcgcatgaacagaatcagaaatcgttttatcgttgttgttgttatccttttcctttttcttacataaaaagaatcggcataggcaatttggctttacacttgtgcctagcgatcttgtacttgtaggactattatagctgatcaacccagatagtagtacttaactgtctaattataatcatcctaacactagtaatgaagcaaccaaccatctgaaacaagttaacaaattcgtacctccccgctaaaataaaaaaaaaatcgttcattagacagatccggcaactgcaagttcagaaaatgaatgagaaatgcagatttaaacaactctcccgtggatcaatatttactctcattttatctctcctgtcgacaagagagcagatcattctcataccaataccagtgcgttactgaaaaaaattcgatcactttagatcaataactatcttaaccagttcctctgctgctacaatatactcaatattctacatcacacacataatctatgaacaaattgtgtcacagaaaaatagattcagtaacatcaatagtagtgccatcgcaagagcagataacacaggaagagtggcacagctagtagcaagaaagcaaagataaatgatctgcatcttgcacagccagctgaaaccgatgctgaaaatatctcagtacgaatattctgagaagcttggcatggcaattatgaacaaatgaagaagactagcagttgagttatgaaatatatacaatccatgtccctcaaaacagagtcccatcttggacagttaacaagagactgaaagcaggctgtagaagcacaatcaataattcaccttcaatgcaaatatatttcatgcaaaacatgcttctatgtggaaaattaagcactgctaattgaccacattttcacattgcattataactgacggcaatacaatgatgcgctaatgcaattcatgtcatgaacagcaaatttatgacttcatgtaattcatcagatacaacacctgttttttgattgtcctatgataagatatatttggagtgcggtgcattttacctttggcattcgtccactgctcaatatgtctcatcttcttggtagttggctaaatggtgttaatcctaggctaaaatatcgagtttttgtaggcatagcggcgttgtgctgggcggtgtggttgagtagaaatgatgtggtctttaatggatcaaatgcttactcctttttgcaggtgattttcagggggacatattgggcaagactttgatccttgttgcttaaggaagaggatggcactttggtgaaagaatactgcaaaatgttagagatgagagttttagagttctactccaactatggctggaacttcagaaggagaattcaagattaggttggcacttcgtgtctgtttgatgtggtgtgcctggatggtggttttactgttttgttggttgttcttgactctttttgtggtccaagttattttgtttttgttacccatgtaatgggtggagcttcaatgcttatgtctgaacttggttggctgtgtacatcccgttggatgtagaggccgggtttttaacccattatctaaaaaaaaattcatcagatcagatatcaaattgcattcatgtaaatctgatttggaagcgttttctgctacggactatagagtacaacagcaagcatacctgtaatagcaagccttaagaacaatattaatactccttgtatatgtcatctcattgttaattatcagtaaattcagaacctgttggaaattatgaacaggtgaaaatgactgcatagtatgaaatttgtagcacccgttgtaaggattaacaatgcaaatgcaattcatcttcgttgaaattcagttgatccaaagcatgcttagattaggaaaaagccaagtgctggtgttaactaaacgcattctcacactgcagaatcgactgtaatacaatgatgcactaatgcaattctgaaaattagcagaaggtacagaaaacatgaccgagcaattgcaagaacgcatgggcctcgaaggctcgaaatcgaatgaaacatcatagattgtagttactgcacaaatcaacagccgccaaatcagctcactaatgaaaatagcaactgttaaaactcgctctaagctaagcagatctcaacaagatcggcagcaaacattacctgtgccacgacgatcaaactaacatgagcacgctctcaggggagaagccaagccggcggtgagtagctcgacggggcttgctccggcaagaagttgtccgcctccgccgcccccagcagccacttgccgctgtctctgcaggggtagcgccgtccggtgccatcgaggaggaccgtgaactcgtcgtagattctgtcgtcgtccaggaagtagacgccggcgctgaacccaaccccgggtaatcggccacattgtatgattttgagcagcctcgcgcgacgaacagcatcctcccacccagcgattgcagctcgttccacgcgtactgggcctcgccgttgttgatggccagctccaccatctcgaacaccttgaacgccgacgtcctcggtggcatttggggaggatcagagacgaacctgaccaccatcaggagattctcgcgggactccaccaggtagcgagcaacgtcgcgtccgtcgtaatcacgcccatcatgcgggaagctgggaatcttcctgggtggtatatccagatagccgcggcggcctactcggaactccggtaccgcgaaagcatggaggcgctcttgcgcggtgaggaaatagaggctttcttgtggtgtatgacat

SEQ ID NO: 26503 - DNA, 20744 bp, Oryza sativa
  unsure (1)..(20744): unsure at all n locations
ctatcatgaccatgtccctgatgatgctaggattcaggtcgagcagacgattccgggggatgctgatgcagtacttggtgcgaaggttgagnagnccgtcccgcccgtgcccgcgggtgttgccgaagtcgaggaagagccagccgccgctgtacgtgccgaagtagcgtgcttcgcgcgcgtagtccgggacgccgaagtcgtgtctgcggcagccgccgacggcgcacgagaaggtagggccgccggagctcggcacgaggatccacgggagcgggcgctgctgcggcggcgccggcgccgcgacggccgcgcgccaggacttgcaggctcggcgcatgttgcgccggtcgacgaggcacgggaggcgcttgtggacgaggcggaggacgtcggcgttgaggtcgcaccatcgcgcgtccattggagaggccggtggcgagaggcggtggcgcggctggccggcggcgaggaggcagaggcgcgctgtgtgtgtggggattgattcctctgcttacttctagaagcggaaggagagaattttggtttggaagaagtagaggtgggaggcgtgggccaccaagcgatgagactaggccttatattgggccaattggcttgggccacaagttctctcccttgagcgtcgcgtgaagagtgaatgttatccacacaggaatgtttcatctgagatccatgtgtgatgtgtgtacttggattacataatggctggtgttcatgacttggattgcattaattgcttcttgagactggtttcagttgcttctcttctcgggatccaatcagaatcctcagtagatgacacaaattagtttcataactattaatttagtcatgactaatttttttgaacgactcacgtaagacagtgcgaagttcatttgatagagtagaaaaaaactacaagattacaaccctaaaaggtcgtaaccagaaaaaaggaaaaaaaataccaccacccacacaccgacagcgccaaaacacaggttcgggagaaggctagcaccggaccggccgccgctaagtgtgaccgaccgccgctaggccaacaaaggaacacagacgagaacgcccaaaaaaatgccattacaatcaacacaaagcccaactctatcctagagcgtgcttgcaccaattgttcgagtggtttcgacaggaggatgtctaaacgacgtcaaacgacagaaaaccgctgagtcatgactaatttttgcaagttgaggtcctggagtggagtagcaggatccttctagtcacaacattttctctccttttctgcttatagctgatgtataaagtcctcatacaaagatatgcaaaccttatgcatattctcaaataatagcttcattcacgtggaatttcctttcggttaagaacttaccctggagtctctgatgcgagtgcttatcagttcatcacttttgtttatcgagttacggcctgaacagtaattaaacaagttattacctaacttcccaattttaatcaagttaatactagtaacgagtatccaaccatcagtcatcatcagatgctgcaaattcagaaaaataaatgggcaatgcggagataaacatccacctctccgtgtcccaacttatcctctcatttctacacttaagtagagcatttagcagaaaatcatctgatcagtattagtgtacagacctactaccaatctaccatcagccatcaggctgtgttactgaagaaatgctgatagcagaacatcatctgatcagtactagtgatcagattaacacgatgcctatcatctgtgttactgaagaaatgctgataacttgggatctgaaggaatacctcttgacaagagaaatatactcaacattttacattatgcacataatctaggaacaaatcgtgccatcctggcacaaaaaaaaaattctgtagcggaaacaagtagtccctaagaagatcaaataaaatccagatgatcgtacaacaacaggaaacaaaaagtaaacgatctgcatctttcacagctagctaaaagtctgaaaccggtgtgtacaagtaatgtcagaagcttggcatgctatattatgaacaatggaagaagattataaatgaatcaaggaaaatatatagcagagattgaaaattcagctaagatcctctaaagagtggcaccatcctaccccagttcatgttggactgtcagcgaggaactcaaaacaggacgcagaagcaattcagattcactgtaaaaccgtttgatgcaaaacatacttctatcaggaaaactaaccactgcaagttagttaaacattgaattgtttttttattgcggcatagcatatattaatgcaatccaagtcgtgatgaacggcaaccatttgaagcatattgcgttcttgattcactgcagcatcagatcacacaaattcatagtttcatactgcgttcatgattcacgtagttctgacttgaaaacattttctgctataaaaggagaaattctccagcattatagcaactaccaatccatgattatgacatcaaatctggactgaaactgaaactgcactaatccatcgcagcaagaggagacgggacagagtacaacggcatcaaatcgacagctgatgcagaggatggagaccgccatgatcaagcacagcgagcagagcgcacttggctctcgaagcttctggaagcaggaaaggccgattcggtgggcccacccaagccgtaacgcctctctcttcttcgtcgagctgctttgccgccgcgcgcgcgcgcgcggaggacatcgtccacctcgggcctcctctcgaagacatggaggacgagctgggaggcgctcctcttctccatgagcctccacctccgccccagactccgccccgccggcgccgcaccggcgtccccgtcccaattctccacggcaacaactgcaacagcgacctctatttctggctgcctttggtcgacgcgaagggagtccaccgcggagacctgcgtttaccggacgttcgcggcatcgctgaggcggtccgcgacggcgccagggtcgtgtacgccgacgtcgtcgatggcctcggcggaggtcgcgtggtggcgcgcatccggggacagctggtgctacttgaggtagcccctctggctgcctatgccggtggagatggcggcggcggcggcgacgacggcgacggtttgcaggtatgcgcacacaccaactcgcatcgaaatgcttgcaaccattgcttgttagttctgtgtgttgaattgacctcgtcgtcctcctccgtgaagatgtatgttccgaagctatctgcggagaattgcgagcacttctgtcaggcctccatctccaccaagagcaagagaagatacagaagagatgatacaaggaggagcagaggaggaagaggtgctggagcctgacgacaaggaagctgatgcccaggagcaaggaggaaaaccagacttcaagactaagaagaagcaagtaccagtccagcttgggccaagagcaaggaggcccaatccacgctacaagggggaccaatgggtccagtaaacaaccagctagcatgagctgtctgagagagagatcagccgaagctatgtaatataaacatcaacgaagaacaagtagaagggggctaagaactggaatatgcgcggtggcgtaggcggcggcggctcgatccttcggggttgagaaatcttatatgcgcaattcgtgattaattccagttcctgagagataatcgttgggagttcctaacaacttcttctgggtccctttcgtggacgagatcggcaccctacgagggcacgtgccgtcgtcagccctgggaggcatcgccgacgcggtccggggcggcgccagggtcgtctacgctcgcatcggcggcgtagacatatccatatatttgagtcggttttaagatcgttcacttttggtaatatataaggaatcatataagaaatatgtttaaaaaaactcgcatgctaacttgggacgatcggactcccaagtacatctcatgattttctaaaaatatatatatccaagcgaactcccacgttaaatttcattttaactaaaccaaatatataagattaaaatagatttcacccgttgcagcgcacagacatttttctagggaataagttcactttgggtccctctattcgttgttcagtccgattttcgtcccttgaccgcaaaaccaggtacgacccgtcccccaacttatgaaaaccaggcaaacgaggtccctcaacggttttggctgacgtgacgcctacgtggctaatttgactcggtcttcatctaacgtggcgcttacgtgacaatttgatctggaaaaataataaagctgtgggacccacatgtcattttcacacataaaacaataaaaaatagtgggacccacgtaggccccacatgtcatactcaccccctcatcttcctcctacctttccctctcccctctctccaactctctcccctcctctctccagcctccaagcaccacggcccacggggtcaggggaggtccggcggtggcggccggcgacgcgacagccgccgccggcggcgagctccacctctcggcgcagccgtgcagacgttcagtagagctccttgttcacgtcgttgagtacagcatcagcatcgagaccatggacaagatcagacactttcgagggattccactgggggtactcgtgccagttcggtagcttgctcactcctggccaaacttgctcatttggggtgcccagcaacctggaaccaaacaatcaagataaatcaccaccatgaatacacgattatgccccttaagtttgccagcgaacacaaagaacaattgatgaggaaacaggcacagtacttgaaaatgtgcagaagctgctgaacctcggaatctccagcgaaaagaggttgagtagtgaccaactcagctgaaatgcacaagatatatcaacactgtcaaggcatgaatcctgaagaaataataatttacagtggctaaaatatcagttcaccataccaaaaaatgcagcccacagaccagatgtcaaccggagtggagtagtgtgttgcgccaagaagaacctcgggagccctgtaccacagtgtcaggatctgcgcaaaacaatccattcatcagagagagatccaggaacagaaatcacgcctgcgaaacagatcgtcaagcagatcagagactgctagtaggaagtaggaaccggacgcctccgctggttcacccccgccgccgaggttgcctccccttcccccaaccctaggtttcctgttactcgtgttctgtgtgttcatccgcacgcgtcgtcgtcttcaggtggatctctgcggccacgcgacgctggcatccgcccacttcctcttcaccaccgtcctagcgaagcagcagcacgccgccatggtcgagttcgtgaccaggtccggcatcctgaccgccaagaaggttcctgctccgcgtccgccgcggcggggtcagaaacgcgcgcggcatccgaggaggcgccgggaacggctgcacggctgcgccgagaggtggagctcgccggcgacgccggctgtcgcgtcgccggccgccaccgccggacctccccgtgaccccgtgggccgtggcgcctggaggctggagagaggaggagagagagttagagagaggggagagggagagggaggaggaagaagatgagggacatgtggagcccacgtgggtcccaccatttttttattgttttacgtgagtcccacggttttattattttttcggattgaattgccgccacgtcagatgaagaccgagtcaaattagccacgtagacgctatgtcagccaaaaccgctatcaaaactgtcaagagatctcgtttgccccgtaagttgggggacgggtcgtatctggttttgcggtcaagggacgaaaatcggactggttgacaaatagagggaccagagtgaacttattcctttttctagtgattaaaaaaaagtaaagccttcatacattttagcccatttatctgccacacgaggaagctacggagtactcttggggcccgagagagtggaccttttaaatgaagcccagtcggatcgcacggtagcccacccacttcttccatgtcctcctgtgccgagaagcagaggaaccaatcccggcgagggcgcgcacacagcggaatagcgcatcgcctcctcgccttgccaccggcaagccgcgcctccgcctctccaatggacgacgcgccatggcgcgacctcgacgccgacgtcctccgcctcgtcgaccgcagccgcatggcacgagtctgccacaactggcgcctcgccgtcgcgccgcaacagccgctgccggagacgaggccgctcccatcgatcctcgtcccgcgcgccgacggcccttccttcgcgtcttgatttgatatggtggttgttgatttgcccagttagggcagttgatgatgcgttctcgagatccatgtgtgcttgcaattgcttgatccataataacatctcttcagtactctctgctatttttcaccatgttagactaatgcagaaattgttggtgttcatgactcagattgcagggaagacgaaactgcttctgcagcagtgcagcttgctttcggtttgcttcaaatctcttctgaggatctaatcagaaattcagaaattctgcattcattgtttacttttctcaactttgtggcatcctgtccaatggtgcagttaaaaccagttcattgcttaattacttactgggaacgccaagccgtgattttgaggaaaatgcattcatattcaagcatgcggattcactaggttgattcatatggacacatgggagcatgtagagttggacagatggttattggtcctcccggccaaaaataaaaaagagaggaaaaagaaaaggagagatttattggtccaatgtgatcatcatctttagtaacacagatatgatggtaaaactacccgtacagattaacagatatgatgcctaccaacctaccatcagccatcaggctgtgttaccgaagaaatgctgatagtataacatcatctgatcagtactagtgatcatattaacacgctgcctatcatctgtgttactgaagaaatgctgataacttaggatctgaagaaatacctcttgactgaagaaatatactccacattttacattatgcacataacataggaacagatcctctgaagagaaaaaaaaaactagaatattagggaaggacctaatatcaaataattaggaggggtgaggctttgaatccaggtcgtctagcccaccaccttgtggagctagccggaagacccctgggcatttctcgatcctctgaagagtggcactagcctacctcagttcatcttggactgtcagcaagaaactcaaaacaggacgcagaagcaattcagattcactgcaaaaccgtttgatgcaaaacatacttctatcaggaaaactagccactgcaagtgacacattgcattgttattgactgcagcataacgatgtactaatgcaatccaagtcatgacgaacggcaaccattggaagcatattgcgttcttgattcactgcagcatcagatcacacaaattcatagtttcatactgcgttcacgattcatgtagttctgacttgaaaacattttctgctacaaaaggagaatttctccagcatcatagcaactaccaatccatgattatgacatcaaatctagactgaaactgcaactgttgactgaaactacactaatccatcgcagcaagaggagacgggacgggacaaagtacaacggctgcaaactaaaccacatctcggaggatcaaatcaacagcgaatcatacctgtaccaggacgatcaaaagtaacatgagcaatctcaggggagaagccaccccggcggtgagtagtccgacgggccttgctccggcaagaacttgtccacacgaggaacccccgccgcatccgccgccggtagccacttgccggtgtctctgcagggatatcgccgtcgccgccgccgagccgtgaacactgccgactcgcggtagagcctcccgtcatccaggaagtagacgccctcgccgaactcatcgcccggatagtcgcccgcgtcgtacgatctggagcagcctcgcgcgacgaacagcatccgcccacccagcgattccagctcgttccacgcgtacagggcctcgatgcgcgtccccgacggcggctccaccatctcgaacaccttgaacgcggacgtcctcggcggcgcgtgtagacgatcaggaacgcgcctgaccaccatgaggagattgccgcgggactccaccaggtagcggacaacgatgtctccgccataatcgcgcccacctcgcgagaagcgacgaatcgccctgggcgccatcttcatgttgcctttgccgtcttcatggaaatcccgtactgcgaaaacatggaggtcttcttctgtgatgaggaaaaggaaggcccccttgtggtgtatgacatcctccagagctggctcgtcgatggcatcggagccatgacccatcgccgcagcctgatccgggaaagccttcgctgactgcacgcgccagaatgcgtgagtgcgtcgaccagcctcgtagggcccgtaggtgatgatggcggcgccgacgcaatcctcgtcctccggtggcgaagagagggtcgcggcgagcatgaccataccaatgtaagggacaggccgccccaattcagcagccgtcatgtccgggcggacaaagaaggggaggcggaggcgcagctgaacgtcgcggaggctgaggagcttgtggcggaaggtctcgcggaaggcgaggaagagccagccaccgtcgtaggcgccgaagcagcgcgcggcgcgggcgtcgtgcgggacgccgaggccgtgtccgccgcagccgcggagggcgcacgagaaggaagggccgtcggcgcgcgggacgaggatccacgggagcgggcggcgatgcggcgcgtgctgcagcggcttgacggcgacgcgccagtcgtggcagacgcgggccatggtgcggcggtcgacgaggcacgtgaggcggttgtggacgaggcggagggcttccgccatgaagtcacgcgcgggcgccgccgcgtccatgggagaggcgaaggcggaggcgggggcgaggcgtgatggtggcgagggttgggcggcggaggaggtggtggaacgcgacgaggacgcttcgtcgttgtgcgccatgtttgaacttggcttctggaagcaggggaagagaggggaacagagtgaatgggaggtttggaagaagcagagaaggccaagccttttgccagccgagaaagtggttgggcccaatttatagtgccggttttcttgggcctgaagtttggatcgctgctctttgctgagcgtttcttcttgggcctaaatgttcccctttttttttagaacgtaaagtttggatgtacatggtgcagaatcgtgtgcgccatgtttgaacttggcttgtggaagcaggggaagagaagagacacagagtggcttggtttggaagaagaggcagagtcagagaaggccagcctcatggtggttggtgttcatgtcttcgatagttcgattgcattaggtaatgtttggttggtggaataggatgggatgggacgggatgggacgaacttacttttagaggtgttttgttgaggggcgagtggaatgggttggtctctagagaggaatattcctcccagatccgggacaaacccatccggcaaaattggccggacgagctcgtcccacttggacggagcacacagtgtctcctcggcgaccgccggcgctccgccacgaccgcctgccaccacctccacgaccgccgacgctcctccacgaccgccgacgctcctccacgaccccctgcctcaacactggtcgccgccacgagcgagatgctcggcaccatcccgccactcatcgcgatgctcgacgagagcggctgcggtgatgtcgacgcggcgggctcgagtggcggcgaagcttggaggtagggagggcggcggcggcagatccagaggagggggactcggcggcggcgaaacttgaaggtagggagagcggtggcggcggatctggcgcaggggatctcccgatccagccgcggtgacgacggtgggccagcgggttgggtgctccggcggtggtggccgtcttgctgctgccgttgtgcttgatccggttgttccacgcgtggatgcaggtggcgcagtcaacggtcgttgacggtgatggcaaacagcgtccatcccatttctccctcatcccttcaaccaaacaaaaaaattgggattgtcccatcctacaaaccaaacatgtgagtggaatcatcccaaccccaaaattagggatgaatggtttcatcccatcccatctagtcccgaaaccaaacacatgcttagtggatcatcgtcgtgttgtagttagtaatgcattttctgcgatgtgtttactcaacattacttagcgttttttctgttaaaagaatgcattgcattgcatcaaaaccgatttgcagtgaagatcgatgaattgcttcttgagattggtttcagttgcttcaattctcaggatccatttaagcggatgctacatattaagttcataactattaatttgctgttcttctccacttatatcttttaaattactagaaaaaatgcatgtgcgttgcaacattgcaacaggtgaatgttattttaatcctattattgttatacgatttacatgggatgaaattcactgtgtgaattcgcttgaatatttttttagaaaatcatgagttataattaggagtccaactttactctcaagtgaccatacaagtttttttaaagaaattttttatatgacttcttttgtattttctaaagcaaacagacttaaaatccgactcaaacatggatatgtatttccaaaatagaacgaacttaataaccgattcaaatacggatgacttaccaaaataccggtaaaaacatcttcaatttttataatagtagagatagagatatattatttttaacatccgtttgacctattgtactccgctcaaaatatgtgataaaacaagtccaatatttaatatatttaaattattttaaaattgtattcttgttcttagctcttatagcagtgtagttactttagataccatgaaaagttactttcttacagcaatatagttatttctagtaacgtggggtaaatatttgcttttattttgtttttagagttactttcctctagcactgagttacttctaataccgtgaagagtaacttctatttctccagacttgcttttttttctagcaatatagttactctagtaatgttaaaagctacttctatttcttcaaagttttttctaatcccataaaaagtacttctatcttatcagttttacttccctctagaagtgtacttacatctaacaccataaaaagttacttctattctttttataaaaagattattttcttccaagtgtgtaattactttgaatacctaaagagttattttctatatgacgctaaattactctttacaaaatatttatagtgattacttccaaataaagaaaattactttctcctctcaatataattactttgtatttagttaggagtcttttctatattttacttcgcatagtttcttatttcaacatcattcaatatgtttcctttcaatgctactcaaaagtgccggttcgttaaaaaagtgctacacaaaacactagacatggcacccatccgacctcaaaacactaggcatgacgagttggcgtcacaaccgactcccctgttttagttttgaaattttttattaggattaggaattatcttagacgagaaaaattatcttagacgaggctgattcagagtaggaaaaattgcacacatcagtaggagactaggaggacatgatactgatcgtctgatccttctcgcattgggcgttcatggcctcgtgggctacataaaaggccatctaaaagcccatagagaataaatgaggcccattatacatttgagcccattaatctgcctcacgagggagatacacttggggcccaagaaagctagccctataaaagaggtccaaactgatcgcgtgctggcccacccaccttcttcttccaaacgaagccgtcatctccacccgcttccagaagcagaggaatcaatcccacacacacctcgccaccggcaagccgcgcctccgcctctcgccctctccaatggacgcgccatggttcaacctcaacgccgacgtcctccgcctcgtccacaagcgcctcccgtgcctcgtcgaccgccgccgcatggcccgagtctgccacaactggcgcgtcgccgtcaagccgcagccgcagccgcagccgccgccggggacgaggccgctcccgtcgatcctcgtcccgcgcgccgacgggccttccttcgcgtgcgccctcgccggctgcgccacccacggcttcggccacccgctcccggccgaagcacgcgctgcgcgctacttcggcgcctacgacggtggctgggtcttcgtcgccttcggccgaattctggagtacgcgctactcagcctccgcaacggcacgcgattccacgtccccgacatgagcatgggcatggtggccgcgaccctctcttcgcctccgggcgacgaacgctgcgtcgccgccgccatcagccattcctgcatgatggacaatccacgaatccatgcattcgggatcctgaggcatcgagttgcggaggaggcgactcatgatcctgctgagttcgtcaccacgtcagttctggaggatgtcatacaccacaacaaagccttcaaattcctcacaagagaagaaaacctccatgtttttcctgtagcgggcttccacgaagacgtcaacggcaatcttgagataccgcccgtggaggttcatcgcttctcgcgtggcgggcgagattacggcggagccgtcgctgttcgctacctcgtggagtccggcgggaatctcctcatggtcgtcaggctcgtcaccgatcctcttctcttgccgacgaggacgtcggcgttcaaggtgttcgagatggtggagccaccgacgaggactcccatccacgacaaggagcccgcattcgcttggaaggagctggaatcgctgggtgggcggatgctgttcgtcgcgcgaggctgctccagatcgtacagcaagaacaactacccggacgctgagttcaacgagggcgtctacttcttggatgatgggagactctaccgtgaggggttatcgttcttggctcccgattccccagaatacccctgcagagacaacggcaagtggacggcggcggcggcgggtagcagcatggacaagttcttgccggagcaaggcccgttgaactactcaccgctggcttggcttctcccctgagagtgctcatgttagtttcacctgtctgaaatgtgctatagtgtagtttcagtcaacagtttgatgtttccgtcaagattggtgtgataattgtcggttggtacagttgctactatgctggagctacctagtaaattctccttttgtagcagaaatgcagtgtggtctgatgaattacatctatgcagcaatgatattgcagtcaatagtaatggaatgtgtaattttcagtgcttatttttcctgatagaagcatgttttgcatcaaatggattttacagtgaagctgaatttgcttctgcaccctgctttcagttgcttgctagcagtccaagatggagttagctgaattttcaatggctcccacacatttcataactttattatctattcacttttccataagttagctgaatttttaatgggcttctcaaattgctgctgggaaacatgcagattgtttctcttctctttcttcatactagttgtttcatagcaacttttttctttgagccagttctgaacttcagatatgacagttgttgattgtccggttacttcagtctgtgatgtttcgtccatgtgtgcagtgtacttgcaattgtttgatctgccataacatctcttcaatacttcacttcatgatttcagttgctgtccagaaaatggttggtgttaatggcttagattgcatatttgcagcagtgcttcggatcaaacggattttcagtttccgtataagaagtagatcgtttatctttgctttcttcataggactagttagttgctttatgatcagttgcatcggggtagtaaataatctaccttgtgttatttgttcttctgtaggaatagatcgtggcacgggaaaaacaaattcagtggtactatcagtatagtaccacacagatacatgtatgttgataactgtttcattaatcagttcactgctactgaacagaggatgttctgctcatttggtcatctgctctacaggaaaaattggttgctcatttggtcattctgaaattgtagcatagtctgatggtagtggtaccaccaaaaaaaagttcttcagacggttgtttcccctttctcagtacctatatggtaaaacgccaagcaatgcttttgccgagaatgacacattgacacccatctccctgcttgagttttgaaattttgattctgaataatttgtgttcacccggttgatgcagaatagcaatggtcaccctatttcagtatttctgtttcgttttactccgaaaaaatgcgtgttgaatttgagagattatgatacgagtacattggaatatgggttttgaaatatcgagcaggctggccctattggcccagtgaaaaagtaaaaccgtggggcccacgaaaactggcccaataaataatgcccagtctgatagcttcgttccccagcccaaccccctgcctcttccaaaccaaagccacccatctcccacctcccgcttcgagaaacagagcaatcaatcccacgcagccacatcgtcgcaatcgatcgcctcgcctcacctcgcttcgcttcctctccaatggagtcgctccaccacgacgtgatccgcctcatccacagccgcctgccgtgcctcgtcgaccgccgccgcatgggccgggtctgccacagttggcacctcgccgtcgcggagaggcagcgcagcaagctcccgtcgatcctcgtgccgcgcgcggacggcccgtccttcgcgtgcgccctcgccggctgctgcgccacccacggcttcgcccacccgctcaaggacgacgcgcgcgccgcgcgctacttcggcgcctacgacggcggctgggcgttcgtcgccttcggccacaccgtgggctacgcgctcctcagcctccgcgacggcgaccggctccacatccccgacatcggcatggccgtggtggccgccaccctctcctcaccgccggacgacgaacgctgcctcgccgccgccatcaacctctcctttctgattgacgatctacgcactcacgcgttctggcccatgcggcgtcaatctgcggctgcgccggagaaggcggcgaaacctgcaaaggtcatcagcggccacgctctggaggatgtcgtacaccacgacgacgccttccatttcctcacgagagaagaaaacctccatgtttttccggtagcgggcttccgcgaagacgacgagggcaatctggagataccgcccgtgnaggttcatcgcttctcgcgtggcgggcgagattacggccaaaacaacgctgttcgctacctggtggagtccggcgagaatctcctcatggtcgtcaggctcgttccccatcctccccaattgccgccgaggacgtcggcgttcaaggtgttcgagatggtggagccgccgctggggactcccatcaacaacgacgaggcaccatacgcctggaacgagctggaatcgctgggtgggcggatgctgttcgtcgcgcgaggctgctccagatcgtacgacgcgaacaacaatccgggctccgagttcagcgagggcgtctacttcctggatgacgggagactctacgacgaggagttgatgctcggtgagcccgatttccgggagtatccctgcagagacaccggcaagtggttgccagcggcggaggcgaatccccgagtggtcgagttcttgccggagcaagccccgtcgagctactcgccgccggcgtggcttctcccctgagattgccgtcgagctacaggtttttgcttgctgtcgattcgatcccccgagatgtggtttagcttgcagccgttgtactctgtcccgtctcctcttgctgcgatcgattagtgtagtttcagtccagatttgatgtcataatcgtggattggtacagctgctacaatgctggagcagtggagattgtacttggtaaattctcctcttctatcagaaagagtatgcaagccagaattacatgaataatgaatgcagtatattcaactcagcatgaatatgtgatctgatgaattctacatgaattacaatggttgccattcttggcttggatttcattagtcggtaagattgcaatgtgtaattttcagtgcttatttttcaggatagaagcatgttttgcatcaaatgtattttacagtgaagctgaatttgcttctgcagcctgctttcagttgcttgctgacagtgcaagatggacttggctgaattttcaatggctgctacacatgttcctaactgaattaactattcacttgttcataagttagctgaatttcagttgcttgctgacagtccaggatgggctgaggtagtgccactcttcagtggattttagcagaattttcgatggctgctacatattttcctaactcataatgtagcatgttaagtttaccaaattactgatacacatcggtttcagctagctgtgaaagatgccgatagtttacctgtttgttcttgatactagttgctcggttctgttgttgtataatcgtctgaatcttagtggagtactattgattctactgaatttatttactgcaccacaatgtattcctttattctgtgcataaggtagaacgttgtgtatgttttagtagcagaagaatggttaaacagttaacagatggttattaatccaaagttatcagcatttaggcattacttcagtaacacagcctgatgttaggcgtcatggtaatctgttcactagtactgaactactgatcagatgatgatgttcttctgccctccctgctctacagaagactggattaaatgagagaaaaagttgacacgcggagaggaggatgattatctctgcattgcccgttcatttttctgaatttgcatgcaggatcttgtgattgatggtaagaaattgttggtacaatttagatggttggttggttaatcaccagcattaaccacgagaaaattttggcagttcactacgactttgatgcatcacttgcagattctttactgttcagtctggaactcaataaacaaaaagtcataagaactcacagactccggaaaattaaaataacacgggtctcaagttattggtccatgggaaattcgacatgaatcaagctgattgagcataactgtcacggtagatgccatgctgattaagcgactttcgaagagggaagaggaggattagcctgaaaaattgaaaaattagcatgaacaggataatgatgcaatcccccagactgaatcattgttcgttgcaatataatgatgcaattaatgcaatctgagtcatgagaaccaacaatttctgcattagtctaacatggtgaaaatagcagagtactgaagagatgttatgatggatcaagcaattgcaggtacacatggatctcgagaacacatcatcgattaactggacaaatcaacaaccaccatatcagcacgacaacaagtcatcagacgatctaactaagaacatggcagtctcacggcagaatccaaaccggcgacgtgtagtacgacgggccttgctccggcaagagcttgtccacgcggccggtaaccgcctccgccgccgccgccggcggcggcggcagccacttgccgttgtcgctgcaggggtactggggaaggggattcacgaattgggacgcctcatcgtagagtctcccgtcatccaggaagtagacgccctccttgaactcatcgcccggatacttgttcgcatcgtacgatctggagcagcctcgcgagacgaacagcatccgcccacccagcgattccagctccttccaagcgtatggtgcctcgtcgttgttgatgggagtccccagcggcgtctccaccatctcgaacaccttgaacgcccatgtcgtcggcggaaagaggggaggatgaggaacgagcctgacgaccatgaggagactctcgccggactccaccaggtaacgaacagcgaagcctccgccgtaatctcgcccaccacgcgagaagcggcgaacctccttggccggtatctccagattgccgtcgtcgtcttcgtggaagcccggtaccgaaaaaacatggaggttttcttctttcgtgaggaaatggaaggctttcttgtggtgtatgacatcctccagaactgacgtggtgacggactcaacagcagtcgccttctcctcaacttgatgctccatgcgccagaacacatgaacgcgtggatcgtacatcacgcagctgtggccgatggcggcagcgaggcagtgttcgtcgtccggtggcgaagagagcgtcgcggccaccatgtccgtgagcgtctcgacgtcagcgaggggtaatttctcgtcgccgcggaggctgaggagcgcatagtccagggtgcggtagaagcagacgaagacccagccaccgtcgtaggcgccgaagtagcgcgcggcgcgtgcgtcggccgggagcgggtggccgaagccgtgggtggcgcagccggctagggcgcacgcgaaggacgtcctgtatgcgcgccggacgagtatcgacgggagcggcctcgtccccggcggcggctgcggctgcggcgcgacggcgacgcgccagttgtggcagactcgggccatgcggcggcggtcgacgaggcacgggaggcgcttgtggacgaggcggaggacgtcggcgttgaggtagaaccatggcgcgtccattggagagggctcgagaggcggaggcgcggcttgccggtggcgaggtgtgtgtgtgtggggaatgggttcctctgcttctggaaggaatttttttcggatttagatttttttttaaatatttacagaaataatctatcgaccaaaaaaattgcagaaatagcccctgccgcccacctctggggcggcaagctgacgtggcaaacgggggaggaacggacggtgacggagggagggttttttgcaggaaaacccttgccgccctctggtggggcggcaaggggcccgaatgcaaaaaagccagtcggggccggctattttgcaggcggccccttgccgccctctggccgggcggcaggcctcgctgcctataaaaggcctgctgcccagcccccagccctcattcttctctcctcaattccagtgaaaaaaaaagaagagaggggaggagaagagaagaaggggcgaagccctgccggattcagacgccgatttcaggtaatattcatagatcctatatgtgactattgagttaaatagtgtgtattctttaaaaatttgtttgaataaatgcattatatttttagggttttagttgtactaatctagaagtgcgtattgtagatatcggtaactacgtagatctgctagtttggaattaatacattaccgttgcattggcttacacaagaagatattacgttgtagatgtttattgcatgaaagagtaatatgatctagttatttcgttgacagatatgtcgaacaaacaaatattccaagtttaccatggaccaggaaacgtccgttacgggccaactggggtagatctgtcagattttattgtatcagaaaggggaattgagagaccggctgagaggagtgtaccttctataaaaggatggttaatgaggggcttgagagttgatccacagacaagtgacataacaatcaatgttatagtaagtcgggcaactgagggtttttattgggaactaatgccagttcaaaactctcgagtgtggagatggtatttggaaaatgcattgcaacgcgggtggcctctagctttggttccgtttgttcacccgaaggatccaggtgtgcagacgaacatggatgatggcgagggaccaagtgctgaagtaaacgagacttctgtggaggaggtcaacgcacgagaggacgggggcgtagtagctccagtgggcattcaaccaggtggagtggctgacgagggggagactgtcggtgccattgtggatgaaatggagagggaggattctgacaacgagcgtgtagaggaagttgattcgtcagatgatgagacggatattaatccagcagaatgggctagtgaggatttttctaggctgatcgtctctgaagaggatagtgtgagatgggagtacaaagaaaatgaggttattcagggagcgatttatagtagagcagaagatatgaaggaggcggtaaaacattttgcagtgtcacttcatagagagttttgg

SEQ ID NO: 26504 - DNA, 4535 bp, Oryza sativa
ctgctctacaccatcctgcaacaaataatatctttctttattactttttttaaaaaaatcaattcatatggatttgtaatttttgttacctgttctcttgtatttttaacctttcttctcttcttccttggcaagtcaaactcaacgtgtttcagagggcacgttggaaatgtgtgatctgtcctctgaaaatgactgcaatgatatagttctttttgctgtatttcttccctaattgtcttgtatctttgagctggcctgcctttggattttgcaatatctggatccaacaatatttcttctgtattttcctcagattgttgattgccttgttcatgtgagttcaaattgtcttctgcatttggatctgaatcattgatctcctgctctgcatctttatttgaacacattaattccaattgtttagcgattttgtccatctcttccactgcaaactggaaagtttcattgcttttcgatccatttgatgctatttctgcacttttccttgacaaaatgttgaatctcaggattgagctctatgctaaaggtatatttccattgccttttcccccaagacctttgtactctttttttgtccatctttcaataatatatttttctggtatcttcattgcattgaggtggagcattactttcaatacatggcagcatagaagtccatctttctcaaactttgagcaaatgcagttgaaatcctccttttccaagtccacaataacaaggtacttccttcttctgattacttgaatattttgattcaatgccaaaaaaacttcataagttttgaacttctctacttcatttatttgaaatctagttgttcttttcaactcaacttgaaacttgatgaagattttgcgattatacattctcattgcttggtactcaatgtagtaatgggaccaaagtttgcttggtttctttgttcttgaaatgtgatcatcaaactgttccaagttttgaattgtatccattactctttcatactctatcatgaagtttgtaatgttgtactgtggaccaacattattcttaaaccttgagttagtcccttcactgagagctgtgctttttataaatggacagaaatcacccttgaaatacactggaataaatctttttctaattgaccacatgtgctttagaaaattgatatgctgaacttcaaagctgtcaatcatttcttgccataaatactcaaattcttcttctgtaactgagttatttatgatgtcttcatactcatcatacaacccttcttttgctttgaacaaatttccagatagattgaaagctttctttacaatatgaaagaagcaatttccgtgctttgcattttgaaatacttgagcaattgctgatctcattgctccatcctgatcaggaatgattatttttggttctttttgtgacatagctttcaaaaaagttctgaacatccatttaaatgtttctgaagtctcatcatgcaaaaatgcacaaccaaaaacaattgtgtttccatgtccagaaattccaacaaagggagcaaacgggaggttgtatctgttggtgaaatatgttgtgtcaaaactcacaacatcaccatatttctcataccactccctcgatctcccgtctgtccaaaacagatttttcactttcttgctctcatccaaatcaaactcataaaagaaatgtggatctttttcttttttccttctgaaaaattccaaagttttcatcatatcattgctgcttgtctccttgttaattgtggttctcacattgcttatatctttcttcgtataaggcaaagaagtcaatcctcctcttagaacagataaaattacaatcatgtgccttgttggtattgtcggtgacatgggaccgggggtatcttgactagaggtttggggcagctgcagtcacccatgtggcctgaccccctcgggggggggggggggtcgggcccgagggtgatgtgcccgcccctccctctgtctccccgaggggtcgggccgctcccgtttcggccccgagggctggggcgccccgaccccctgtgggtttggcgccacgtgtgtgggttaggtgagcacagcggcgctcacctaaccgcgtttattgcgggttggacgagcaccccacgccgcatttaatgcagcacagcacactcgttcggtccgtgacaggtcacagtgtgtgaccggtcacagaccggtcagatcgcgggttaggtggcaacaggcggcctgacacacgcctcgccccgtcccgtcggaatgatgagagcctccaggcactcgtccctagccggagccggcgtgggaactcctggagttggcacgtcagccccggccagatacattccaggcttcatcgcaaccattgcaaggaagtcattgtatgaagaagggcagacgtgtagcatgctaaactgacacgtggtggacaagaatgatcggtctgtgactggtctgacgccggtcgcgtcatcggcagacaaccgtgctcccacgatgcatctgcctccggtggagtggaggtaggtatgacccatctcgtcggatggtcatttggaaagcagccatggcaaatctccgcccattaatgagggagtaacagggagatccccggtgtcaggcgagtgacggcgctgagcctcactcaaggacaagttgtgatttagcttccaggcgaaggtgcaagccaagttttggtcaagatagggtaggtccccacccaaaagaaaagtaggtagaagtggtgcatgtggtatccccttgagatataaaaggaggaccttgcccaccaaaaaggggggaaaaaaagaaaaaaggacgctagaggggttctggagcctgaactctctagctctccggctctctgtaactccttcacacacagatccaccagaacacaggagtagggtattacgcttctcagcggcccgaacctgtctacatcgcccgtgtctcgtgcacttgctctctcgcgaacattctccagatcgatcgagggcgaagaacctcacttagcgtccccggccgaaccggcaaaggggggcctgcgcggtctcccggtgaggagctccacgctccgtcaggtatattacattccttcaaggtccttatgagcattttttcttctgtagtcatgtgtttgtgtgatttgagaaatctcacttcatctcttggacttagttgatgattgtggtctaattgtacccttgaaatattccaaatctcattcctctctgaaataaccagagcacacttgcaatctgttgcatcattttcatttgtatttctttccgaaaccactgtttcctctgcgcttactgatttggattgagaagttggtttgccttgtctattacatctgaacgttactctagtcacttctccattccttttcttgcttgttgtgtggtagttgtgagccctgacaatagaaaatccagccaacagagcatagaagttaaagaattcatgtgcttttgtaatagtcttaaattgtgttccaactcttggtatatatctgctatcaattgctgcattattaccctttgtagcttcttcctgttcattctctacgaaaatatttatgtcttcttctgtcagctcttgttgatttgtttcagagttatcatttggattattgtcatcatctcttgttccttgaactgaagtacatcgatgattatccattgaacttggttcctgcaaaaaaaaagcagttccattagtttctgaaattaattttctagcctattcattgctaatctgaattattcaatttaattttttaagaaatattaatgtttgtactctttttttgcagactatgaaacttcaatcatcaatcattgttatctagagaaaaaggtacaaccaacaaaaattaccttttcaccatctaacaaattgaatatatcaagattccaattatccattgcatcctcttcattactctcatcttcctggaatttgaattacattacaaagttaaaatttactaaaattatcataatttttaatactacaacaggaagtaatacatccaagacaacatgcctcatttgccgcatcattattccattcttcaatattagcattagtacgatttgttgttaatatcattgaattctgcaaaacaaaatttttatatcaatacttatttgcttttgaatttgaattattagattcaattaaataattaatatttcatacctgaaatgcacttggactcgcaacaaaagtagagtgtgctgaattttgttcctgtaaattccaataaaaacagaaatattacaactaaattatatatgatattcaaatattgtttttcttacctgcatatcagaaatcgtaggctgtgatgatatgatttgttccattaagcttgtgtacgacatatttgcaacctgcaaataaattttcatatagtattttgactaccaccttcaaatttttcctttaatagcaaaaactttgtaatatgaacttactgaattcattgatccgaaa

SEQ ID NO: 26505 - DNA, 864 bp, Oryza sativa
aacccgacacttgggtcggtgcttgcgaactaaatgaatttccaaaaccgcggaccggggaacgtaccgggggtacggtttcccgctcttgcacttaaggaccgtttccttggaatttcatccgatcataagtcaagtacgaccacatggatggaatgggacacccctggctgagtaactagcttatcaggggagccttgatgccgagagacatgtggattcgctagggtggtgtcggggaggacccctgggcttcctggcacagtatggtctgggacctaacgtgttgttggtctgggacccctctcgtcggcatatggtaaacctgtgtcggctttcgaaatgccttgtcatgaaagcttggaggtctcccgacgtggctgatccccacgggctgggtgatccgggttagtaatgtcgtgtgggtaaagtgtaccccctctgcagaggttaataaactgtttgaacagccgtgcccacggtcatgggcggatgtgaggtgattcctagcgtagttttgtttgactactgccttgtgaaattgctgttgtgaaaaggggatcgatgtttggaaaaatctgcagctgatgggatcagctaggcccgggtggccgtttgaaagttgttggcccgggtggccgtttgaaagttgttggccgggtgccaatcttgaacaattctaaagactgatacattacacatactccgaccggacgagacgcactgtctcatccgtgtcgtttgagaagcactcacttagttgttttcagaaaagagttcaaataaaatcaattgcaaaaacaacagtctttccttgaagcctgcattaaacacttatttcccatggcttgctgagtactcccg

SEQ ID NO: 26506 - DNA, 3974 bp, Oryza sativa
caggatggacgacagacttaattgaccaacttgtcacaatctggaccgccactcagacactacaactagaagagcaagaggatgacaaaataacatggaagcttaccagccatggtgaatacacggcaacgtcggcctacaatgtgcaactcctcggcaccacagccaccaactttaataacctaatttggaagacctgggcgccacgaaaacacaaaaccttcgcatggctaatcatccaaacagagtatggacctccgacagactagcaaccagaggatggccaaacggttccatatgtcccttatgtcgtcgatctcaagaaactgccctacacctcctcgcgggttgtagatacacaaagagaatctgggaggcaattgcggaatggacggcgtgtgaggggttgaaaccatgtcggtggcagcaaaccttcacggtgttagaatggtgggaggctaccttaaacatccaggaggcacccaagaaggctcttcgcacactgatcctgctggtcgcatgggagatctggactaagagaaaccgcagaacctttcagcaaaaagagctatcgaccacctcccttctagctaaaatcaaggaagaggccaaaacttgggccttagcgggcgcgaaaaatcttcataattggctttcttttagttagctcggaccaaaggtcctgagctcgttttcgcctttgtacagttttactcctctattcaatgaaaattggcagcttgccttttcttcaaaaaaaaagaaaagaaaaaggcaagtgctggtgttaactaaacgcattctcacactgcagaatcgactgtaatacaatgatgcactaatgcaatccaagtcaaccatttctccattctgaaatcacgaagcatcgaaaattagcagaaggtacagaaaagatggccgggcaattgcaagaacgaatgggcctcgaaggctcgaaatagaatgaaacatcatggattatactaactggacaaatcaacagccgcaaaatcagatcacgaatgaaaatatcaactgttacaactcgctgtaagcagatttcaacaagatcggcagcaaacattacctgtgccacgacgatcaaactaacatgagcacacgctcaggggagaagccaagccggcggtgagtagctcgacagggcttgctccggcaagaagttgtccgcctccgccgcccccagcagccacttgccgctgtctctgcaggggtagcgccgtgcggtgtcatcgaggaccgtgaactcgtcgtagattctcccgtcgtccaggaagtagacgccggcgctgaaccccaaccccgggtaatcggccacctcgtaggattttgagcagcctcgcgcgacgaacagcatcctcccacccagcgattccagctcgttccacgcgtaccgggcctcgccgttgttgatgggcagctccaccatctcgaacaccttgaatgccgacgtcctcggtggcatttggggaggatcagagacgaacctgaccaccatcaggagattctcgcgggactccaccaggtagcgagcaacggcgcgtccgtcgtaatcacgaccatcatgcgggaagctgcgaatctccatgggtgctatatgcagatggccgcgacggtttactcggaactccggtagcgcgaaaacatggaggtgctcttgcgcggtgaggaaatagaaggcttccttgtggtgtatgacatcctccagaattggtccgatgacgccctcgatagcagtcggcatcacagcgacctgacgccgcatgtaccagaacgcgtgcatgcgtgcaccattcatcccgggcgccagtacgagctgatggcggcgccgatgcagtgctcgtcttccggcggcgaggagagggtcgcggctatcatgaccatgtccctgatgatgctaggattcaggtcgaggtagacgattccggggatgctgatgcagtacttggtgcggaggctgaggaggacgtgccggccgtggccgcgggtgttgccgaagttgaggaagagccagccgccgctgtacgtgccgaagtagcgtgcttcgcgcgcgtagtccgggacgccgaagtcgtgtctgcggcagccgccgacggcgcacgagaaggtagggccgccggagctcggcacgaggatccacgggaccgggcgctgctgcggcggcgccggcgccgcgacggcagcgcgccaggacttgcaggctcggcgcatgttgcgccggtcgacgaggcacgggaggcgcttgtggacgagccggaggacgtcggcgttgaggtcgcaccatagcgcgtccattggagaggccgaaggcggaggcggaggtgcggcttgccggtggcgaggaggcgaaggtgcgctgctgcgctgtggggattgatttggaagcggaaggaggaaagtttggtttggaagatagcagaggtgggtggcttgggccaccaagcgatgagattaggccttttatattgggccatttgtcttgggccacaagttctctccgttgagcgcctcgcgtgagggaaaaatatctgtgggccaaaatgttgtaaggcggaattgaggcgaccaatttcatcaggatggagtaggcctaatttggtttgggggaatggccgaatggaccctaatcctggcctgtgatttgcacgccttggacggatgatgcttcattgcatggcacggacgcacggtaaaccaaatttgcttagttcgttcgtacacgattaccaagaaatctatagaaaaattatcttaaaaagtattaattcatttttaaatttttaaagctaatacttagatactatttgacatttcacgatggatttgaagtttgtatattaaactgtagtgatataaattctcatattttatttaaaataaaaaatagattcatacatgtattatcaatgtaatcgtaaattcagatccatagattcatggagttaaaaatatccagctctaaagtattttcgattcgaagctatgtcaaatataatcttaattaatcatgtgcttatccattatttcattttacgtagcgtatttaggaatttcgtcgggttcaactgacacaggggactcggtaactgtaggtctgtagcggtgctgccgccaaggaggcaatgcgtacgagacacgaatttaaggataacaggataagtcaatatttagaagtattttctaaaaatttaagctaatattgcattgaaagtaattcttgctatgttaatttcatagttgtcaatgagagattcaaaactcaacattaaaataacgtgtaaaaacctaatgcaccttatattttatgaaccggtaaatacatcatctccgatctaaagcatgaggccagataagctggttttataattgcgtcaaacattgaatttagtaattataagcattaattaactaaatatgtcgatcatgcatagcaagagatcaagtcgtctttgcgcatcgcataataatatttccacgaactctttatacaactcgtaccacatttctaatttcaaaagtaaaattaaggcacagagttcaaagctgttttctcattctctagtcaatttcgtacggagcagcagttaaacatggtaattaagggctttttttttctcggaagggcgtatttgccatcgagctaatcttgtgggctaatctgcaaaaataccagaagagaatcgcactcgctctatttatatcgaccttcctcctctccaagccaagcggcttcatatcatccggcatccagagaaaaatatagcaacgaaaaaaaaggagaaaaaaaaaacagtctctcttccggtaatcttctcgatctcacctcgctttgaactctccgctcgattttttttctatgatttctccaatctggttaacttggattgttccctacccccagaaatctgttgtagtgtagatctggtaaatttgtttccctcacatttttgcgctct

SEQ ID NO: 26507 - DNA, 3057 bp, Oryza sativa
taaatgcataaaagttctgtgcatcagtaacaagatgaaaacccacatttgctgattcctgaaacactgaaaagaactggtgagtgtcatgatgcagaaatttcaagagaccacatggtctacacaacaaaagtaatatcatacctcagaatttatcacagtcgagttgacagtcatggaagatgcaagaaggttggtagagaaaataacatagtgccggagaactggattttcaagcttttgcacattggagtactccatgtcagcaaaggatttaaagtagtctactgtcaatctcattgaaaggcagtggaggctcttaggtaatgtctgaactccaagccggtaaagatatgcaccttgtcttgcatgaaaatgagtttcatcctcagtcatatcaagcaattgcctcagttttttctcaaaattagtgcattctatcagacatgattttgctgcagctattgtcttctccatctttgccatattggctccatggcttcaaaaataacaaataatcactataacaaaacaaataatcattatagcaaactctaaacctatggggaaattttctgttccaaagtgaatctgtataacacattgagccatcagatcatcagtccactcatcatttagaacttactgctacaattattggtaaattattcatcccaatatcacacttttagcttaatacaatgttattcgatcaaactacagagtgttaatacatttcacaaaataataaggactacgaacatgctaggtgatgaaagagataatcctaaggaatcattcaggtaatgctcaatcaactgtaggctgtcaattatgcataagttatcttgtatacgtgcatattagacgacagtggatatcaaaatctgtgaaaataaaaaacaaacagtgaagcacaacagttagtaggtagaccatttttggtgcaaagtcaggctgcttaaatacccaacagtttcatgtatggtaaaatatcaatttctgaagttagcagtgccttatggattaaagatgatagcttaaaaatgagaactaaagaaagtatttctggaagattacttacaatgcaggaagatcagcatcacatatggcttcgctgagcatgtgctcatgctcttggatactttgcttcatttcatgtgaaagtttttccatcccctcaagttttgctatgcttggatagtaagctcttgcaacaaagagctggtctttaagtctcttcactacagaatctttcatcacttccttgtgttcaacagaccaaacacaatagcttccaaattctagttggcacgattttatactctcatcaccaggtaaaccttgttcaaaattgtccttaggatcagcatcagtattctgcaacattaggtgaaaaataaaaagtatgtaatatatgataattctgcaagtccgcaaacaagttacaaaggattattgaaatgtttctttaaaatattgcaaaagcaaggtgcatatcacatgccctgctcagaaattcatgcgaaagcagcatatatatttactgcacgaacagacaagggcatgttaaaaataactgtaaagcatattagctcttacactcagtaatgatatatcatcaaagatcacgatttgtttgataggaaggcctgcacattacaagaagaattaaagctgtaacttgatatttaaaattttaaaactaaataagtggtcaaagaatgggccctgcttacctggatggattgaggtattgctaatcggtttgtcaatacttggttgattgttggtcccattgctttctgcatcagaattaccggtatttgttttgctccagtcctgtgaacgaacaactaaatcaattaggtaacgcaaaaaaaaattgcatgtttcggtagatagacaagattttcagatgatgcaatgcaatttttgggacatagtgacaaacagttagtaagttcaaaaccccattcagctctgagcctcttacatgccaaaaggaaagaaacagtgccttgattgcagtagaaatgcaaaagagggccatgtgaaacaagatccatgatatggcaaaagcagactgacatttccaaaaaaatggggccatggaccatgtattaaaaggcaattccactcaaacactacccatgagaccacaatcggcacgatagcaactcacaacaagcactctacttggataaaatttcacgcatgaacaaagagaaaaacagctgcgggcgatgggctcaaatgcaaaccctttcaatcgatggcggaaaatttgtcgtgtcgttgactggcagcctgtcattttcctgcgaaaaagaaatgcatcactgatctaaagataaattctcttcccgcagtataccccatcagtcatcattgccaaacctaattaggataaatacacctaaccacactcccatgtgattggaacatttcaggtaatagaacaaaaatatcccagaaatggcaatcatgagcacaccccctacctgcgatgtatttggctcccaaccaccaccctcgctgccgccaaacacctgtgcaacagaaacatgaggcaaaaatcttaacagcaatggattaaacaaatcaaatggcttaagcatgagctactagttagtttcaatctcaattgacactcaccgacacggcgctctcgtcggccaaatacactgtgatatcaaaagacaaaacaaatacaaacaaaatcgagtcaggggagcatagagagagagttgatgagcccctagatcgagcgcgagccggcgagccggacgggaagcccagatctgggagcggagaggctgaagagaaaagtagggttttggcaggggagagaggggtgggtggttacggactggacgggaagcgctggtggaggccgagcagcacggcgagcggcacgccgacggagaggaacagcagcgccagcgcggcggccgcggccgccacgctcctccaccgcctcttcgccggggcccccgcgccgccaccctggcccttcatccccgctcccccccgcccgcacgcacaggggggagc

SEQ ID NO: 26508 - DNA, 2940 bp, Oryza sativa
  unsure (1)..(2940): unsure at all n locations
acgaacagcattcgaccacccagcgaatccagctccttccacgagtactgggcctcgctgatggtgatgggcgtcggcggcggcagatccaccatctcgaacaccttgaacgccgacgctctcgggggcggcggggcttgtaaaggaggaaacggagcgagccttaccaccatgaggagataccccccggactccaccaggtagcgcacgacgactttcttcccgtggtaatcgcgaccaccacgcgagaagcgacggatcaccatgggcggtatctccaggttgcggttgaggtattcgtggaagcccggcaccggaaagacatgagagttgtcttctccggtgaggaaatggaaggctcccctgcggagtatgacatccttcagatttgttgcgctcatgatggtaggaacagaaatactcgttctcttcaacgcaggctgatgctgccccatgcgccagaatctatgaactcgcgggccggtctcctggcagtagtggcagatggcggcggcgaggcagtcctcgttttccggcggcgaagagagggtcgcggacaccgtcgcccaggacacgtaggggtaggggatgcggagtcggtggtgggtgcggaggctgaagagcgcgtagtccttggtctggccgaacgcgacgaacagccaccggccgtcgtaggcgccgaagtagcgcgcggcgcgcgcgtcgcccgggagcgggaggcggaaggcgtgggtggcgcatccggcgatggcgcacgcgaaggaaggctcgacgtcggcgcgcgggacgaggatcgacgggagcggcggcggcggcggcttctgcggcgcgacggcgacgcgccagttgcggcagactcggcccatgcggcgccggtcgacgtggcacgggaggtggctgtggatgagtcggaggacgtcggcgtcgagttcgcgccatggcgcgtcgtccattggagaggcgggaggcgcggcttgccggtggcgaggagaggaggcgagacgatgcgctgtgcgtgcgggattcctctgcttctcgaagcggaatgggatttttttttttttgagagggagaagcggaatgagatggtgggttggtttggaaggaggaggaggtgggccaccaaacgatagaactaggccttatttattgggccagtattcttgggcccgaaggtttgagtcgctgctgtgtgtttgctgtgtagcctgtgtactacaagaatctctcaaattcgactcatattttttagagtaaaacgacacagaattaaagtgatcatttcatcaggaattcaggataccgcagagctaaatgtcattaatctctcaaataattcttttggtcttataagaagcccataataaacgcttaaaataccagaaggattagtgtcgcgtgtgacagcattttagcacattacacccttctctctcttgaaataaggaatttctggggattccagagctattctgaaatctgaatcaacctcggttgtcatgccatggccccgtgaatcagtgattcacggcaaaagcattgcttggcattttagtataataagtaattaagcaaccaaccgtctaatgaactgttttgactgtaccatcagagatatcagacagattgctacaatattcagagaagtgattctctgaaaatgaacaacccttaacagatgagcagaacatcctctgttcagtagcagtgattcagtggacaaagcaataaagcacctaccacatacctgtatggttgtgttcaaaagattgccgggtcggcngaaagattcggtcgaccaatttcattaagaaatgaagggtacattacaattaaagagcttacaacgacagtatgctgtcgaaaacagattggggcaaaagcccacacccggtaagccagaaaacttctacaaattacaatgcatattacgtgatctcgctattgcacgttgtgaacactcctgccgtcttccagacgatgacctcttccttgatattttgcacaagctgttctatgcttcgaaatttctgttcaaagacacgcgcattgcgttcttcccacagcagccaacatgttagcgcgaatacactgtcgaagatgctcctgtagcccgtccgaaaagccatcctcgccttcatccaccaatgtgtgcttcaaaagatgatgaccacattggacaaataaccatctcacctgttactaatactcaactttttacatcatgtacatagtccaggaataaataatgtcacaggaaaaataaatccagtggtatcaacaatagtaattgcaaaagaacaaatagcacaggacagatcatttactactaggtaacttgagtaacccccatataacttatcttaaagcagctagtgctatcaagaaagctttacttcttgcacaggtagctcaaaccggtgcatgatgacgatgttatctcagtataacaaattaagaagctgagtgttgaaactaacttgtagcatccaccaaggattctgaatttctgactagatctcctcagaagagaattgaagcaactgaaagaaagctgcagaaacaattcctcctcattgaaaatccactttatatatgcagcatggtgcactaatgcaatccaacccataccagaaactaaaatacttgaagatgttatgataggtccagcattgcaagtacattgtactaactggattactggacaatcaacaactgcaaatatgtgaacttcagaagttggctcaaagaaaaacagaaaaggttcagagctggaacggaaacaacaaaaacagttcactgatcagcacgacaacaacatcacacggacgcctcgatgtgaggcaagcacatctcatccagatcgatcggcagaaagctcatcttacttgggaaaccaagccggcagtgagtagtagttcgacggtgatgccaagcttc

SEQ ID NO: 26509 - DNA, 1524 bp, Oryza sativa
aaaccaccgtatcctgttttccttggtaataaacacggtaaaacgcagcacagtagagtaattctacggtccttgaggatgtactaaaaatttagtgtaaaatttggtacctcatgatacctcataatacctaggtatcaagagataccaaatttacagtataaaaaatagtacctcatggtacctcctcaagaaccgtaaaattgctctatccaaaagagtaattctacggtccttgaggaggtaccaaacatttagtgtaaaatttggtacctcctttccctatagggattgaggctcctgttctatcactctgaatttatgggcaaaacctcaacaatatgacgaacagatctgcattccatccttaccacctttgtacgtattatgtaggagtatgtgtgtcaagaggtgaacggtgtaccataatgttttaccagcattccatccttaccacctttgtattatgtaggagtatgtgtcaagaggtgaacaatctaccgtaatgttttaccagaatggtaaaagcataagcatgaatgaatgctcacgcttctcgtatggaacaaaattcagctgactgctttgttattttcaatcataccacgagtctcttactgcctgccaggtgaaccactcgctggtctttctaaccaactaactgggctctgtaataatctttgctcagtggtgtgtcggtgcctgtttggatatatattgattatactgttaatttggtatcttttggtaactaggtagaacaaaaccatttttaatggattctacacatttttcttgatttactgagacttgagtgggattaaacggagctcggatgaattagttatgaattttagaagattcactgtgtttattactataacaaaaatccttaaataatttatggcgcaatattaaccagggctgacgtcagcacgggggggagtgcggcgccgacatgcggggcccactggtcagcgactcaagggtgagcggttcaccgtggaccgggaccacgcgggtggtccatcgccggtccacgggaccgacggcccagatcgccctcgggccgatcggacggcggcggtggaggcagccgccgggctcggctcggcatcaaagccgaccggccgacccggggctgacggcggcggcacgcgcacatcgcgttgccggcgacggcatccggcggcggaggcgacggcgcaaaagcgacgcgaaagcggcggcagtggacggcggcaacgaccaaaggcgacggcaagcgcggcggcggcgacgcacggagaatcgaggaagtaaaggaaaggggaaggagtcctcaccgaaggggacgacggcgtccggcgacgaggagcgacggagggaagtcgacacgcggcggacggcgaccgggacgacctaaagaacgaaacgaaagggattagagaggaagagaggggccataggaggcggggatgccggccgaaggcgggggacatggagaccctcaccgtcgcacgactggaacggttcttccgcgac

SEQ ID NO: 26510 - DNA, 1481 bp, Oryza sativa
ttaaatagggggagagggaaccggacgtggccgggagaggcgggaatcgccggccgacgcgggggagtggggagaagagagaggcgggattcgattttcgaatcccggccatctcgggcgcgggcgcgagcgggagagagaggggaatgggcgcgggagattcggcgcacgcgcgggcgtggtcgacgtggcccgggggaggcggagacgtgggcgcggcgacggttgcgggcgcggcggcgcgccgggatcggcgggaggagggagacgggcccgacaggtgggccccacctgtcggcgaccccgagagaggaggcagcggggcggcctggctgccgggctgggcctcggcctgcggccggcccagcggagaggggggggggaggaaaggagaaatgggccgacggcccatttgacaaaaaggaggaaaaagagaggaaaaagaaaaagaaaaaggaaaaaggattttccctggaataaaatattgcttgctcaattttaattggttaaaattatttctagagctctgaaaattccactaaaaatcctgttaatgaattttgacatgtagaactcaagaaaaattccacatgtcaagtccgattattatttgcattactttcttagggttttctcctgatttcacctgcattttcttggggtcatttgtaaattacaattttggcctaggaggaaaacttcggggtgtgacaaacctaccccccttaaacggaatctcggccccgagattcggaggagctggtgaagaggtgcggatgggcggctttcaactcatcttccctttcccaggttgcttcctcttccgaatgatgactccactgaactcggcaaaaccgggtaaccttgtttctggttctcctttcgctggtatcaagtatgcgaaccggcttctccacataggttaggtcctcctggatatcaatgtgttccgaatcagcctgttcttcaggtacccttaaacacttctttaattgggacacgtggaacacgtcatggatgccgatcatattggatggaagttctagctgataagcaacttctccccttcgttccaagattttgtatggtcccacgaagcgtggtgccaacttgcctttcgtctgaaaacggtgtactccccggagcggagtgacacgaagatacacgtaatctcctgcctcaaaagtgagctcccttcgacggttatccgcgtagctcttctgtcgagactgagcaatcctcaacctttccctgatgattctgactttctcttctgcttccgctaatacttctgttccgaacagttgacgttcgcctgtctgatcccagaagagaggtgtgcggcacttccggccgtataaagcttcaaacggtgtgtcacgaccggaaatcacccaacaggcgttcctgacgtgcgtgcattattccttgtcccaggaggcaaggtacaccaaaagttgatacaattcagagtttaacaa

SEQ ID NO: 26511 - DNA, 1037 bp, Oryza sativa
aaacatatggtccagacccattgtttatctctctgtcaacttttcctcccatggaggtaaatgcaaacatggagttatatactctgatattgtccatgtagttcctcgatctctttcctttttctttgcacatcagatttgaaaggtaagtaggtggtttctttagtgtaggtaagtcaaccttgccctgtttgcagcataagctaaaagaaggtggcccttttcctttgccacgagttctttcttcataccaaaaaagtgcaccacagtgttgacatgtgcatgtaggcttgccaaaattccattctttcacgcttgattttttcttcttccttggtggtacagcaaccttattccttgtaatgtttccttccttacttactcgatcattcatcttgagactggaagacaaatattttttttcataaaaaaaaagtgatttaaaaataaactgaatgacgatatcatttttataatgtggttaacatacctattcgtttccatgttggttgatgggatctgatatttttcttttctagacctgattttattcatatcacagtcagtgtttattcttaaataaggaaaaatttcctttctaacaattttgttgattttctgtatgtttacctttcaatgtgatttgctggatttgaacaggtcgaactgttgttcaatgtagatccgcttcttctaaggtcaagtttccttttcctgttcagtcttgataagcgtgcgagttccgttgagtttacttcagcagtgaagttcgagctgtgaaaattggatgtcaaaacagggagataactactttttttgactgattctgatgtattgtgcctattcggaaattaattgttattaaatacatacgcttgaactgttaaacttggatctgaaaatcagttcataattgttgcggttgaaataaattgttattaaatacaggaccttcataggtaattgtattcttcgcctataattttacctttgcaggggatttcctgtgtctgcgcttgactcattgttgctcattt

SEQ ID NO: 26512 - DNA, 1334 bp, Oryza sativa
tatattttttttattgtacttgaaaatagattgcatatatatattgtcaaatttctaattagatattttttgcctgatttttacagaagttaattaaattattgtgaaatccatttaaatattacacatttggaaagttcctttgatgcggttttatttagaacatccaaaggtttacaatcatcctaaggagattcattatattttggtaaatactaaacacgtttcattactgaagtactgataatagactgagggctcatttataaattaaaatccactgcaggaccaaagtgtaaaattgcaggcacatcgttatctcctcccaagcccttcctggccacatatctgcgctgcggtcgcgtttgtcttcctgtcccgaatggccacatgagggcgaaggccaggcggcggagaatctgaacatatattcttctccaatctatctagctcactcatcactaccttctcctccactactcatccatcggagccgatttgagagggaatgccttgtggtagcgacggctgaaagactggttggctagatccaccatagggcatccaagtcagtgccttggtagatccaccgcaggatgtctagatcaggagcagtgttagccatcggttagttggctctggtatgggaggtggtatttgtaggaaatggggcagtggggatggcaggtgttggggcagtgcggatagcaggtgcagcaacatcaagcatggctgagagcgaaggtagccccgagagctcatctttcttgattgatttccattttacataatcaagtttttttaatcattaagtttcttgcttggggatttgtattaattaagaattattaaatcaactgatcttgttttatatgcttttaggatatcaacggtagaggaagcaagcagggatcgactcatatacatgtactgaaggtacatgcatgcatttatattgaatgttattaactctctatcttagaaataaacaaagtaatccaaggattcctttggcaagtgcaagttgtacgttacatctgacaatatctaatgaacataaaaattaataggaacatatataatactattcttcaataaaaagtattggctgaaccctccttttaattggttcttttgggccttcttgacgataaattacctgcagacgaaagtccatattattataatttactaatcaaaccaaatctaaagcaccaacattttcccagaagtaatatgttgtacctaatatgagtatcgggtgggtggtcttctaatccttgttgatctgcatcgactggattgctcattcatgtgaactttaatgttctcaa

SEQ ID NO: 26513 - DNA, 7455 bp, Oryza sativa
actgatcagatggtttatcacctacttcagcaacaattgaagattgttgctgctccatcccatccataggagactcatgttgccccattgtttgcgcctccaaagaccttgttttcctcctagtataaacttgtagattttcttcttcacgtggccttctccaattttgctcatgaatgggttcactaacaggatatgggattgagccaaccacaaatttcatgcttcttgattgtgtgtcttcttcagtacctgatgagccattctccccctcttgtccatcctcatcaataattggattgtcaagatcaacaaacaaggaactcaaatctgttctttctccatagaacggaacagactctctaaaagtaacatccatactaacaaaagttcgccgctcagatggactccaacatttatatcccttttgcccagaagagtaacctataaaaatacacttgacggctcgaggatccaattttccaacggatggtctatgatctctgacaaaacaagtacacccaaacacttttggaggaacaatgaattcattcttcccaaacaccatttcatatggagtcttcatcccaagtattcgtgatggcatgcgattgatgagatatgttgctgtcatgactgcctcactccatagaaactttggtacattcatcgtatacatgagtgaacgagttacctccagaatatgttgatttttcctctcagctactccgttctgtggaggtgtgtcagcacaagaagtttgatgtactattccttctgctgagagaaaactcctaaattcatcattcacatattctcccccattatcgctcctaataacttaacacaagtgttaattgattcctaacccaagcatagaaattcttgaaacatttcaatacttcactcttgcgtcttatgagatatattcaagttattcgtgagtggcaatcaataaaggtgacaaagtactttgctccacttaccgaagcaataggagaagtccatacatcagagtgaaccaacacaaatggcaaaatgcttcgaagtcctctgcttatgtatgtggttcgtgtatgttttccatactcgcatgcatcacacattaatttgattttgtccaccttactcatctcatcaggaaataccttagacatagtatcaaaggacatatgtcccaattgacaatgttttagaatcaatttagcctcctcttcacttgtgctagctaacaaagcactacatagtgctttgtccgtccctcttctatctagataccacaacccattatgcctaacgccggttccaagctttcttccagttcttctctcctcaattagacaattctctcggtcaatagtaattcgacaatccatatgatcaaccaacgagcttacggatactaggttaacaggaaaagagggagcatataaaactgacgacaatgtaattgatggagtacatttgactgttcccactcccctcacatgtcgtaaagttccgtcggcagtttgaattgtttctttaaatgatgactgaaatggagtatatgatgtaaactcactcgacattcctgtaacatgtctagatgctccggagtctaatatccaagttgagttaggtacctgcataggatgtgcgagattaacaaagttgccaagcactgttgttttctccttcactttctgaattcttccccttatttcttcaacttcttcagccaatttctcaagtatttgctcaattccttgaatttcccccatggcagatcaaccaaatcttctaggatactagccaaatcaattaataggagtaacaacactactcctcagtttctcaccaaaaacagaacagcagcagtagcactacttcctcccagcagcactacttttcagtttcccccaaatcagcacaacagcagcagcaagccaagctctcgtactcagtttcttccccaaatcagaacaacagcaacagcaaaccaagcttccgcttcacctccaaatcctcaccttctcaagtagcagcagcaccagcaacagcaccaccaaagtcaccaccactggaacggacaacaatagccaatagcaccaaatccttctctgttgatcctacagccaacagctgcgcgtctctcagccgctgtgctccctacagcttgtgctgcaccaaatccttgcgcagctcaaccagcgagcgtgcgccctgctcctccttcacgctgctcgcgtcgagaacctctgcagcagccgtcgccgcctccgccgtcaacactgccgctccgcctccgctgtccgacgtcgccgctccgcctcagccgtcgacgtcgccgcagaacccctctggtcacagcgccgccgccgactagggttcgcgtcggcgaggtcgccggtgacccagctctgataccatgtagttttgtgatttttcctctagaagcttcacttcatttcctttctcatctactatacatatacattggtggaatgggccctattgggctgaaatacacacgcctacactcaacagttaaagatggaaaatgtaacagaaaaaggttttggagttaccaaggtgccaattgatcattatttcttgtgatacatttcacttgtcccatggcatctagttccagcaggggtgacatttgcaatattatactgatgttctaggtgttcacaatagagctcaaatggcacagcatattccaactcttaaataactttgtgtatgtggtgtgctagtgcagaatgatatccgtaaaaatccactatttagacaacagttccatgagatgtgtgcaaaagttggagtagaccctctggcttcgaataaaggagcttgggcagaacttctagggattggtgacttctactatgaattgggttggtaacttaatttaagctatcttatttattttgatcctggaagtttctttcttttattattggaccatttatgttctgcttagcatctgtgtctattgcaccaggagttcagattgttgacatatgcatagcaaccagagcgaccaacggtggcttgattgacttgctagatctccgtaaactcctgtgtcagaagaggaaagctgatcttggatccttaacatcagatgattgtttgcgtgcaataagtaagctgaaggcaagtattttaaggaattctacagctacatatttttttggaatcttataattgcattcatgccagttttacaagatcgcactcgaatcgattaattcttggacagatctgttaattcttctgatccttcgcttgtgaactctcaggtccttggtagtggttttgaagtaatttctgttgggaagaaaaagcttgtacgttctgttcctacagaactgaataaagatcacaatgggatacttgagctagctcaggtttgtaatcacagcttttaatagtgtataatactacagtacacttaacaagtatgtggatgctgtcataaccttatcatgcttgcaccgaacaagtatgtggatggtgtataacctttggttggaagtcgtaaagccctatatattccacataaacacttgttttatcatgcttatttcagtcaacatagagacatagcacaaaactatgttaagccaaagctttcaaattgctgccttgctcaatctgtcaccttgccacaatatgaccatacctgcccagttataacatcattcacatgcaggctgaaggttttgtcacagtagaacaagtcaagagaaagttctcgtggtcaactggccgtgccatcgatgtccttgaaactttgctcaaggtaaatcctgctcctgcatttccactctttaggccacctttgtgcttcatttccgtgcccaaagaaaagaaaactgacttcctttgatgcaagttatgtattggtgattagaattctctctgttgaatccacgcttaagccattgcaggattaccttctttttgagctgccatgtataaataaagtacttttcttatgtgcatctctattgacacttgttatgaacgtctttggcatctatatgcaactctgatctctattacacaaacaggaagggcttgctatgatcgacgatgggcacagggatggcaagcgcagatactggttcccgtgcgccactctcagttctgactcgattggtgccgatgccaagtcatgacctgttccactccattgttgtcacctgtatccttttttccattggttcatttctgtacagctctggaagaatcacgagatagcaatacactttcagtgctgggctgccggcaaaaatgttacattgtgattcgtgcatcaggcaggattctgaacgtatttgtactagtggtctatactatactagttcttctttcacgaaattctactcgtaattgtaaattttcaatgctaatggcctcatctttcctcatattttcgcttatgtttatgccatcagctagaatttgaatttttcaactttaaatttagagttgattttgagggtttttttcattgaagtttatttccagccacgtatataaaaattctatttataaattatttttcgtttgtaaatatgggtattccacgccgtaagttgctaatgtgagcaagagaaatgctcgcaataaaaatgattaataaaaaccatattcattcggcccacgggcctcagccctcaaggcttctaccaatgacaattgacagccggacaggagtaattggcaagaagaaataaaagggaaaaaagaggcggaaattcatttttgggaaatggccaccacagaggcgaagcgccggcggtgattcctcctcccctactccggcggccgccgccgactcgtcgttaccgtcgctagatctcatccctgacatagcccgccgcttgacgtccctggaggatttcttctccctgcgcgcctcctaccgcgcgctcctcccggcgttgcgccgcctcctcgcctcgcagtccccgctcctcctcgtctccctctacccctccttctccgaggcgctcttccacccgcgcctccgccgcctccaccgcttccgcctccctcccatgggggcaccacctgcccccctcacgctacaccctcctctacgcccacggcttcctcaccaccgccgccaacaactacccgccaaggctcctcttcacctgcgagcagctccgcctccccaaggtcttcgcacccttctcccgcgtcatcctcacggcggacctcctcgtcgtcatcttcttggccggccgggccaccgtccagcactgccaccccggggacgcgctctggcgcgtggcctccgcccctgcaccccaagtgttcgacgatttgatctctgtcaacggcaccctctacgcgctggttggcctccgtcttgccacgctcgagctgtcggagagttcactggagctgtcatttctgggggggagagcatgatgacgcgaacaggccggagggggatcatcggttcatgctccgggagtgtggaggtgaggtgttgctcatcagcgtggagcatgaggagagggttgtgtaccgcgtgttccgttgggtgtctgacaaaaggaagtgggagatgatcaccaacttgggcgggcggtcgctatttcttggcttggatggatttgcagcttgcgttgatgatcatccaggggttcgagggggctgggccacgcttgggtgagtggcatgagtattccttggctgatggaatctgtgatgtctgcaatgctgactatccaggctcaccacccctgaacaaacagttcactcatcagaccatcagtttggatcttccccagcttgtgctgatgcaagcctgagaagggttcatcctagatcaatgttgaagtcctattgctcagttgctcacaagagaaaaaaagaatggtaatgcttgatcattagcttgcttactaggtcatttatgtaaacaatatattcatacggtgatcagtacttgcatcttattcgaccagtcaattgttgttttggtcgatatagtgaatacttttccttaggattttgaccacaggagcaaaataattttgttcccagcattgctttatgtgctatgcaacttgttgagatattatgaagcttcttttgcgtttattttcctttgatactgcagtaatagtgagtaaatcacataatatatcaaggaatatgctagtaccataatgttaattggttatatttgactatgtccctgtgcagaatctggaatttgcatgattgtaacttttgtagggtaggcagtagctgaattcttaaccctgtttgttttgtgatttatacaatgctgcaaatcctgcggagttgtcacagttatttcagtgatagtgagaaataaggccaggaataacacacgtccaatggacaatatcataaattatagttgatcatgtttttgatttgtactcctaaaaatatgacatatgccaggtcttagaaccgcttatgtatatgattttccactcctataaggctataactgtaagtttcattcctgatagaaacctgtggtgtctgacctccaaatagtctacgcaatcagtagttggcagcaagcagatgtgaaggggttgggcatgctcttttctggttcatcagtttacgctttatgtttaaagtgttcttcagttccgtgttttaggaccgcccttcagtttattcttttttcgggtctcctgtctctcccttccttgttcttgttgagtgctgacacaagacacaacttggttctcttgtggttgtctgttttgctaggtcccttgctgtttctctgtcttaatacgaagttaagccaggcttttgcgtgcttcctgtatttcagaactcctcttattatctaaaaaaaaaactcttattattgacttcagagggatttggaacaatttcaagtttgaaagcatgattcgctgtacatatggacctcaaacatatgtctgtgcaatgttacctggcatctcattttgttagcacttgtaaacatgaagtctggttacctgcaattcttaagaacggtcttatgacctctgactcgtgtgcaggttttcaagtttattttttgacctttggatggtatttgcaatgagattcagtcatatttccttttacttgattcagtcatgtttccttattacttgaaagttgaaactaactttgagaatgatcaaaacttcaaatacttgagatcaaaaaaaaaaaaacttcaaatacttgctctacctacttggtgtattgatatttgcatgtgtgcccaagaatgttcaagtgcagcatcaatttgtgccaggatgccagcgtaactgagtgcatgtttgcgatttcaagtctgtcgatgacatacacccaaccagagggcctgcatagttctgcattattcactattaagaggagtcttatttaccaatcatatactcccttcgtttcgaaatgtttgacacc

SEQ ID NO: 26514 - DNA, 18677 bp, Oryza sativa
atgtgctaaaaagtcaacggcgtcaaacatttcgaaacggagggagtatatgatcgattgatcgatcgatgcagctgtggatgagcaaaacgagtacgtactagtcgtcggggtcgtcggcaacgactgcgtcccgctcgcctcgccgtcaccatctaaatatccaggttcagtgatgggattcagaaattgctaaaaaaacagtctaaggtaaagattaactaatgaggtgttaaatttgtacgaaatttacatagtaatttaattttttaaaaaaacattatttacaaatggaacactccagccggccagagtccagatcttaacactcccttcgtttctaaatatttgacgctgttgattttttaaaatatatttaacaccattcgtcttattaaaaaaactctcaaaaactaaactaaactcttaaactcttaaaaactctcagaaactcttaaaactaccagctgacaactatcagctaatcccagctctatgtgtcctcgagcttcttgtcctagacttcagctgctctgctaacatgatccaacagtcctacctcctcagcgtgtcctaatatcttccgctgcaaaaggtgagaaacaatttgaaaagggagcattagtggtgagtaaaccaatttagatctaaagatcatattattcctagtagtccagaggacccaacatacagcttcccctctcatattcagggatggccggaaaggcacatctgcggggtttctggcatctggaaattgctcaaccgtctatcactctgagacaagaaatgggcacacatcagccacatttgagatttggcacacctcaacttttttgtaaagcaggcaatcatagtgaaagcagcaggccaaccactcccatatactacctccgttttttaatagatgacgctgttgatttttttctcacatgtttgaccattcgtcttaatcaaaaaatttacgcaattataatttattttgttatgagtcgttttatcactcatagtacttttaagtgtgatttatatcttatacatttacataaaatttttgaataagacgaatggttaaacatgtgagaaaaagtcaacagcgtcatctattaaaaaacggagggagtatccaattagagttcaccaaggaatgagacagagagatctagagggttcatgtaaagatcataagaagaggtgaaccagtataataaacagccagagcagaaagcaaacaacctttggaaaccaaaatgagtggtgataggagaactagctaactaggatcatcttcttcattatacagttccaaagatgatcaccacctacatggcgatctagagtctagacacaccatttcatgtacaaacaaagctgggatccatggctgaactagtagggtacgcctccagcgcgaggggactgatcaagatgatcatggccaccgtgcagacggcgaagcggaacaagaagcagtgccgggagctggaggagcgcgtcaggatggtctccgccgtgctgagccgccaccgccgccatgagctgcagccgagcacgacggagacgacgatggcggcgcggctgccgccgggggcgagggaggcggcggacgggctcgacggcgtgctccgggaggcgcacgagctcgccgtcgcgttcagccagagcggcggcggcggcggcaagaagacggtgcggcggcgcctcgtctgctgggcgcggcgggtggtcggcgcccggcgggacgccgagaggctcgccagcgtcctgagcaggatcgacttctacctctcgctctaccccgccattgcccacgcagacacggcgtgtcgcgtggaccggctgctgtggacgaccaccgtgaatgtcgtcgtctccgccgccgtcgccttcgccgggtttgttgttgtctccatctccatggtttcacgcaagaaataatctgatcgacggacagtagtgcaaaccctggctgatatgtattgatacgtatgtgtgtgcaaaagaactctcagtgtagtcgctttaccgcgagttgcatgtgcagttatgggaatatctatacatatttcccttttttattaggatacgataaggccaatagttctaatgagcatctccgagagagatagtcagccgtggcgatgagatcgataatgatgacatcaaacaggtaagggcggaacatgaccagaatataggaccaagcataatgaaggcggttgaagagatcggaggaggtagcactacgaacaacgcagcctatgcacatggggatcgtggatatgccgcgccagggaaaagccggtgagcatggtgtgacgccgtgaatgtgcatggccgaggacgacaaggtcatgaacggtgaatataagttttgcgactgtggtgtatgcaaagacacgtacaatacgtgcgaagtatgactatatatgcacaagtagtatacatgtggggccagcaattggaggttggccggcctaacacatggggccaattggccccttcttaggttaattggccacccctttgttctgccggccatcctgccatccattaatacggttgtgactttagacggcttggcttaactcttgacgtggattggatagtcggtttgaacaaatggtcagggccggctggacaagagatgggccgtcagcctgtgcagtgtggttagccagcctaagcggctagcaggggcgaatctagcatgaggtgacggggactcaagcctccactgttgacaataggaccatgataggtcccgtgaagcacttactagaactttttgtcatataagaggatctaatttattcagacttcttattatttcaccggtataagtggtggtaccctatgggaattagcttggatgcattaactcgttaaaacaattgtctaccataacgtgtttttaatccccgagacagaaatgtttgctatggtaaagtactcgtaggatgcaaatacgcaatcctacaacccgcatagcaacctgcttactagcttattttctattttctactataaagtttagaaggaaaaaaagtaactaaaattatgataagcggtaaagaaaaaataaaccgcttcgccacgctttgcttccgtacggtcatactttgtgattataaactctgatggtgacgtgttaagccgttgaaacagttgtgtacagagattttaggttatttaaccaagcacttttggctagacaagcttggagaattatagatagaccggagagtctgtgtgctcgagtgctgcgggctaaatatttcccatctggctcgctagttgatactaaatgcttcacccggatggagggcaatagagtatggccttgagctactgaagaaaggggttatttggagggttggcaatggtcaacagatcagaatttggcgtgatccctggatgcctagatgccattctcggaggcccataacgccgaaaggtacctgtagagttaagtgggtctcagagctaattggtatggatggcagatggaacgaacaaatggtaaaccaaattttctggcctattgatgctgagatgattctgaaaattcagctaccgacgagggaagcagaggatttcctagcttggcatccggatagactgggcatcttctcggtaagatcggcttacaagctgggcctttcgcttgcaaatgtggatagcagttctagctcgtctgagattgagaccagtaaggcctggaatctgatttggaaatgcaatataccgcaaaaagttaaaatttttgcatgaagagctgccaccaattgcttagcaaccctggagaataaaaggaaaagaaatcttgcggtgtctgatgtctgttgtatctgtggggtagagaaagaagatgttgcgcatgccctgtgtcgctgcccccaagctaagagactatgggatgttatggaagttgcagggaagaaagcgaaggatattgtcggaagttatacaggtgcaagctggattttggatcagctacagttagtaccaggggaggagcaaccgaagttcctgatggtactttggcgtacctggcatgttcgtaatgagattacacatggtaaacgtccaccccccattgaagcttccaaaagattccttgaaagctatctctcgtcattactggaggttaagcaacatccccgagcggatttatcgaaagggaagcatgtaattcagtatggacagcagcagaaaataaacctcctaaaaggaccaatatcagctccctgtcgctgggataagccacctcagggatggatgaaactcaatgtggatgggtcctttgttcctaacactgggaaagggggcattggcgcgatactaaggaatagtctgggagaggtaatcttctctgcctgtgggtaccttgggcgatgcaatggccctctgtaggcagaactactggcatgtaaagagggcctcaacatggcccttcaatggaccttcttaccaatcatgctggaaacagattgcctagaagcaaagaacttgctttgctcctccaatagtgagagatcggaagttgcttttatcgtcagtgacatcaaggaactgatgtctgggaatagggaggttgtcgtcaagaagattcaatgaaatcagaacaggattagtcatattctagctaacaggggccgatgtgactctgtcacggagttctggccggataatagttgtaactttattgatctccttgctacagaggagatgttagctgagtaatataatcctgttttttcccacaaaaaaaaaaaacagttgtgtacagtagccccgaaataatgcgaaacaatttatgaaaaaggaaagaagagagttgggccatgttgagccagtgggcttgggctgctttggttggaagagctagctagcaggtggatcatgcgtgcatgcagcaaccggccttttgccttggcccatttcgccggcagcagcagcagcaaagcaatcagcagcaggaaacgatttttttgtttttatatttattttttaaaaggttccaaaaataaattcccatttcaaagttttacataaatataaatcatcctacagtaggacaatttatatgtcgtggcacctcacgggggaagcgtgccgtggaacaggtagccccttctcaccttcttgtaggaggatttatcatcggaagggagccaccttcaaaattatcatggcgcgtcccatacatcaccaactaaattgcactataggagaatgagaaaggaccgcatgcaaaattgctagtatatcacatggcctgtcctaccgtaggacgatttacattcctcatcataggtcacataacctaccctaccgtaggacaatttatatacccaatcctagggtacagcgggagtatatttttttaaaaaacggtaatttatattcataaatctttttaaaaatcaatataaaaatagaaaattcatcgagcaacaccagagcagcaacaacatcgtgctgtgatatttgtttttagaccgtgggagtagttccctagtcacggtcacccctcagtccctcaccactgcgtagaaaaggaagaggtcacgatcacggacgttgaatgttcaagggggttatggcacctgtcactctgacttatcacttcacttctcatttctcttatttttttaaagataatttctcatttctcttattgtcagcataaatatgaattccctccgttccaaaaatataacatggattatcttatatttgaggacgaataagtatcttagaagaattgcaaaatattgcaaccaagaagaaatatctcaagctggtattggtattatcacatcaaaggtaattaaacgctgaaagtagggaaacacatggcagtatttacacatggaagatgtttacacacaaacacacttctttgggttgtcgctagcccttgataggagccagcaggctagctgacacgtaccggtctctggtagtactaacagagacagcaagctactaggaacagagtaacaagataagatagcaacatactagataattaattacgtattagataaccacaaggaccagcaaacgtggcgtgacagagagatcgaccagcctccgatcaatgggattatttagttcagcgatggctgctcctggtctcgtcgctgtacagcctagatgatgagaagatgaacaggtcaatatgatgattcagttcaatttaccaatcatatatatggagatatagatcgatgcagctgtggaatatatggagtattagttcggtcgaaatttttcaaaatttttaatttttttcgtgaattttgataatatttgttcaaaaatttcggtgagatccgatcaaaccggctaaaccgaaaggtttaaccctgtgcagctgtggatgagcaaattataagcaaagcgatggataccagtcgtagacggtgggggagttgggctgcgggcggtcgaagaggttggcgccgaggctcttggtggcgaggttgctccccgggtggaacacgctcctccacacgttgctgccccgcggcgtcgtcgtcgccgtcgtcgtcggagacgaagacgacggcgtcaccggcgtcgtcggggtcgtcggcatcgactgcgtccgcttgtacgccgccccgctcgcctcgccgtcgccatctaaatattcagaggtttagtgatggatcggagtcagaaattgttaagagacagtctaagatttctacgaatttatacatggtaatttaaaagaaaaagagcatgatttcgaaggtacaaatggaacactccggccggccagagtccagatcttaacactcgttaatatatataagcaatatttctggttacgacgctcttttaaatttgttgccgtccctgcttgtttgcttaataaaggtaatatattttctctgtttcatgttatgagaccgttctttattttgaatatcttatatatagtccaaatttatattgatgttaatcaatctaaatgaacgacgaaacgaccaaaacgtctcataatttggaacgaaattatattagcttgttagttaggagtagtaagcatctgtacaacgacgtaagctacctttgttgatgacaagggggcgggttgtagcggccttgcggagcttctccaggccggtctccggtcgaggcccggccaccacgtcgtcccacagcttctccagcatcttcctgatctctgcttccacgcactcaacaactgatctctctcttgcaactttacaacaactcactgcctcccaagtaattgagctgagtgtgtgtgcccctccttaaatcattgagtggatatgaccaggcgtcaccgcaccggctggtcgtcttaccgcaacaatcacacccagtaccttccacacgattttggccgtatgcatcggattggatgtggaggctaaatttatcttttttttaaaaaaaataacctttcacgtttcaagtataaccatatttgtaatcttctcttcatgtactaattatgatcacacgataactataaagatgctattatgtattatcttcgtcctaaaatataaatataaaatattttacggttgaatatagttattaaaaagtaaatagaactaaatgttaaatgtaaaatggttgtggttgagctagaagtgaatgtaactagatagatgggcaaattgaatggtggatgatgataattatgattggctggaaaaaaaatttggtggagaaattgttatattttaagataaattctaaatgttaaaaattattatgttttaggatagatgatgtaatttttttatacatttaggtgtatatattgatttccaatttagatgggggaaatagataacactgctttcagaatgctgtatataccagtgtgttggcttagagcaagtctagtagtacagtccactactagctccaattcatttatagccaattcatataatagttgcttgctatactattaatatatggtcccacctatcatatacacagtgtgtcttgaagttcgtgctgcagctggctacaaatctgtagcccgctactcttctctctcatcgtttatctcatcaaaatatggttatagttggctaatagcctgctattatacctgctcttattacccatagaaagagactaatgatggggctactactgtggaagtgtggagtggccactgtcctttggaagtttgttaatcactgtcaatgtggttagctgcaccgacggtgagcagaccgaaagcacatcttcaatgatgactcatcgttaacggataaggatgaagcttttgggtcccaccccatggggatggcccacggcccgagagtgatgtttccgatctgacgaaaaatatctaaactgaagatttcagtatttcttccggctccaaaatatggcaacataataattatgcagatttgtactaatacgacttatcgcatctagtactcacggttgataatatcgtttaaacttatcattttagataaatgcacgatctagaaaagataaattttatcattatattttattacaatatatatagaaatattaaattattgatgtactttataagactaacctatgcatttagtcactatatttctaaccaatttttttttaaaaataatagtaataaaaataattatgtggtaaatatgggtttaaaattagagaaataggaaggacactcttttctggagtgttcagaggtggacgttgttacgttgttacggagtctacatgcggacgtccaccgtgatttcgtaatggtcaccgaaattttcgatcgactgatcgccgtttttatataaggggtatcgttttcgattgtaccgtttttagctatttataaattttattttgtctactatattgagtagtttaaacgataaatatggtcaattaccgatcaatcgaacgttgttttcgaaaagatgctaccgattccgaccgttttcacatacagctgcgggtgtttttttcaaaaactgatagtatcggactgataattgtctgatagtacaagaaagggaatcaaattcgaataatttctcttggaaacatataaacaaatacataccagtaaggctgtgttcgggaggggttggaacccctcctcccggcacgcaaaataaaacatctattattgtatgattaattaagtatttgctaattttttggattaatatgagttttttaaacaacttttatataaaatttttttataaaaaacacaccgtttagcagtttgaaaagcgtgcgcgtgaaaaacgagggagggaggtagcgaacggagcctaagtatggtatccggtggacactggaatcagtcttgttgaagttagatcaacaagattgaccaaatttgtgattccactgtccatcggacacatcacaaattacggatgttggatcaacaagaatcacaaatttggatctaacttgttgaagtttttcaaacttttttcataatacagtttagaatccactcccatctcgcatcacacctttcatttcataaatcattgtgtgcccaagccaagccaatggcgacgatccggattttggtctagtaggggtcgtcggtatcaatgtctgtaccggacacaaactagccccccccccccccccccccaaaaattaagaccgtcgctcgctgagctccacgacatgctccggcgagcatggcgcgcgagctcgtcgaactcgatcgaattgtgcagaaacgggtctcatctgatctgatcatctcgtgtgttgcgctgggccgcgcgcgccctaagcgacgcaacgatgatggcgacctcttgctgcgtgccacatcgaccaccagtcaccagatggcgtgtgcgtacgcgcgcgctcgacgtgtttgcggaaatgccaggccggcgcgcgccgcggcgcggccggggtagcaagcacgtacgcgtcttatgttacgcgctagcttaggagctaggtgcatcaggaaattacgtacaaaatgcacagcggcttactctaatactcgatccagtcaatttcataattcaggaaatttaattatatcgatttccaggacaggtttttcacaaggacacagggggcgtacacgtataatcgtatatgcgatcagagtatatatacgcgcgttttagcatctgcttaatcaggtcagccattttccttctgtttacgaccatttcttttgcttaatagttaatcagtttctatacgcgcgttttccatttcttttattttgctaccacgtcgtgcgtggacgatgccatcatagtgtcgtcttggagctagtcaacctatttgtgtcaccgctatacatgtactattataccagttcattagattcacgatgtattttctatatgaccgaacaatctattatataattaaagtaatagaaaaaggagcctccatattcgctctcacggcttagaaattctcacattaatcgaaagaaaataagagaaaaaaacaaaacaccaagtgtattaggattagaattctcacattaatcgaaagaaaataagagaaaaaaacaaaacaccaagtgtattaggattaggtcatgcaaacggacaagaaaaattaaaagttaaaacggacagaacaaatagaaaaaaaacaaaggatattataatgatagtgtgtaaacagataatgattctttggaatccgtatgagagaaccaaccataatcatattctgcatgcccatatgcgtgggccaccatgctatttatattattaaaggaatagaaaaaggagcctctatattcactctcatggcctagaaattctcacattaatcggagaaaaagaaaaaacagagtccatatagaaatacaatttagaaatagctgaaattcggaattaaaaaataaggaatattagaagaggagactagagtctatatagaaatacaatttagaaatagatgaaattcggaattaaaaaataaggaatattagaataggagactagagtccatatagaaatacaattaggaaaaaactgaaatttgggaattaaaaataaggaatattagaagtagagtatagataccatatagaaatacaattaggaaataatataaattcggaattaaaaataaggaatattagaagtagtgtatagagtccatatagaaatacaattaagaaaaaaatagaaattcggaattaaaaaaataaggaatattataagtagagtatagagtccatatagaaatacaattaagaaaaaaaatagaaattcggaattaaaaaataaggaatattagaaatagagtatagagtccatataggaatttaaaactaactaaaattcagaataaacataacaaaattaaaagtagagtttagagtccgtataaaaatacaatttacaattaactaaaattcaaaattaggaaaaaacatgggaagaagagtttaaagtcaatataggaatacaatttagaagtaactgaaattcaaaattaaaaattaaaaataatgaaagatgagtttagagtccacatagaaatacaattagaaataataaaaattcagaattactagagtccatgtaggaatatatataatttacaaataactaaattttgatattaaaaataattaataactaaaacatatataaaatacaatatgaatattacacatcagtagtttcataaagttattgcaaaatttaaaattatgttgtcatttttatatatttgaataatataatgagaaaacatatatactattatatgagagaaaatataatgatgctagccgcgcaatctgcgcgggccaccatgctagttctaataaaataatgaagtttatacgctccccgcaaaaaaaaagaaaaaaagaaaatgaagtttcacgcgtaaaatatttcaacacacttctccaggatgccttaattccgaattatccagagtgatcatcagaaataagagatactaactatttcttgcaagatactataatcactggttctagcaaattaccaagaaacaacataacgctttccttgcctcaacaatcgcgtatcgctacatacatatatatacacatatatgacaaatgtttctgttcatgtgtaaatagttgttccggcaatttaacctgtttgaaatcaagtctcgagaatttgattaggatcaacaaatcaagatagaaattaagtttgttttgatcaatggagacccttagcctggtgagcggcgtgaccaccatcgtcaagctggcgaacgacatcgacggcgcggtcaaggcggcgagccggagcaagaagagctgcgagaagctcgccgagcgcgtggccgacatcggcgacctcctcaagggggtagacacctcctcgccgtcgacggcggcggtggccacgaggaggctggtgggcaggctggagagggcgctccgccgcgcgctgctgctcgtcacctcctgccagtccaccagccgcatctacagcctcgtcgccggcgggtggcaagccgagcagttcgacaaggtgaactcagagatcgaccggtgtctcctcgacctcagcctctccagcctcgccctcgtctccaccattgatcacaagctcaacgccgccgccgccgccggtgaacggaacaccgtcgaggtcgtcgcgccgcccccgccggtgaagtgcagtcacgatcatgatcaggatgacggcgaggacaagatggcggccggcggcgcggctgagaagaatggcgagcttatctgcttcggcggcgagcaagacggcaaggctgagacggacgccggcgaggtcaccaccaccaccaccaccatcggtgtgccggcggccacggcggcatacatgcactaccatctgtcgcggctgccgccgccgcggtgttacggataccacttgcattattgccactgcacccatggccactgtcactgcgccggcggccgccactactcgccgtcgtactactccgacgacagcgctgacgtcaggctccggcatatgttcagcgatgaaaatcccaacgcttgctgcatcatgtgactctgagctctcaaacgtgataggccaattagttagaaaactaggaaggtcgcccgcgcacatgcgcgagcaccttatttaatgctgatttagtttttattacgaatgtttaattcttttagatatactcattttattagtcttactaaaatgtttgaatgtttctatttagaattaataattttttgttcaatttacatttcctttcatctcttttttgggagaattccactctatgaagcatccttgaaatgctttgatcactgtaattcgggatgaaaatatgtgggttgatcccatagcacgacatggggtaaaggtatccattctaagttatctctttccaattaagtaagaaaatttaaaatagaggtcatagttttttttagcaaattaccacttaactgaagtgtcatgtaacaaatacacatttctagattgttctatgctaaatgttaggaattcatgatgtaccgtagcaagtttaaatggacattttttaattcctatatggaattaacttatatattgctaaggccacaacatggttatttcactgttaggattccttggtgtagccaatgtgcttagtacgatcaatatgatattcaattggtcatgcgacttcatatatcacatatataatttagatgctatgatcatcttaagattatttatttatctcttaaaatatcatttattgataaaagatcaatatcaaattgtatgggtaaatagctcttatatacatgcttagagaaaaataattaagtcgatggaaagtcattagatgtttaatggaatataagtactgggtctaccagttttatgaaaatttaaggtgggatattttgatttttagtgagaaattttagaattttcttttatttagtggaggcctcaatatggaagtgggtccagaatgtaaatttttgttagcaaaatatagtcaatatggatattaagttattgatttcatataaaaaaatatggtaattcaaacaaatcataaggggcatagggatagctggctagacctaatatgtggaggttcaattgtggtcttttcttcaaggtcaaaaaaaaattgtggtcttttctttgcccataaagataattttaattttaattgttatagagatagaaaaaatagaaaaaagtaatgccgcacaccgcacatgaatagggatggagggaaagttgggatgtcttttttaaaaaattgatctatctaatgatctgaaataatgtgttgatgtttaagtcaaaaccgatggttggatgtttttattttttttcagatttattaggattttctgtaatttaagcgagattagtagcagcttagtaaagcatttatgtactttaatgtcctaattgtttgggatttttttaaaaaaataaatctaataacaacgtaaaataatgtatcaatcgatttaagtaaaaaccaatggttgaatgtttctctaatttaagagtgccacacaacggttagaaacgtttatagtatgtttaatggacatatgatgtctatttgtgagtcttttttccataaagataattttaagtttaattgtgattaggatgaaaaaaaaagaaaggagcagaggtagcgtacaatacgtgtgtgctgcacggaggtgcggacatttataggttttggtttttttaaagatacatctaacattctaaaataatcggtccaccgatttaaagaaaaattgatggtcagatttctttattttattagaataccacgtggcggcttaggaatatttttaggctgccacatgacggcttgagagcgtttgtaggaagtttaatgggcttttagaatataataatagaaatatgtaaagataaaattagggtgcgtaaaaaaacaattaggacatgattatttgattttaattattgcgaacttgaaaaatggatctattcaactttttaaaacaactggcaccttatataaattgtcaaaaattttgtggcgttaggattgtgaatattttgaatctgtccattgatgaaagaatatgaattttaattataaattcaaattttatctttgagctccgtaggatatataatttgctgacagcgtcttgtatgtaggagatataatttgctagtcctgtaggagtaactaatctggcttgcttttgctaagagatagatttggtatcttatatgaaagtatcaaactaatctacgtgagatggatgcatcgtgctgggctgcacatgtgggtcctcgctttctatacacaagaatacacgatgcatcgtacggggctgcaaatgtgggtcccgatttatcttgttgtgccatgtggcggcttgagatcgttttgaggatgccacatgtcagcttgagagtgtttataggaagtttaatggacttttagtatataataataataataactaggaaggtagctcgcgcagttgcgcgtgcatattatttaaactatcataatttttgttgttattagaaagaatttagggtttcctttgtaacacaggatttttagaaaagaatagaaaatggtatataaatgattttgagaaaagaaaagaaaatggtatataaatatgatagaaatgaatgtttaaaatatagtatggaatagaatggatgtttggatagagtgtaaaaaatttaaaatgtattaacccagttagatcaaattatcatctggacaaataataatcaaacaacctttgcattagtagcttgacgattgtctcgatggtaattttttaaaattctgttatatgcaagatatatatcttgcatgtacgtacagatatcgtggagagacgagtgattatgtacgggagggaggtggaatggatttgtatttttaaggattggtctatcggatgtaaataattgttttaccgattaaagttacaatggtcatattttttttcttatattttatatatgttttttattttgaaaagatataatgtaatggtccaaaataataggtctaagattttaaatcatgtgatagcgtaggattttttagaagcatgtgtaaaatagaggatagagaaaagtggttatctgaattattaacacatagattattaacaaaacaaattacataatccgcatataaactgtgagacaaatttattaagcgtaaataatcggtcattagcaaatgtttactgtagcacggcattgtcagatcatggcgcaattagttttaaaagtttcgtctcgcaagtacaggaaaaacagatgattgttaaattttgttaatctatgtagatgaaataattatgcatttgtgaaaaaaaaactgcacttaaccaaacaaattttgcatcactttgctttgactaaaatactaattagtagtaggcaactaatactctgtaactctgtctaagctaattttttttgctcttcttttctattccgctatacgagtatacgtatggatagcaaggagagagtgacagaagaggggaaaatggaaaggatgaggtctgaggggaagggcggacgaggagggcggatggcggatggcggatggcggatggcgcgggccggaggtgcgagcggagagctttgggcaggggggacggcggcgcaggcggcagggatggcgtgggttggcggcgtaggcggcggggacggcgtcagacggcggggatggcgtgggttgctggcgtaaatggcggggacggcggcgggcggcggggatggcgtgggttgcgggcagagagcggtagcggagagctgcaggcgctgtggacggggggacggcgacgcgggtggcggggacggaggtctcgatctgacgtgcgctcccgcaaggttgtggagtgcgaggccgagctggttgcgccgccgagctactgcatcgccaaccgcttcactcgcgattgggctgtacaacgggcgctgtcctcaggtattgcatcgtgcatccctgcatcgtcaatgtgtactgcactaatgtcctgttgctctgttcccatgtctttgctctgtatcgatttgtctctgctttacgttcaagttatccctcttgtactgcatatttgagattttttggcccatcatgaagggtgtctgtatggctctgtataattgagctttcgtagttaactaattgtagtaaaaaaagcttgtaacttcaaagtaaaaaatgctttcaatttgataattttatatataattaccataccagaccttcacaaaacttcatatggtaggaggcggggatggcgtggtccgcgggcggagagcagcgagtggcggggacggcgtgggtctcctgtagtttcccgtctccctccctccagtggctgttgcaggcttgcagcgccatgtccatatccacctcccatgttccgtcctcacctcaacatcctccttgaattatctcctagctcagtgggtgggttggcggctgcggtgtgtcgacctctctatcttccttcgtctgtattggttatgtcctctctattttccttgattagtggatttggcatcagctgctggggtgttcgccaggggacaattggcagcaatggagttgttgttcacagctctatggaaagacggtatgtgcataatacgaaagattgcggaattatgatgtgattaaatggctcattggctgtgtacatgtattttggatgtttaagcctgtttaatccattgtctaaaaaaataaatggttcatggatgtttactttctggggaaaaatgttataatagaaggaaaatgtaattatcctataactttatatctctccatttctttttgtttgacgccggttagttcaaaattgcactaatcaacgtcattcatttgaaaacagaggtagtaattattgaatatagtacaaagatgaaatatattgtttgtgaaaggaagatataatgtttgaaatatcatcctatttcagctggtaaaaatactcactgtaaatggtaattttgaattgcagcctttcgctagagtatgttgtagcacaatcaatgttgtactggagagaagcaggaatagagcagctgcaatgaatatttacaatgataaggtacccatgagtagtttgcaacatagtttgtatgatcaatatagatgaatgagaatgatataataccttctagaaaatctctttgtacactatgttcctgaccatatgttcacctgggctttcattgtcatctagcattatccgtagcccatctcgtcttgtaactctggagaacgctacgtagagctgcccatgcgtgaatacttgcttaggcagatatagtcctaccatgtttagagactgtccttggcttttattgatggtcatagcgaagcacacactgagtggatattgtcttctttttagcaagaagggccatcctgactctgttggcgtcattattattctagggatatataccttttctcctacatgtgttcctgttatgatctgtgcttcaatgaatcttttcccgagctgagtaatggtcattcgtgtaccattacataaccctgaactttggttaatgtttcgcagtagcatcactggaaggcctagtttcagtttcagcacatggtttggcattccagggaagtttagactatttagaaat

SEQ ID NO: 26515 - DNA, 1421 bp, Oryza sativa
atcctttgttatcctgtgcacttgcatatttgctgcgtggcttgctgagtatgtcatatactcaccttgcaatcattcatcagaggaagagttctacaatgaggctgatggtgtggaggattaggtgtagccttggtcaagctgcctgtggagtggagccgtctgcgccgtttattttttttttccgcttagatttttattgattgagaggaactatctacctctgtaatgacattttattcgcttattaattagagtaatatttgtactctattatcaatttgttattgtgtgcctcggctgattcctggacgagggttcacacacatgtaagcgtttggaattttggatagaaattccgggcgtgacaagttggtatcagagcccttgaccctaggttatgccaaatggttacccatagaagccttctaaaaatattggaaaagtagaactgttctcctccctttctcttttaattaaaccaaactaatggcacatgcacttcataatttttttttaatggttctcattcaaaatttattccagtgttattagtactgtacatctattactgtactaatggctcattttatcagcaaaagttttacaatgttgttttatttaatcttgctgcaataaaataaatttagcatgttgattttataattttctttcatttcttttgaaaccagttattcaaaattacaaaatttgtaacttcgtttccaactgtttcaacttatcctgcaagtttggtttactttatttacttaccttttactttgattttctaactttattcaaattaatccaaaaacttgtgctattaattggataaaggtcttaactccctcctttcacttgtctttagatgccgcgttacaagcctgagtacctgtttggtgttgagggttttgtccaggagttgcgtacgatgtcctttgtcattggattcgggactgcccctttttatgcccagattcctcatgatcgtcatgaagaaaagtgccgagtcaaagtcactttgaacagtaatagtgaagatatcccctcagtgatgtttgaagctggaggaagaaattacatccatgcatgtcaggaggtggcaaggatcgccataggagagctccgtgatcgctacagtgatcaattggccgacactgagtatcgttaccatcctcgtcaaccacagggaagtgaccgtggcagttatcttgagactgaaggaattgagaatgatgctaccacaaggcatttggttgagatgctgtgggctatggatgaaagtcgtgcggagactgtactagcagctcaagatcgtgaagaccggaatcgtggtaagatttgcaagttagaagacaaggtggatcgtttggagaaggaattagccgcattgaagggagaagcaccgccgcagaagg

SEQ ID NO: 26516 - DNA, 693 bp, Oryza sativa
gtcgccgccgccgcgcttgccgtcgcctttggttgttgccgccgtccactgccgccgctttcgcgtcggttttgggccgtcgcctccgccgccggatgccgtcgccggcaacacgacgtgcgcgtgccgccgccgtcagccccgggtcggccggtcggctttgatgccgagccgagcccggcggctgcctccaccgccgccgtccgatcggcccgagggcgatctgggccgtcggtcccgtggaccggcgatggaccacccgcgtggtcccggtccacggtgaaccgctcacccttgagtcgctgaccagtgggccccgcatgtcggcgccgcactccccccctgtgctgacgtcagccctggttaatattgcgccataaattatttaaggatttttgttatagtaataaacacagtgaatcttctaaaattcataactaattcatccgagctccgtttaatcccactcaagtctcagtaaatcaagaaaaatgtgtagaatccattaaaaatggttttgttctctgtttcagtagtcttatagcctgtttgcaatgtttgctttgtatgccgctagattccgatccctccgacgctccggtgtacttcgagatagtcgccgaggttcccccagcagcagagcaaggcaagtcatgcttgtcacttgaacatgttgatcctatattgccaatg

SEQ ID NO: 26517 - DNA, 3720 bp, Oryza sativa
gaagagaggcaaggttgtttttgcaaatcttttgttttgaaatcattttgaaatcacaaagtgatttatttctttctaagtttgggtcgaaaagagacttgcgtctcgattcgaccttaagagatgtttttcaacagctcatttggtaatgtaccgacctcccgggtcagatcattacttctcggctcctagagccattccacttgattaatcggctcccagagccttttacattttctcggactcacagagtctagctgcccagcagcacaacaatccgcttccactcgggaagcctagtctatgatgccggtagacatcccgaatcacacagattcatttcttgaccactcaggtcatccatctgccacataggctgattctggtaacaattcccacaccacaacaacttttcacaaagcacaggcaaacaaatctacgctacaggaaacacctcacatccgcccatgaccgcgggcacggctgttcgaacagttagttaacctctgcagagggggtacactttacccacacgacattactaacccggatcacccagcccgtgagattagccacgtcgggagaccctaaggctttcataacaaggcatttcgaaagccgacacaggtttaccatatgccaacgagaggggtcccagaccaacaccaggttaggtcccagaccataccgtgccaggaagcccgagggttctccctgacaccaccccgttgaatccacatgtctcttggcatcatggctcccccgattagctaattactcagccaggggcgtcccattgcacccgtgtggtcgcacttattatatgctcagatgaatttcccacaggaatcggtccttatatgcgaatacaggacagtaccacataggcacaacccccgcatcgcgagttttttcaaacacaccgacgccacatgtcgggttttcaaggcttctcaaacccatttcccaaattatcgacaaacaacggtgtatgtggaatagttggtataagtgctcagagagcacggataccgaagtaccacaagggtggagcgacaaggaatcagggtaatacgacctacaggaattagtgcgactactgggtaggtccgtcggtttggcacgcaaaccgaggccaagcatgttaagtgtgtgattctaataatgtgagctgcaatcaaaataataatgattttccaattataggagcaattggtcaaagggtgacttgcctcgctcaaggtcttcacagagcttcacgaatcttcgagaaaacccgcgatcgacgaaaatccgataaccgcaactttacgcaaacaaacaaaaacctaaagaaaagaccaagaaaaagaccctatttagactaaataatagtgccattaaatagatctcaattttacggaattactggaagttgaacgaagtcaatcgggtgagcggttgagaagatatggattttctaaggattatttgattttctgtctaaaggaaaaggaattattaattcccttggaaaagaaaaggaaggagggatcggatttagacttcctcgggcgacttaggcgcagcccgagggattcacaaggcttggccggccattgggccgagcgcggccacggggaggcggcccattagggggcgcggggagagagggaggcccaacggggtgggcgcggtccgccgcgcggggtcccgagatgggcccgcatggcagcggtcgggtgtatggtggggagggcgcacgcggggacgggcgagacggatcggtggattgggtgcggatgcggtgcgccggtcgacaaggaggcggtgggcccacgtgcagcctcatggctcaccggggtccgcacgcacggggatgaaggggcgagggcgagcggctgaccggcttgactgggtcaagccgacgtggcacctatgccaggccacgtgggcggcgagaggaggaagaaggggggatgccgagatggacggcggacggtggccgagttcaccgcagtttgatgcagaggtctagggccaacgggagcacaccggaacgatggctaggataagagggagtgagcctccggctcggattcgccgggggggattcgatggcgacggatttcgacggtggcggccggcggcgatcaaaaggggaaatcgcggcggggcgacgagaggtcgattcaaggaggagggagcatctccggggcgcggggaactcatttccggcaccggatggggcggaggactgccgaggagggctgacgacggcggcggcctccgggagcgggcggcaacggcggcaagcctatggcgggcggcggcgagacctggggcggcgtccatgcgtgttcggggggctagccgagctaccacgcgagctagggagggagagggcgagcgagaagggagaacggagggtggcactaccaagccgggacgggcgcagtgacgagcggccgacggctcgggagcgagctctccggcctcgggccggggaaggggaagaagagggatggccggagtcctcgtctcgcgtccacgcatgcaccggcctctgatgcgtgcgacggcgaagagacgaaggcaagaggtgggagtggcggcaaggcgtcaacaatggcgcggtgagtgtgaggcgagcgaaaacgagagaggaaggggtttgggggcggcttgggttttatagtggaggcgatgtcggtttggggagggagggaaaccgaccttggtggcggtcaaggagagcgagctggcggtgagctggtgcagtcgcacgaccagcgtccgcgctttggccgcgagcggctgggaccatggatgatgtcacaccccgaagttttcctcccaggccaaaattgtaatttacaaatgaccccaagaaaatgcaggtgaaatcaggagaaaaccctaagaaagtaatgcaaataataatcggacttgacatgtggaatttttcttgagttctacatgtcaaaattcattaacaggatttttagtggaattttcagagctctagaaataattttaaccaattaaaattgagcaagcaatattttattccagggaaaatcctttttcctttttctttttctttttcctctctttttcctcctttttgtcaaatgggccgtcggcccatttctcctttcctccccccccctctccgctgggccggccgcaggccgaggcccagcccggcagccaggccgccccgctgcctcctctctcggggtcgccgacaggtggggctgtcacaccctgaaaattcaaaatatataaattgttgtttaaatggaatttttagaaataattttaaaagtcttgaaaagaaaatctaagtttaattaataaattccaatataaaatggggccagataaaatttcattaaatactttgcttaattctataattcctagatttttctgggatttatttgagctaagaaagtatttgtaataaatggaattgcatttaagaaataattttaattgaaaaaggttttaaaaagtcttcttttggctttgggcccgaaagtcggcccaaaacctctcttctctctcctcggcccagccggcccagtcagccgcgcgcgcgcgccctcgctgtcgctgacaggtgggtcccgcctgtcggagccgtcgtcttcctcgggccgaaaccctagcgcggcgccgccgagcccccgacgctgtttccttccaatccgggccgttcctttccttttccgg

SEQ ID NO: 26518 - DNA, 801 bp, Oryza sativa
gcaagacgattgaactcgtgcagttactcggtaactgagcgagatccctgagtaagcgacctgaactccttcttctcgagagacactactcctgatggtatatgcgtcttccgaaaagcagcggtgaattcaagccaagtgataggttcagcagtaatcctattcaggcggaagtgatcccaccattcagaggcagggccatgcaactgatgtgatgcaaatgagaccttctcctgatcagtacactgaagcaaatccaacttcttctctatggcatgcagccaatcactagcttcaacaggattagtggtactagagaaaacaggcggcctcacacgaagaaattctgctaacttgttctggggaggtgcatgattatttccttggttttgctgattctgaaattgctgcatcatcatgttcataagctgtgtctgttgagcaagaacttgggccagagtgggattctctccattgttgttgttattggggttgttgggaccattcccattgctgcgagtgttcaccatctgacatggacagggcacaagaagagaaaccggggaaactacttaagatagagaattactttaacttttattgctcttaactgagtttcattattacaaactgaagactctcacaccactaaactctccaacttcctaacactcaaaaacaaacaaacgcatgcaattacatcccaccactgatgtaaatcacatgcgagccacacacaagcaaactttaagcaagcaaactaacacaacgatataagacaacgacttaacaagtcactct

SEQ ID NO: 26519 - DNA, 8978 bp, Oryza sativa
cggcgagagcgagcggcgagcggcggaaacggaagagcggagctcgagggacgattttatagcgtcggaagggagagaaggcggccggggaggaaggaaaccgaccgcggagttttcgcccgccatagatgcgccggcgacgattacgggattaaatccgagcgaatccgagggagagagagaggggaaaacgggggaaacgggagagggaatcacggggagtgattcccctctctttaatgcgtgcggggacggcgggatgcggcgcaatccgcggcggcggcggcgctagggcacgggcgcggcggcgggcgcggcgcgaggagggagatgacaggtgggccccacccgtcagcgagagtggcgggcgggcccgcctgtcagcggcgcgcgcgcgcggggaggccgatgggccgcgggagaggagagagagagggagagggaagtgggccgagccggcccaagagggaaggagggggaaaaaaagaacttcttttagggttttctttttataaaacctttttaactttgtttatttcttttcaattattatttgtgctctgaaaattccactaaaatttgtttaagcattttaggcttttaggaaatatacaaaaatcctccaagcctcatttgacttttatctttgcacattttaattgttggaggctttcacatgaattttaattattctttgcacaatttcgaggatagattttagagtcgatttgggacgcgacaaacctaccccccttaaacggaatctcgaccccgagattcggaagaactggcgaagagaccgggatgggctgccttcagctcgtcttcgcgctcccaagtagcttcttcttcggcgtggttgctccactggaccttgcaaaaacggattactcggttcctggtcctgcgctccatggtgtccaggattttcactggcctctccacataggtcaagtcttcgcgaacttcaatttgctctgagtcggcctgctcggatggcactcgaagacatttcttgagttgcgacacatggaacacatcatgcacgttgcccaaggaggcgggcaactccagctggtaagcaacttctccacgtcgagcgatgatacggaagggacccacataccgaggtgcgagcttcccttttgtctgaatcctgtgcacacctcgcaatggcgtgacccgaagatacacaaaatcatccactgcgaattccagatcacggcgtcggttatctgcataacttttctgccgagactgtgccacctttagattatcccgaatgattctgactttagcttcagcttctctcaggatatcagtcccgaacacttggctttctccaacttggtcccacaatagcggtgtccggcatttgcgcccgtacaacgcttcatagggtgccatttgtatgctggattgatagctgttattgtaggagaactcggcataggggagactcttatcccaagtcttcccgaaatctaggacacatgcgcggagcatatcttctaggatctgatttagacgctcggtctgtccatctgtctgcgggtgataggcggtgctgaaattcaatcgagtacccagctcttcttggagcttcttccaaaagtgagaggtgaattggcttcccctatcagatacgattttcttgggaataccatggagactcacgatcctagcgaagtagagctccgctagtttgttccctccataggtggtcttcacaggaatgaatcgagctaccttggttaatcgatccactattacccatatagagtcatatccaccttgggtttttggaaggccggtgatgaaatccatcccaatttcatcccatttccattccggcacttggagaggttggagaagtccagccggtcgctggtgctctaccttgacacgctggcacacatcacatagagccacaaactctgcaatttcccgcttcatgctgacccaccagtatttctccttcaagtctaagtacatcttggtactgcccgggtgaatggaataaggactttcgtgagcttcctgaagtatcagctgtttaagttctctgctatctggtacgcatacccgctttccgttccataaggttccgtgttcatcctctgtgaaaccagcggctttaccctgtttcatattcttgaggagtccatgcatgtccggatcattcttctgagcctcgcggatttgatcgagcaaggtgggcttggcttccaacgcggccaaaaatccacgaccaactatgcttaggttcagggcttccatctgttgactaagctcgggcggaatgctacggacgttgagagtattgcaatggctcttccgacttagagcgtcggcaaccacgttagccttaccagggtgatagtgtattcccacatcataatccttgatgagttctaaccatctcctttgccgaagattcagatccgactgggtgaagatgtatttcaaactcttatgatcagtatatatttcacagcggttcccaatgagatagtgccgccagatttttagagcatgaaccaccgctgctaactccaagtcatgcgtagggtagttgccttcatgaggtcgtagttggcgtgaggcataggctaccacatgaccgtcctgcatgagcacgcaccccaatccttggcgcgaagcatcacagtacaccatgaaatccttacgagtatccggcaagattaacactggcgaggaaaccagcttttctttgagagtttggaacgccttctcgcattgcgggctccacacaaacttctcttcttttttcaacaactgtgtcatgggtcgagcgattttggagaagttctcgatgaatctccggtagtatcctgccaaacccaagaaactgcgaatctgagtgactgtcttgggttgcttccaatcggtgacggcggtcactgtttcggggtccacagcaactcctttagcagatatcacgtgtcccaagaatttgacttcggacaaccagaactcacacttgctaagcttggcatacaattgatgttcccgcaactttcccaacaccagacggagatggtgctgatggtcttcctctgattgtgagtatatcagaatgtcatcgatgaaaaccacaacgaacttatccaagtattccatgaacactttgttcatcaagttcatgaagaaggcaggagcattggtcaagccgaacgacatcaccgtgaattcatacagcccgtatcgcgtggtgaatgcggtcttcggaatatcttcttcccgaatacgtaattggtgatatccggaacgaagatcaatcttggagaatacagtggcacctttaagctgatcgaacagatcatcgatccggggaagagggtacttgtttttgatggtgacttcattgagagctctgtagtcgacgcacatcctcttcgtcttgtctttcttctctacaaaaatcacaggagcaccccatggggaagtactcggacgtatgtaccccttttctttcaactcttccaactgtttctttacttcggccagttcatttgctgccatacggtagggtcgcttgtgcagaggagtggttcctggagcaagatctatccggaactcaatctctcgcttgggcggcataccaggtagttcttccggaaacacgtctccgaactctctgacgatggggatttctgacagacctatctgatgcagttctgaacttctgacagaggttggaggtgcaaagaaaacaaccggttgttctggtcctcggtacatagtaacagtgcgtctcgcgcaatccactactccttggaattgtgccagccaattcatcccaaggatcacatccaagttctttgtgtctagaagaatcaggtccgagggaaaaggaatcccctgaatttctatagggacggcagggctatagtactttgctgtcataacccctccaggggtggtgataagcagagggtttctaagcctttctacccccaactgatttctccccacgaatggcacagatataaacgagtgggaagctccagagtcgaacaaaattgtagcagggatggaatgaacgaggaacgtaccaacgatgacgtctggagttgtcagcacgtcctcggccgtcacgtgattcacacgaccccgaatgacatccttcccgccgttgttggagcggggaggcgcttggccttgctgacgccttggcttcgggcatttatccgcaaagtgcccgggctcgaagcagttgaagcacagccgctgcggacctgaagcgtccctgcggccttgaacgggctgcccagctggcgtaggaggacggggcgcacgagtcccttgctgattctgctgctgttgctgctgtgggacgcgcaccacggattgaggtcgaggcgcggagcgaggttgctgctgctgctgttgctgctgcgaggaggatccccctgggtagggattggtgtagcggaccctctggttagcaccctgctgattgcggaagttcgccaagcggcgcttgtgcgattccagctccttgtgcttggcttccaagcggatgctcttgtccaccagacgttggaagtccgggtagtctccagagactagacgaacagacagctcagggtccattcctgccaagaacttctcttgcttctcctcatcttcccgcacatcctccggggcataacgtgctagattgttgaactcatgcaaatactccatcacggagcggttgccttgcttcaactcccggaattccctcttcttgagagccacgactccggcgggcacatgggttctccggaaagcggcggtgaagcgagcccaagtaatcggctgcccctcgggctgcgtagcctggaagtggtcccaccatagagatgcgggcccctgcagctggtgggcggcgaagatgactttctcttcgtcactgcactgcaccgtgtctagcttcttccccacggcatgcaaccaatccaaagcatccacggggttgttggagctggagaaggtaggtgggcggatgcggaggaactcggcgagtttagagtgttggggaggtggtggtggagcattctgttgtggcaggttttggaggtggtggaggaaagcggtcatcatgttggcttgctgggcgaggatttgggtgagaatggcgttggtgtctggtggtggtggtggaggtggattgccttggtggttggggttgctgccctcgggttggttgccttcaccggtgttaacatttctcctggtcgtcaccatctgaaaaccccacacagaaccagcaagcagagaaagagagctgacgattaaaactaaccacccacgactactattattcttaaatttatcactgctattaaattggttcattaaagttcaagttgcttaggcaaattaaaaataagacaggctccgacatagttacaccacacaccggcgtaaccatgccccacacgactcaacaagaagataaacgagaaagaacacacgcgcaggcctactaactgctcgtctaacgctgcgacgggccaggacggaaggtgagcaacagcgcaccctccgagctaccaacgccggaggcttccccctcctggggaaccacgggcgcaggctcggcacgaggggtctcgacgaagcaggtccacgccagggactgacggacaagctcgggcctggaggtgctcttgcgggcggtgatcttctggctgcggcagacgcggcgacgcttgggacggctgtcctctccctgggcgatcttgagctggtgcagctgcgcctccactgcgtcgaggtccttcttgagctgcaggttctcctgacgcagctccaggatcttcaggttgttctccaccatgccacgacgcaccatctgatggaagtcgatacgagccgcgtcgtacgcctccaccatgcgtgccaggtgcacgacggtagcgtcatcctccgagctggcgtctcggaaggtggcgtagtcgcgggctcctccgcgacgagggtggtagcggtagggcgagtgctgcaactcgtccgggtagcgctggtgaagggtgccgatggcgaggagagcggcgttctggcaagcggcggggaaggagtccccacccgctgtgactgccagcgaaatccgctcgggagagccggagaggatcactgcagtgacctcccaaccagcgtgaggctctgcatcctcaccctcctgctccgggagcggcctggcctggtaatccactccatgtggataccccaagaccacgcacatgccccgcagctccaagacgaagccagtcatgtccaaaccacgacgggtaacgctgccggccatctacaaacaaaaacaaaagaaaagcaacatttaaaagatcagattttgacgataaatgaagcagcaagacaaagagagaatagcgggttttcacaaataataaaggatttttatttttttggaaaatatagccaaggcttgggatctacggctcgtcctagggtcaagggaggctctgataccaacttgtcacgaccggaaatcacccaacaggcgttcctgacgtgcgtgcattattccttgtcccaggaggcaaggtacaccaaaagttgatacaattcagagtttaacaagcggaagcgtatataaaattattacacgggcagcgaaggcccaacacacaaagacaaacgagaaacagcggaagactagggcgacgaccacaggcgcttgacggcaggcacgagctagacaccaaagccttcatcttcaaggaactcctcatctgggcttgggaaaattaagcaagactgagtacaaccaccgtactcaacaagacacacccacaaatgcaaaataaatgcaagggagtacaagggaattataacataaagggttagggttgcagtaaacagcatttaaagacatttagttgctcaaggccattttgtaaacacgatcctagaactatccaatattattaatcaaggccgtgaacccacacgaacctgccttaacccaaggcctatgatgattcagaccgaactggcaacccgaccctgggtcccagctcgtcctaagccaacccaggccaaccattccatattttagttgttaagcaggttttaagaattaaaacactaacttgggtacattgctcggcttgcccataaccgagggctcggctattcgaatagattatactctgatcagaggtgtacatctttacccacaagacacatcttcctcacgtgtaaccacgtgccacataccaccacggtatacggacggaagacgtgacatagtttccaacccatcctagccttagacaagagtaccgacccaatcccgcctacggccggaacccccgggacaggcagacggaactgagcccctcgcagcagggcaccaaccctgtgctttttgacatctcgactaccgggccgcagctcgtgtagccttcatttgccctggagaatgtccatcgacccccgacttcatccatctccaatccgtgtacttttgtttatgactagactgagccacaaactaagccttacccactagacatgtggaagtacggtagtgctttgcaacagaggcccgaagaccggtccttatacggccgaggtgctaccatcaaaaccacgcaccccgagcccagcctaaaaccattttaggggattttgaatagagggggcggtgtgaagccaattccacaataaaccaacaattccagagtatccaagtgatatgaatatttcccaaagtctaaagttgtaaaaccacctaaggttacctaattagattgcgaagcatctacctaaaatttatactagggataccatgagtagagtgtccactagttgaggttttgtttgtctagggtgaacaaggtaataataataacaataacaataataatatggtcataacaaaggtaaataggcatggctaagtaaaacagtgataacgcgggaatttaaataaagcgataatgcaataatttaaatcaacataattttataaactgggattcaatatgatcaagatgatgtgtcttgccttgctcgttttcccaatcgacggcttcgacttccacgaagagcggatcttccgaagctgcagcgtctacacgaccaacggaaaagaaaaaggctttaacactaaataactccacataacagcagaaacaaagcacaaaaatgggttctttatatcttaaggaaaaattagagacttgaacggtccaattccgagttcaaatggccaagatatggccatttgaagtttatatgctctttaaatggatatttgcgaatttcttcatttaattttcaattaaaaatcctatttattgcgtcagccgagggagcgggcgcgcggaccgggtccacgggaagtggggcccacgcgtcagccccacggtccacggtggaccgggcgcacgcggctggcggcggtcggcgccgtgggtcccgcgcgtcagccgcacccgcgggcgcgggcggctgacggccgggcccacttggcagccgcgagggcgcgcccgagggcggcctcgccggcgcggccgacgggagcggcgcgcccgcgccccgatggtcaccgccggcgaccaccggcgcggtggagcggcgcccgagagagaggagggaagggggaaggcgaacggcggtcttcggctcaccccggaacaacgacgatgacgagaacggcggccggagcggaggaagacggcggcgcgggtcgggatgacgatgacgacggtgctccggcggtcggcgggcgaagcggagcggcggacggggtcggcaaccactcggcgaagcggacggaggtgtcgccgagtaaggaggaagttcggagcggcggcggcggcggaacggagctcggcggcgatggcggagagagcggagcacggcgcgagcacgaatccgacggcgagagcgagcggcgagcggaggaaacggaagagcggagctcgagggggatttta

SEQ ID NO: 26520 - DNA, 13296 bp, Oryza sativa
tttcgaggatagattttagagtcgatttgggacgcgacacagtgccatctgcagattggcctggtagctgttgttgtaagagaattccgcatatggcaagcgtttgtcccaagctccatcataatcaagagcgcaagctctcaacatatcctccaagaattgatggactcgctcggtctgaccatcagtttgcgggtgataggccgtgctgaagtttaaacgggtccccaattcttcctgcagtttctgccaaaactttgaggtgaactgactacctcggtcggatagtatcttcatgggtaccccatgcaaacacatgatccttgcgaggtacaattctgccaatctctttcccgtataggtggtatgtactagtataaagtgagcaaccttagtgagtcgatccacgactacccagattgaatcgtgacccgatgatgtccggggcagtcctgttataaagtccattccaatctccttccatttccattccgggatttgaagaggttggagtaaacctgctggtctttggtgctctgctttcactcgttggcaaacatcgcagagtgcgacgaattcagctatttctctcctcatgctgacccaccaaaacctttctttgaggtcttgatacattttagtgctgcctggatgaatggagtactgggtctgatgagcctcggtgagtatcagatccttcagttccttgtcgtcaggtacacacaatctttctcccatccagattgtgccatgctcatcctcaaagaaatcccgagcctttccgactctcatgttctttttcagctctgctatttccggatcatttacttgagcggctctaacttgatccacgagcgtaggccgtgcctccagagcggctacgaacccgtgttcaacaattcccatgttgagatgttcaaactcctgccgcaattcctcacacatgccctcgatgcatagggcagtgcagtaacttttccggcttaaagcgtctgccaccacattggctttacccgggtggtagtgaatactcatgtcatagtctttgattagttccaaccatcttcgttgtcgaaggtttagatccggttgggtgaagatgtatttcagactcttatggtccgtatatacttcgcagcggttgccaatcagatagtgcctccagatcttcaaagcatgaaccactgctgccaattccaagtcatgagttggataatttccttcgtgtggacgcaactgccgcgaggcatatgcaaccactctgccctcttgcattaggacacatccaagtccgtgacgggatgcatcgcaatagacctggaagtctttcatctggtcgggcaggatcaaaaccggtgcggatactaatttcttcttgagctcctcaaagctcttatcgcactcagctgtccatttaaacttctcatccttcttaagcaactgagtcatgggtcgggcgatcctggagaaattttcgatgaatcggcggtaataacccgcaagtccaaggaaacttcgaatctgcgacacggtcttaggtggggtccatttggtaactgactccacgttcgatggatcaactgccacaccctgagctgtaatgacatggcccagaaatttgacttccgtcaaccagaagtcacacttgctgaacttggcgtatagctggtgctccttcaacttttcgagtaccagacggagatgttgctcatgttcttcctcggattttgagtagataagtatgtcgtcgatgaacaccacaacaaacttgtccagaaattccatgaacactttgttcatcagattcatgaagaatgcgggtgcgttggtaagtccgaaagacataaccgtgcactcatatagcccgtaccgagtggtgaaggccgtcttcggaatatcctctttccggattcttcaactggtggtagcctgatcgcaggtctatcttagaaaacactttagttcctttcagttgatcaaataaatcgtcgattcgcgggaaaggatatttattcttgattgtgacctcgttaagtgcgcgataatcgacgcacatcctcttcgtcttatcctttttctccacaaaaatgaccggagcgccccaaggtgaagtgcttggtcgtatgtaccctttctgcagctgctcatcaacttgcttcttgacctctgctaattcgttggccgccattctgtacggtctcttatagattggagcagttcccggtgccaagtcaatccggaattcaatctctctcttgggtggcatggtagtgaggtcttcggggaacacttctggatactcgcagactatgggtatatcttccaattttctcaagttcttctctacggtgtccactgggatttccgtctcaatctgattcaacgagacccctttctttggcgagactagagatttgtacaccacggtttctcccttctcgttggtcaaggtgactgtgcgactcgcacaatcgatgactcccttaaacttggtcagccaatccatcccaagaatgacatctaggtctttggattcgagaagaatgaggttggctagaaatggtgacctttgaatttctattgttatagaagggctgaattgaaccgaagtggagctattccctggggtatgaacccgcatcggtgtgctaagttcctctcttattaacccatgcatcccgacaaatttctttgagatgaaagaatgtgttgcaccagaatcaaaaagtactgttgcagggattgagttaacagggaacgtacccagtacgacctccggtgctgtttgtgcctcctgcgcagatgcgtggttgacacgagcctggataaaccttggcccggcacgcctgggcttcgggcatttgtcagcgaagtggccaagctcgccacagttgaagcaggaccctggttttgctccagtctccttcttggcttgcgcgggctggcctgactgtgccggtgccactgatgggcgtggagctgcaccgcggttgggctgacctccatggtggttctgactgccactggtgccctggtggaagttgctagggttgaacgggcggtgctggcggacgatcatggtggtaggtccaccctgctgtccgggagtgaagcgcggcctctggtgacttccctgatgtgccctgaactgagcggccttcctcttcctgtccatcttgttgcgttggtcctcctgacggattgccttgtcaaccagcctctcaaagtcggcgtagtccccagatatcagttggttggtcagctcgtcatccagacccgccatgaacttctcctgcttctcggcgtcggtgcggacatcctctggtgcatatcgcgcgaggcgattgaactcatggaggtactctgtcacagtcctattgccctgatggagtgcacgaaattccctcttcttttgtgccacgaccccatctggcacctgtgccttcctgaagctacggcagaactctgcccatgtgacttcagtacccggtgggcgggtggccatgtggttgtcccaccaagctgacgcgggaccctgaagctggtgtgtggcaaaagcgaccttctcctgatcattacactgcaggagattcagcttcttctctattgcatggagccagtcgttcgcctccatagggttggtggtgctggagaaggtgggtggcctgacgcgtagaaactctggcaacttggactgagggggagggggaccaaactgttgatgctgctgttcggcgtgctgcatcatcctctggtgcatctgctggtgctgctgctgcatctgctgcatcatggctgccatcatctgagtctgatgtgccataacttgggcaagcgtcggattctcgggaagtggtggcggaccattgccagaatcgctgttggggtgcacaccatcagtgcgctcttcgccgttgctgccctcgcctgtcgcgcgactgccagtcctggtgtagaccatctggagggaaaagcagacgggggaaaagaagaaaaacagatgctcaagaactaagctttattacaaaggaattaaaactgcaattgttctgatctgaattaaaacacttaaaaagcaagcaaaaatccttattaagacagccatatcataggcacatgatatcgaccgtcaactgaccccaaacaagcaacctaaacacgcaaactaacaaccagaagctagaccatcgataaactaatgggaaaacgagcctaatgctcggaacggctcctgcggtcggtggagtcgaaggcgtcctcctgctcgtcacccggtccctctgagcgactcctggagcctgacagatcagtctcgccgctgccactgggagtagcagacaaccaacctccggtgccactggctggacccctggcggctgatgctggagcgaaggagagagtgaacgcgggagctggaactggagctgcaggaactgcgggcggaactggaggtgctgcgggagctgctgctggaggtgggttcctgggcgcaagctggatgcgcacaggtgcagtcgtcgtcttgcggggcgtggtgcggatccggactccttctggcgctggaagaccctttagctgagcgttctccttcttcaggcgcgctatctcgtccttcagagcgacgatcctcatgagcttcccatcgttcaaagccttggtcgccttgtgcaagtccgagtgcatcctgtccaatcccctcatcacagcacacatgtgaccaaaggtggtgtcgttctcgccagctgtcggacggaaggagctgacgccatcaccgttggctcgacgggggtggtagcggtacgccgtgtcgtggaagatgtagttgtggcgctcccgtagtctggccatcatcaagtaggctgcctcctgacaggcgtgatctgctgtgcctccagatgcctcgaccgccatgttagcgaggcaagtccccacgtagccatggacctccaagcggacacggtgaggaagctcgccactaagcagcggaatcgtcgtgtactccggcgcattggggtagcccaccaccagtgtcatacgtgccaactctgccacgaaatcgatcatgccttctccgcggtggttgggtgggtgaccggccatctagagaagacaaaggagtaggatcaatgcatgctcaaatccaaatttaaataaagcaataaaagacccaaataagggaaacgaacaagagcgaaatttttatgcatagatcattttgcatgagagcgaataaacaagacagacccacataacgataaaataatgagaaattagatacatactaataataacgataagagcataaacaccttgcaactcatattcctgagctaggacctaatgcatttcacccatcaaaccccaactgactgacgaataaatcccaataattttactaaaaccctagactgacttgttttgaaaaaaccccgcttaaacgagcgaccaagattttttcccttgaaccacaagaacagatcccaattttcccggaacaaatccaattgcaaagaacatatgcaatgaaaaggattcagagggctcttaggtttttccatttggcttgtcctacggtcaaggtcggctctgataccaacttgtcacgcccagaaattcccgaatagaattccaagcagaatgtgcattaaaatccccgtccaggaccagccggggtacacaaacgacaatgttgacatacagatccacgtcttacaaacatcgtaaagtcttacataaatgcagcggaaaacagaagaaactggagctaatccttgactaaactgcagcgggaacaccactccacaggcatcctcgacggcacggacgaagcctactcctcagagaaaccttcatctgacccgaactcgaactctggggttgggaaaagtagagcaagactgagtactacccactgtactcagcaagtcataccggaatagaggtatgatgcagggaatcatcaaagaagagctaaagtggttcatttgcataaagcgagcatttataaatagagattgaaggatttaaacagttgtaaaaattaagcagtattaatcatccactgtccaacgctacaccacgttgcaacaggcccaaccaaccacctataccatccaaattcattagactaaactaatgtgattctaatcacggtgaatctggttgaccgcccataaccgcgggcgcggctattcgaatagttttactctgatcagaggtgtacaactgtacccacaagacacagccccacgacacgtttccgtgcgccggcatgccaccacgacataccggaaagaggccgtgacaggacccttcgcataaccccctttagccaagcacaccacacctcaggtttcacccccgtccccagcgggcaacgggcagtcccctctcgtgcctaggtgaatccggaagcgacagaggccgtcgcagggcccgccccgctccatcacgcccacccttgcctggatgcgtcgactaaaggaaagctacactacaagcccagccgttgcccacgctggcttgtggtaagtacgataaattcttccagggcatcccgcgaaccggtccttaactgccatgggtgcgaccagcaaaaccatgcacccacagcccaccatgtggttcattttatttaaccaacaccagagcggtggtattaaaccaacattaccattagaactaacagtctaaacattaatatgattttccccattgtgatctagttgaactaagcaaggctaagcaattcctagtccaaactctaatcatgttataacccaagctaacaaaggagcatggtatccaaaaagcatggctgtaacaataggtaaccatcccatagtaatattataaaacaatacaatatttgaaaggaaacaatagagcattggcaatataggatcaacatgttcaagtgacaagcatgacttgccttgctctgctgctgggggaacctcggcgactatctcgaagtacaccggagcgtcggagggatcggaatctagcggcatacaaagcaaacattgcaaacaggctataagactactgaaacagagaacaaaaccatttttaatggattctacacatttttcttgatttactgagacttgagtgggattaaacggagctcggatgaattagttatgaattttagaagattcactgtgtttattactataacaaaaatccttaaataatttatggcgcaatattaaccagggctgacgtcagcacagggggggagtgcggcgccgacatgcggggcccactggtcagcgactcaagggtgagcggttcaccgtggaccgggaccacgcgggtggtccatcgccggtccacgggaccgacggcccagatcgccctcgggccgatcggacggcggcggtggaggcagccgccgggctcggctcggcatcaaagccgaccggccgacccggggctgacggcggcggcacgcgcacgtcgcgttgccggcgacggcatccggcggcggaggcgacggcgcaaaagcgacgcgaaagcggcggcagtggacggcggcaacgaccaaaggcgacggcaagcgcggcggcggcgacgcacggagaatcgaggaagtaaaggaaaggggaaggagtcccccccgaaggggacgacggcgtccggcgacgaggagcgacggagggaagtcgacacgcggcggacggcgaccgggacgacctaaagaacgaaacgaaagggattagagaggaagagaggggccataggaggcggggatgccggccgaaggcggcggacatggcgaccctcaccgtcgcacgacgggaacggctctccggcgacggacctcgacgaaagaggggtggacgggatggatctcggccacgcgaacccgacggcggcgacggcgcggtgcggcggcgagcctagcggcggctagcggcgaccggagtagcggaagcggcggcggcgggtggttgcacggcgcgggagcaatggggagctcgggaggggtcggcgaaatggggaaaaagtgagagaggacgacggcgatgcttaaatagggggagagggaaccggacgtggccgggagaggcgggaatcgccggccgacgcgggggagtggggaggagagagaggcgggattcgattttcgaatcccggccatctcgggcgcgggcgcgagcgggagagagaggggaatgggcgcgggagattcggcgcacgcgcgggcgtggtcgacgtggcccgggggaggcggagacgtgggcgcggcgatggttgcgggcgcggcggcgcgccgggatcggcgggaggagggagacgggcccgacaggtgggcccctgtcacgcccggaatttctatccaaaattccaaacgcttacatgtgtgtgaacccttgtccaggaatcagccgaggcacacaataacaaattgataatagagtacaaatattactctaattaataagcgaataaaatgtcattacagaggtagatagttcctctcaatcaataaaaatctaagcagcggaaaaaaaaaataaacggcgcagacggctccactccacaggcagcttgaccaaggctacacctaatcctccacaccatcagcctcattgtagaactcttcctctgatgaatgattgcaaggtgagtatatgacatactcagcaagccacgcagcaaatatgcaagtgcacaggataacaaaggatggcataatagggtttcatttgcaaaagcagcatttagcaaacatttgagaatttgataaaacagttaagtaattaaacaatattaatccaacgctatacaacataccctgttgtataggcccaaccattctgaacaaccatcccggctgcacagttctatctccaaaccaggaatgtaccattccaaaccaggagctaaacaaattattaccagtttaagcatcttttacaatgatgagaggtgtgagactaatcacgaaagacattgttagacccgcccataaccgcgggcacggctattcgaatagttttactctgatcagaggtgtaccactgtacccacaagacacaaccccacatcatgtcaccatgtgcctcaataccaccacggtatctcggaaaggagttgtgacaatacccctcgcataacacaatccactgcagcgcaccttcctggatcataatcacccccttataaacaaggcatggactccccagcgacccccgtgggcttatctctgccacttctcagtctggtgccccgcaatgaaccatgctatacaaaagataaagccgttgcccatgctggcttgtggttggcacgataaatgtttcacaaccgaaactcgtgaaccggtccttaattgccatgagcacgaccatcaaaaccatgtgctcacaacccaccattaccaggttttagttggcacattaattaattaactaatcacgattgaccatcgtgaactatcaataagccatcatgaaataatagtgagtcattagttatcccataaatgtactaatgtttctaagcatggctaagcaattatatctagtatctagttggaccaatataaataaagctcaactagtcaaattataataacctaaggtatcaaggaataaggtaatcaagtacgaaagggccataacaaaggataggtcaattccacccaatgacattcgaaaatagatgcaatagttgaatagaaacaatagctttaaataggatcaacatgctcaaagggttgtttgggatctgtgtgacttgccttgctggccttggaattcttcaaactcttcttctgcgaaaacggactctccggaaacgactaaatctaagcagaaaagagcaaaatcaccaaaacagcacataaacaagcatgaacagtacatgtggatatttttaatgtgtagatctcaattttagaaaaatttagagacttgaaccaactaaatcggagctaagatgaattagttatgaatttttaaagattaaatcggattaaaacacttaaatcggtttaaattgaattatgactcaataatgaattatttttgaaaaggaaaaggggatttattgcgtcagcgggctagggtttggtggaccgggcgcacgggcggcggttcacgcgaacggacggccgagatctaaccgatccaagatggacggccgagatcgatcgggtccacagcggctcacggcggacgaccccgatgacgtcagcaatgacgtcaccgacagcggcggcggctcggcggagcggacggcgcacgctcgccggcgaacggcggcgcgagaacgcaaacggaaggcaccgggacgaagcgggcggcacggcgaactcaccgacgaccaaaacgacggcggagaagcaacggacggcgccggcgacgaggaggaaacggcggagttcttcggcttgacgacggcgatgatgctccggcggtctccgacgatggcgaagcggcggacgaggacggcgacgacttggcgaccacgatgacgtccttcccgagcgacggcgacggctgaaacgacggcggcacacggctggagcggcggcggcgacggcaaagctagggcacacggcgctagagctcttccggcgacgagaagcgaaggcgagggtggcggcgagaagagaagactccgggggtccttttaaaggggctcggaggcggcggcgaaggcccacggcgacggcaacggcgaaggaaactcgcggcttggagagaggaaagccgatccgattcgaactcgaatcaaactcattccaaaccgattgagccaaagattccaaaggagaaaaggtagaggagatcccggagattgtttcccctctaacaaatcggccggagaaggaaaggaacggccggattggaaggaaacagcggcggcggctcggcggcgccgcgctagggtttcggcccgaggaagacgacggctccgacaggcgggacccacctgtcagcgacagcgagggcgcgcgcgcgcggctgactgggccggctgggccgaggagagagaagagaggttttgggccgactttcggcccaaagccaaaagaagactttttaaaacctttttcaattaaaattatttcttaaatgcaattccatttattacaaatactttcttagctcaaataaatcccagaaaaatctaggaattatagaattaagcaaagtatttaatgaaattttatctggccccattttatattggaatttattaattaaacttagattttcttttcaagacttttaaaattatttctaaaaattccatttaaacaacaatttatatattttgaattttcagggtgtgacaaacctaccccccttaaacagaatctcgtcctcgagattcggaagaactggcgaacaggtgcggatgagctgacttcaattcatcttctcgttcccaagttgattcttcttccgagtgattactccactggactttgcaaaaacggataactcgattcctggttcttctctcacttgtttccaggatacggattggtttttcaacataggtcagatcctcttggacttctatctggtcaagattagcttcttcggtaggtacccttaaacactttttcaattgcgaaacatggaacacattatggactcctgccaaagattgaggtaactccaactgataagcgacctctcctcttctactgacaatcttataaggtcccacaaaacgcggtgccaattttcccttggtatgaaaacgatgaactcctcgaaaaggcgtgacacgaagatacacataatctccttcttcaaaactcaaatccctacggcgattgtcggcataactcttatgacgagactgagccacacgcaatctttcttgaatgatctttaccttttcttctgcttcccttaggatatccatcccgaaaacctgacgttctcccgtttgatcccacaaaagtggagtgcgacacttccgaccatacagtgcttcgtaaggagccatctgaagactagcttgataactgttgttgtatgaaaattctgcataaggtagattcttatcccaacttccaccgaaatctagagcacaagctctcaacatgtcttccaaaatctgattcaccctttcggtttgtccgtctgtctgcggatgataagcagtgctaaagttcagcttagaacccatctcttcctgaagtttcttccaaaaatttgaagtaaactgactgcctcgatcagacactatcttcttagggacgccatgcaaacacacaatccttgccatatacaattccgccaagcgacttccggaataggttgtctttaccggaataaaatgagccactttggtaagtctgtcgactatcacccaaatagaatcatggcctgatgacgttctgggtaaaccagtgataaaatccatacctatttcttcccatttccattcaggaatcttcaaaggctgcaacaaaccggcgggtttctgatgttctgccttgactcgctgacaaacatcacatactgctacatattctgcgatttcacgcttcatacttgcccaccaaaatctttccttgagatcctggtacatcttagtactaccagggtgaatggagtataaagtatcatgagcttctttcagaattgcatctttcaaatctttgttgtcagggacacaaattctttcacccaaccatacagttccttgctcatcctccaagaaaccaatagcttttcctcttctcatattcttcttgatctcttaaatatcaggatcattaatttgggcttctctaacttgatcaattagagtgggcttcgcttctaaggctgcaacgaaacctctaccgacaattcccaaatttaatctttcaaattccttgcataattccaatggcaactgtcgtccttttgtagcattgcaatagccttttctgctaagagcgtctgctacaacattagcctttcccggagctaagatgaattagttatgaatttttaaagattaaatcggattaaaacacttaaatcggtttaaattgaattatgacgcaataatgaattatttttgaaaaggaaaaggggatttattgcgtcagcgggctagggtttggtggaccgggcgcacgggcggcggttcacgcgaacggacggccgagatctaaccgatccaagatggacggccgagatcgatcgggtccacagcggctcacggcggacgaccccgatgacgtcagcaatgacgtcaccgacagcggcggcggctccgcggagcggacggcgcacgctcgccggcgaacggcggcgcgagaacgca

SEQ ID NO: 26521 - DNA, 859 bp, Oryza sativa
gagcttctttcagaattgcatctttcaaatctttgttgtcagggacacaaattctttcacccaaccatacagttccttgctcatcctccaagaaaccaatagcttttcctcttctcatattcttcttgatctcttgaatatcaggatcattaatttgggcttctctaacttgatcaattagagtgggcttcgcttctaaggctgcaacgaaacctctaccgacaattcccaaatttaatctttcaaattccttgcataattccaatggcaactgtcgtccttttgtagcattgcaatagccttttctgctaagagcgtctgctacaacattagcctttcccggatgataatgaattcccatgtcataatccttaattaattccaaccatctccgttgtctcatgttcagatccggctgagtaaagatatactttaaactcttgtgatcggtatatacctctgtacgagtaccgaaaagataatgacgccaaatcttcaacgcatgaactactgcagctaactcaagatcatgagtagggtagttcttttcatgcggacgtaactgtcgagatgcataggcaaccaccttcccatcttgcatcagaacacaacctaacccaagtttggatgcatcgcaatacacttggaaacccttctttggatcaggcaaagtcaaaataggagctgatactaagcgattcttcaactcttgaaaactctgctcacattcttccgaccacttgtacttcatatctttctgaagcagtcgtgtcatgggcttagcaatcttgaaaaaattctctataaaccttcgaacaacccatacctagtggtaaaagctgtcttaggtatatcctcc

SEQ ID NO: 26522 - DNA, 4874 bp, Oryza sativa
gccataatactactgcggtagatccaagcctacttgtgaattatcatatagtaataaggctgttcttgctaatgtttacaaggaaccatgtacaggactatgcacacaaatacattaagctgattgagttacattggcaatttatattcaggtaccaacatagatgtcatggtggatgcactagttactctagggtgttacaaatgaatggcagcatctttatatccatttataggtgtatcattttgacatattaatttggtactatatgatcagattcaacacagaaattctcaacgcgactgaatttggtgatcagagtgtaactcaatgtccagaagtttttgaggaaaaacgaagtgaacaagcatcaagtatgtcaattcgcaaaacaattttgttttatttttgtctattagtattgacaagatatagttttttaatcaatcagtcagaagcctgaacctggatcaactagttgttaatgatattggaaaaggagcagtgttgactttttcacagatattggctgctacaaacaatttttcagggagatccttaattggacaaggtggatttgggcctgtttacaaggtactccgtagttctcttcaaaagtaaaccttaggagttaggatgaagaaaatcctgaacttttgaagaaatagtaatattagaattctaaatttgcagttcttacactcgctggatcaaatgaaaaatttttcagccaataattttaatctcacccacataactaatctttctataatatttttttccataacagcagtacataaataatgcggataggatattttgaaaaatttcagctcctcccatgatcttgctttagaacatgttgtcatgtcagcttcttgtaacatgtataacatccaggaatgctttttatggcattatctagaaaatctatgaatgctttgaatatgcgcatatctgaatattttgatttacaatgcttagatgtgctttattaatctgaatttaaactttctcagggaaaacttcccaatggacttgagattgctgtcaaaaggcatgatacttcttcacatcaaggtgaagaagagttcatggctgagattgacgtcataccaaaacttcgacgaaaaaatataattgagctgattgggttttgtgttcaaggcaaagaatgtattcttgtctatgaatacattccaaatggaagtttggcttctaccattagcggcaagttttctattttgactaagaccaatgcctccatttttttttctctaaatgatatctggtatttttgtagatgaaacaaaaaggatattgctaaattggtctaagcgccttaaaataattgaaggaatctcagatggtcttctttacctacacaaccattctcccaagtgcattgtccatagggacataaaagcaagtaatatcctcttagattatgaaatgaatgctaagatttctgattttggtctggccataaaattagctccgaaagcaactacagaggtgcttgttcgtggcacatggtagatactctcccagtctccctatactgtaaactagttagagatgcaactctcatctttcccttgataagtgtagctacaggtgcactgctgtgacgatctactgtcatctttcaggggttatgccgatcctgaatatgttgctactggagtaatctcggagaaaaccgacgtttatagctttggcattgtactgcttgagataataagtggaaagttgtgtgtatctggatataatgtgaagagcagatctcgacgaacaatatttcctgaatttgtaagtattccataactgcacctctatttttatcaatgttctaagggtgaatggtggtatcttcttattagaaaatgtgaaaatggtactactctctggtagtgtggttgataaattccaacctgagagcgccaactgtgaatagggaaacgtggcgcggtgggatgagagggcgaggcgagaggggcgacctggctggcgacgggccgaccaccgcggctgtcacctccggcggccgctccagtgccctcaccattgacttgccgcctctcctcccttctccggcaggtatctccaagctgcgcctcccttctccagcccgggctcttaacctctctcaagttcgaccaggtgaagctttccaaaacctcatccttcatctcttccactgccctgttacccctatcgccactacccttggcccgtcaaaaatcatcccaactcctatttggctttgcgctgctccctctaagccgctcaactcgctctatgtcaaaaatgctcttaatttctggttcagttcttcgttttcgtctttctctgtttcttctttgggttttggtttgtttctttctcatgttgcgaacaaagatgtggctacctcgttgtttcttgcgggttcgtctgttcttaagtctgctggtttgtccatccatttgaccaaagattcagctgcaaaggatattcaagaaaatgttacccggttcttggttcagtttgaaggcagttcgtccgttccctctctggtgggtgaaaaagttgttcccgcgcttcaaacagttaagccagcctttactgcaacgtcacgtcatattggatgctcccaacaatccagcaagacctctaccccctctgtgccgacaggccctgcattgaagtctgtttactgccctgtaacaaactccttcagagacgctctcctctcacagccaaaacctaaaccccccgctcgctcagccacttctcgccttcctagcaggggcagaaaaaacctcaccatgctcaaccgatgctttcgctgccttggttctgatcatcaggtcaaagattgccgggatcccttgatttgcgcatcctgccgtcgagcaggtcacaggcaagattcttggcggtcatctatggcttccaacatctcccctcgccgctcatcttcctccttccacccatccacagcaaactccacctcccgcttcactacccgctgggtcaggcgtgctctaaacactccagccccacctccgcctcgcttacctactgccccataccctcgatccaaccacagctccccccctccagataacctagccattgttccttatgttcctcctctgactcatgtggatgcgcagctggaagatgtgattgccatgttggagagcagtctttgttcctctccggtcagatctgttactgctggacctctggtccccatggaggttagtgagaatgcggtcacttcttctgttgcttctcctttaccggacgtaagaaatgccctagtctgtgtgcaagatagttcaatctcagtggctgccttagttccagttcttgcatgtgctgttaatgatctagagactgtctcaactgaagtggtacctgcgactgtttccttggtgtctgttatgcctacaagagctgctgcggttgctgaagttgctcatgctactgttgagtccgttgttgttccgtcctctgtcagcgaagatctctcgccagcggtcaaccttagcagtatgccacctcgtctcagatgcaagaataaaggtttcctcgcttggtacggcgcctgtccatcttcgaggcagccaagctcggtccccccacaggaacctagggatatcttcgtctgttcggaacagttgtctgccaacccaattctgtctccacctcaggatcctgatagcacgagatcgccacctccgacattgagtggcccctcagctgctgagcaaatcagaagagctctagcaggtctaagtccagaaggatctattcactctgcttcactctctccaggtcgggtgccagtcattacttccaatgacactactgctgcgcaggactttgcttttggggaaccagatccagttaacatatcaggagacagtgacgatgatattcttgatatctttatcccctttgttgacatgagagtaactgctcattacgccactgcttatgttacccctccatgtgaatgccctggcagagtaattcgaaaagcaatgcaggatgctcaccctcgttttcagttcactctcatctcagcttgtagaggtgcaatgactctaagatttattcacagtcaggacagagactttgcagttgatcaccaggagaatcttacagctgaaggccacttggttaggcttgaacggcctgaggacagtgcggctcgcttcattcaacacaacactatgctgtccgaactagactgtattgacttcccgccagagatgttgttccctaacaagataagaaatgcttttgaaaattacggcgagctgatggaagtagatgatcaatgcctctatggggacgaacaatcctctctgcgtcttgttgttctgcactatcctggcaagaggatgagccctagatttcggctgcgctacaatttggggattgtctgcactgtctatgtcagggttctaagaacatgggagctggccatgaacgtggatgaagatggaaattacattaagcattatgaacagtttctattccctcatcagttggatcctccccgttcaggaccaactgttggaccagaggcagagttggacaacttgaatcaggctccttcaaatcaaatctctaacaaccaaggacttcagaacaggggaagattgcttgcgattctgcctgcagctagcactgtcttcattgaggaaatctctgatacacctgaaatttttgtccctccgtcaatccattctgctccctccagtatccatgactgcctccaggacctcgtgccctcagatactgaaaatgaacatgagctttcagcccggaaacgcagaaggcagaagaaacggacaattgattcagatgtcaag

SEQ ID NO: 26523 - DNA, 688 bp, Oryza sativa
tttcaaccaaacaataaactccataagcctgtttgaattaccacttccagacagactatacacctggtcgaacaaaagagaagttccagtcctggcaaggatagaccgagcttttttcaacaatgcttggaacaacaccctcccaaacacctccctctcttcttgcactagaaccacctctgaccatgttccacttcttctcactgcttctacttccattccaaaatcgaaaactttccgctttgagaatcatcttttggtggaccgagattttcttccttcagtcatgcacaggtggccacaacagctcaatatgaatgatccggccgcttgccttgctgccaagctaaaacagacaagatctatcatcaaagtttggatgaaagaacacaggaaacgtagttctctcaatgaagactgtaagttcacaattgatctcctcgactatattgaagaactcagacctttgaatgatggggaacgctgcctaagaaatcttgtacaggagaaattgtttcaggccatccaaagcaaggttgcatactggaaacaaaggggaaaggtcaagcggctaaagattggaattgacaattcggcattcttcaaggctcatgcatcaaaaaattacaggaattcaaggatcagatcaatcaagcacaatggggcagaaattgcagatcacaatgga

SEQ ID NO: 26524 - DNA, 636 bp, Oryza sativa
tggaaattggtcaaccgtctatcactcatatgatatttgaatatttctaccctgatggatgccgacaggaagtatgcagggagagattgctgttgagaagacttctctggatttctcaaatttgtcagaattgatttcatcaaaccgaaaatcggctgggagctcaaaatttgcaaaattttcataagcaaaccatattctagagtcctttggaaatccatcatagaagttgccgaaccaatccttaaagagttcagccaataacttggatccggcgtatgtagatgctgcctctccaaaagacatacatcggcgagttgtgatctcttggccatcctcatctatgatcggctgggatcttgggaattcagccttagtcagtgctggtctatcaaccaccctcgtggtatgcaaattcaaccaagtctgtaacaaccaccatgggccaccagtattgatagcagagcctgaagcaattcttgctgatgccaaatttagggtctggtacagatatcctagcaagaatttacccaaaggaaattgtttcttctcttcaagggcttcgactacatgttgccagtttgtggtgggaccatagcttgggccacaaaacagaaatttttctgaccacattag

SEQ ID NO: 26525 - DNA, 1473 bp, Oryza sativa
atgagaaagatgctacaatagaaagaagaaaaagggaaaattacgaaggagaaaaaccaatctaccgcaaggagaagagatttttgccaagggaaagagaggggattggaggaagaataaataccaaacccagacattatactcttattagaatctcaggtacaccgttttgcaagttgagggactcatcatatttggtattgcagttcgaggatgagattcgaactcggcgatgatctaaactgaacttgttccaatttaaaaagttgtatacactttctgggccttacaaagtagacgggccagagtcacaccagcgtcagcgggcgaggcccaataagccccgtggcaaacaacgccacgtcactgcctgacactgtccaccacactaatgtgaacttattccatttaaatttcgttgtggatcagacatttggtgggccttattcggattccagcccagcaaatgatgggccccgcagtggattgactggggcccaaacatcatcgcctcttgccgtcgtctcgtcttttcctctgcggctgaactagtcgctgatccaaggccgtcgtccactcgccatcccaccggccaccgcctccgccgcctctcaccggcgccaccgcctcttaccagcgtcaccgctgctctgcctccaccgccttcttcctctccacaagccccggtcgcccagtacgcatcccacccgtcgcagtcgacctagctgcctggtggaggtggaggcgagggggattgactcggctccggtgctccgattgagcccgcaggcgaccgatctggagacggtccgctccgcttctcgccggaggctgtcacgaacccaggtaacatccccgccctaacctctgctgcttgcgctatgttcgatcgattagaagtttagaacacacgcagaactcaggccacatcgaatcgatcgctgttcacgagatgtgctaattaattccatcggatttttatgggactgcagccaatttagactaggaagcatgaggaggcgaccgggaatcgcgggtttacagaacgcggcggctactcgcgtatgtggacatcatcttgcttggatagcttataatgttttttcttttcctgtggatcctgagatgagtgtgctcttggaaaatttaaggaccaattccggctggttggggaaaatgtggccaaggtcaggaccgatgtaatgaaggagcagcttgccacatttcggacacaactcgaagaatttgcactcaagcataaggtgattcttactcctgtattctagttgagtttgacagaaaatcttatcgtcgctattcgtatgtcccaaattgaattacacatagtgttgtgaccttaggtcacgaacaagatcagggataggccggaaagaagtgttttcccgcctatccttagaaacgagctcgaacagtgaacacaacttttcaggattacttttgtattcaagatgt

SEQ ID NO: 26526 - DNA, 730 bp, Oryza sativa
gtagctcatcaccaactacacgtctccggcacagtggaagtctactgtgcctcccttatttcttgctcctgactcaatcgcctccaccgaccacagctgggccacctcccatggcgtcccagcacggcggcgacccgcgcctcgaccgcctctcgcgtgccctcgcctccgaccacccgccgccggcggccgccgcggtccacgcgcatctcgtccgcgcgcacgccggcacgccgccccccgtcatccggtccctcctcaaccgcgccattcgccgcctctccaagccgcacccgcgcgccgcgctccgcctgctcctcctcatgccgcgcctccccgtctcccccgaccacttctccctccccttcgcgctcaacgccgccgcgtcgctccggttgctcccgctcggcgcctccctgcacgcgctcgccctccgcctcgcgctcctcccctgccgcctccccgtcgccaacgcgctcgttgatctctacgccaagtgcgacgatctccccgccgcacacaccgcgctcgccgacatcgcgggccccgacgccgtctcgttcaactcgctcctctgcgcgcacgcccgcctcgcctccgtgcccgacgccgagtccctctttgttgccatgccatccagaacccaggtatcgtggaacgccatggtggtcgtctacgtcaatgcaggggacgtctcttctgctcgccgcgtgttcgatcaaatgcctac

SEQ ID NO: 26527 - DNA, 4930 bp, Oryza sativa
caccgccgcctgtcccacgccctcatctgcccggccgcctcactgaagaagagagctgacttgtgggtcccacgtactttttaaattttttttgttgactaggatgccacgtcagcaaaactgggcaaaaatactgccgagggacctccggtaaacggtttgagagagtttaggggtacacatttctggttttgtggttaagggacctcaaaaaatctcgttgttaagttggggatctctggtgaacttattccgagaataaatggtgaaacaaggcccaagatgagtagtttaaagcttctttaattttttgaatacatatatgaagtatagagtacatatacgtattttttgtccaaaaatcttgggtatacatctgaatatccttgaatcactagtgggcccacccctgctaatatgtagaatgagatctgttttattcaaatagcaatgtttcatagaaaattggtttaacgatttcgtaagcttttgaaataatttatttttggatggtacgctttaagcacagtttctgcaatccagtcctcaagaaaaactttagactgtaactaaaattgaatctcatcacagcttactttggaagggatttgtttttgaagaactttgaaaacaaaacttgaaagaaatcttttagtttgtaatctgtataacgaaattccagtaaaactatttgaggtgggttttgttatagtctctaaagctcacttttgaaaatagttctctttttacaagcagcaaaaagatataaacccttttttggagggatattccgaagaaacacctgaatcatttttcacactttggttttggtaggttaatttggaatagcatttgaaatcattttctcatgagaaagcacacgtttcgccgaactcacagagttaagttggagatagcgaccgcccgtccggaactcagcaaggtaacgggacgtcttctccatcaactcgttcatctggcaagctgtgtcggatggattgcctgaagtttctacaatgggtatagtacacttttctcagaaaaagcaaagaaagaagaaaatacatcaagagaaagcaaaggagaatatgacctctattaggagtctaatcatccttaccttcttgatgcttttgagtcgaggatcccggagctgaagcggcatcagccgccggcatcaccggagaagagcggacaggagcattagcagccggcacaactgaaggtacatcgtcaataggtaccggagcaacatcggaagaggcagtagctttaagtccacccaatgcagttgcctgctctatagtatcctgagttgcaagtatgttctaagagacaggttatcaaaccactatgacaaagaattttaagagaaaaaaaaagaattggggaaacacggataccttgctagtgccatcagaagaagaagaagaggaggaggagtcactcaactggacagcatcaagctccgtgtcgggaaccacagagcggcggcggcggcgacgatcatcgcttgaagactccgtggatgataccctctcataaactacggggttttttcctcgcttctcacgcatggtgcggtccagctcggggtgtggagaatcttcaatacgcagaccctttttagaagatttcggcaatggaagtctgttaggacgagcagttctctccttcttatgacgccagtcacgcaggaattcgattgactcgccgtggcgtttgtatcctcctcgatcatctctatggaccgggatcttcgtgatatgctgggaagggtcgtcacccttggtctccttctgttgcttgccgccggatcctcccgggcgcttatcttcgacagtgtgtctatctcctgccgagcgcctgtctcatgttactcgcctgtcccccgttctccgcccgtctcgtgggacacgctctccgccgccccggtcgctggcgccacgctcgcctgcaaccctggatactccgtcttccctggccctctcaagatggttgcctgatgaaaaagtacaggatgatcaagaagcatcctaattccggtggctaaagaatcgacaatggatatatacctgcgatggagttaaacacctgaggcgccatattgcataatcgatgcacaggcatgaccagcaatatataggcttcatccaaattactcgtaactgccaaggatttggagtcctggccgatgacggtctagctttgtttttctttcaacgcacggccggagataagcttcaacatgggagtcctttcgtcgcatgactaaactctaccggacatgtatcgcatgagccgacacgacaccaagttaatttcgctcgctccacgatcaaaatttacttggtggggggcatgtgtttgatggtattttggcgattatatgtgtacacaagacttactcatgatggacaaagcaaacaagcagtttgtaagttggctagcttatcatttctacacaatgctcggccatgtatatacacgcaaataaatgcatgcacaggcagctgggaatatatatacttggattagtatatgtgcatgtataattaaccaataactagccgtgtgaagattggctggtgaggcaatcacgtgcatgcatgcatgtactacagtagacggtcgtatgtgtgtgcatgcctgggtgattaagcaacctatgcatatccgagtgattaatcatgggctcggcccatggccgaagacggtagctgcctacgcgccaagatttcagaagttaatatgcggaagagataaaaccagatgaattaagagataaccaacaaaccaattgattttatctctataacaaacttgatctagttagttacttcgcgcgagcgctggcgaggcgcttatcaccggactgtggcccagcagtagagaaacaaagcgaattacaaatcagatatttgacgctaggagaagctaagagataaaatcaaagaaggatatgaacaaatacaaattgatcgatcaagccttatctacaacgaacttgacgcggagcaaacggcgtgcggacgtggcgagcacagacctcagacccctatataaggcgtcgacccctcggcagctaggggcattcacgaactcatccacacattcattcaccaacgcatctagcatccacaagccacccatcatcaacgcatctacccatccagcatcaacacatccatccatcaactctcatcggcgatccatccatcgacgacacgcaccggcggcggcgagcgacttcggccggagtcccggcgtccggcaggagagggcacgcgcggtgatccgatcatcagcaagcgcaggagaggagcttgatggctagtccaggtaaaagctagcaagattgtttcgttttctttcatctacagcacgcacaaatccatgcatagggatccatctgcgcgtatcgtcgtcgccggggaacttgcggtggccgattcatctacgcgtcacagaagcctcatcgatgccggcgtctgttcaagccgacgtagtgctacttgtccctagactcgacgctgctaattcaagccgctggtgatgcatctacccgaagctgcgacctcgccgagataccagacatccttgatttgcaagcttcaccgcactggagcgggctaaccatggaggaggtcgtcgggaagccgccctgccggagcgcgccgaggatcgccggagctgccgccgactgccaagacttctatcagttctcatgccggaggtcaagcatcacgcatagcgtcgaaaccagcggatgacgatggaggcaagtatggctgcagtacagaggaaggacgacgggaggacggtgagccagtgctgttggatggcaacaagctagctaatgcatgttgattaagtaaattattgtggcaacgtggccaaccaattggaggatgacatgtcatcgctgctacagtgccatgcacaaaccaatgcgtgggctgaagaagtcctgttggtttttcttatttgtcccaaatgagatgccgagctttgattaaatccggccgccgtctatatcaaccatcttcaataattcctccctgattcttctctaatctaatctcgacgcaactgctgtgacgtcaagtcgttcaagctatgcaactccatgcatgtcttcaccaacaatctacgtcgacacgttgttcaagaccgacgaggctagacgacggagggtgggcgaccaacaccagcgcacggaccgacgaggccatggatcgctgccggcgcttacacacacacacacacatctacatcatcatcacaaccatgcatggagaacgtgaagcggagacgacgagacgaccacaagcagcttaatcggaggttctcttgcaggcctagacctacggaggtaattaactgggagcttctcgaggccccaggaatcaggagaccatatcgcacaagtcagatctgtccaatgacagattatggagcgcgcatacatatatattacattgggaatttgtatttatgatcatttaagattaataaagagcatgttccctatgttttgtttacattgtgtatttaggtacactggcacgcccgcacatatatgtatctctaaacaaacgagatctcagatgttattttccaccctaaacagcatggtgatggggactttgggagttgcggcagatagtggcaccggtggtggggacttgggagctatatgccacctgttaatatttgttaatattgtggggatgggattccgtcaaataacattcgcttataatttattggaaacaagaagtgatatatctccaaccctctaccttctaagcaagtaaaatgacaaacaatttgttgagttatataatcacacaaaggcaggggccaatacaccataagctatgctgatttcgttaagaaccaatatgtagccactatacaatgtaat

SEQ ID NO: 26528 - DNA, 1162 bp, Oryza sativa
ggcgaattcgagctcggtaccctactagccaaatcactcggattaatccctaccgtccatccgcgtgcacgggttcgccaccgcatatactaatataaaaaggaggggttgtacccctccaatcctactagccaaatcactcggattaatccctaccgtccatccgcgcgcacgaatttaccaccgcacgattccacacgcaaacttcgctcctcctccacacgcgaagacttcgctcctcctcctccacgcgtggacttcgcttctcctcctgcatgtagcgccgccgcatcctcgccgtcgccggagctcctccccgcgcgtactgccaccgcatcctcgccggagccgctgcccacgccgacatcttctgctgccgccgccagatccggcttcttccctaccgttgcggccggatccgacctcggccccatccgccgccgccgccgaggtcggcccctcccgtccctgccgccggagtacatccatgtttccctcctcgctgtcgtccacaggctccgccaatgcaatggcctctaccttccctcgaccaccgtcttctggacaaaaaacattctttaagacctgtcaatatgaaaagtacttgccattgatgttctcattttttacaaccaccaaactataacagacaatgagaacccagaaacgacttaacataattttctgttctctgcactacgtcactaatgtgcacacataattaaataaacaacttgaagcaacttgttggagtcccaattaataagtgcggaactcactaccgatttcatatatatgcagcatttccgatcccttccttgctcatggcaaatctcatatactactcattgctcatcattcttcctttcctactcctgattaatttctacaaagctatgttcagctcccgcaagcaagccggacggcttccaccgtgcccatggcagctccctatcatgggtagtatacaccatttgatcggtgatctcccacaccgctccttacatgatctatcacgacggtatgggcctgtcatgttactcaagtttggacaggtaccattcattattgtttcttccccggaggctgccaaggatatcatgaagactcatgacagcatatttgcgatgagaccgcaaagcgagataatgaagatcattac

SEQ ID NO: 26529 - DNA, 1735 bp, Oryza sativa
caatgtcaagtgatgggctatgacgtgccaaagggaacaaaatttttactaaatctgtggtcgaactcaagagatccgacttattgggatgatccagaaacattcaaacctgagagattcaagaatgatgcaagatatttcaaaggaaatgactaggaattcattccatttggtgctgggagaaagtatgtcatttggtatgaattatatgatcgccaatatatgagctggctatgcaaaccttttattttattttgactgaagtcttcccgacggagttctacccaccgaattgaacattacaaaaaactttggatttactgtccagaagaaagaagatctcttgttgcatgcttctctatatgcacaactttcttgctgattatttccatggtgaataattcaatggttgtaattttaatgatttattattttgtcagtatcctcattgtttgaggctttgatgttgtggttttcttaagcagaatatacatctgctgcatatagtatgtttaaaaactaatatctgcaacagttcccatccgtccaaaatataagcatctttagtttagtttttttatggagattaaagtgaagtgaaaaaattacaatacatttaattaaaatacacacatatcattattataaagcccatctataacaggtcaaaagataaggacaagatttccttatagcctccacaaggagtatattcgactcggagaaacattcttaattaaaatggtcagtgtgttaggataaggacaagatctctttgtttgaagattgcactttgcaacagccgacacaccttgtggagtatttttcagatctttctcccagtcatttgtgatgttcatatgatgactttagactgaaattagagtgcccagatggtattattgaagcccctcaatgagaagtgataaaggaatggaaatgcgtttttgtttataatacttgacttgcagcaaccatggacgactgcagctcccataatgtgtttttattaaaatatttgatttgacttgcagcaaacattcacaaaactgcagtttaattgactgcaaaagaggcaaacctaaaccaagtgggagtccatctagttaatttggactacttaggtgaagtccttcatgtttgccgcaaattttatgggtagcctgttaatgtgtacatggacaggataaacttcctgtttttctaccatgtgacccatttgtacaaaacaagcattatgatggttttcataggactcattcattactaaagtacatgcatgcgccatgtcctcagggtatcgcaagtagagtggaaaattcaccacaaaaaatgattttcgatcacagttgattgggagtagatttatctcgtttttagcgcgcaagcttcccgaactactaaacggtacgttgtttgtaaaaattttctatatggaagttgttttaaaaatcatatatattatccaccttttacatttgaaataattaatactcaactaatcatgagctaatgtctcagctcattttgcgtagcttctgatcaatcttcttgttttcccttctctcaaacaatctattaaaactatacaggtggtttatgaggaacccatgcagtacgccaggtgccgtgtcaccgtttgcatgtgaaaatagccctactttcatcatctcgggtgactgcatccaaaaatattttggaagctgagaagcataagtcaactgcctagaaaata

SEQ ID NO: 26530 - DNA, 41444 bp, Oryza sativa
tcgagaatatattttagagtcgttttgggacgcgacaaacctaccccccttaaacggaatctcgaccccgagattcggaagaactggcgaagagatcgggatgggctgctttcagctcgtcttcacgctcccaggtagcttcttcttcggcgtggttgctccattggaccttgcaaaaacggattacccggttcctggtcctgcgctccatggtgtccaggattttcactggcctctccacgtaggtcaagtcttcgcgaacttcaatttgctctgagtcggcctgctcggatggcactcgaagacatttcttgagttgcgacacatggaacacatcatgcacgttgcccaaggaggcgggcagctccaactggtaagcgacttctccgcgtcgagcaatgatacggaaaggacccacgaaccgaggtgcgagcttcccttttgtctgaaacctgtgtacaccccgcaatggcgtgacccgaaggtacacaaaatcgtccactgcgaattccaggtcacggcgacggttatctgcataacttttctgccgggattgtgccacctttagattatcccgaatggttctgaccttcgcttcagcctctctcaggatatcagtcccgaacacttggctttccccaacttggtcccactatagcggtgtccggcacttgcgcccatacaacgcttcatagggtgccatttgtatgctggcttgatagctgttattgtaggagaactcggcataggggagactcttatcccaggtcttcccgaaatctaggacgcatgcgcgaagcatatcttctaggatctgatttagacgctcggtctgtccatctgtctgcgggtgatacgcggtgctgaaatttaatcgggtacccagctcttcttggagcttcttccaaaagtgagaggtgaattggcttcccctatcagatacgattttcttgggaacgccatggagactcacgatcctagcgaagtagagctcggctagtttgttccctccataggtggtcttcacaggaataaatcgagccaccttggttaatcgatccacaactacccatatagaatcatatccaccttgggtttttggaagtccggtgatgaaatccatcccaatttcatcccatttccattctggtacttggagaggttggagaagtccggccggccgttggtgttctgccttgacacgctggcacacatcacacagggccacgaactctgcaatttcccgcttcatactaacccaccagtatttcttcttcaagtctaagtacatcttcgtactgccagggtggatggaataaggactttcgtgagcttcctgaagtatcagctgtttaagttctctgttatctggaacgcatacccgatttccgttccatagggttccgtgttcatcctctgtgaaaccagtggctttaccctgtttcatattcttgaggagtccacgcatgtccggatcattcttctgagcctcgcggatttgatcgagcaaggtaggcttggcttccaacgcagccaagaatccacgacccactatgcttagattcagggcttccatctgttggttaagttcgagtggaatgccacggacgttaagagtgttgcaatggctctttcgacttagagcgtcggcgaccacgttggccttaccaggatgatagtgaattcccacatcataatccttgatgagttctaaccatctcctttgccgaagattcagatccgactgggtgaagatgtatttcaaactcttatgatcagtatatatttcacagcaattcccaatgagatagtgccgccagatttttagagcatgaaccacagcggctaactccaaatcatgggtagggtaattgccttcatgaggccgtagctggcgtgaggcataggccaccacatgaccgtcctgcatgagcacgcaccccaatccttggcgcgcagcatcacaatacaccataaaatccttgcgagtatctggcaagattaacactggcgaggaaaccagcttttctttgagagtttggaacgccttctcgcattgcgggctccacacaaatttctcttctttcttcaacaactgtgtcatgggtcgagcgattttggagaagttctcgatgaacctccggtagtatcctgccaaacctaagaaactgcgaatttgagtgacggtcttgggttgcctccaatcagtgacggcggtcactgtttcggggtccacagcaactcctttagcagatatcacgtgccctaagaatttgacttcggacaaccagaactcacacttgctaagtttggcatacaattgatgttcccgcaactttcccaacaccagacggagatggtgctgatggtcttcctctgtttgtgagtataccagaatgtcatcaatgaaaaccacaacaaacttatccaagtattccatgaacactttgttcattaagttcatgaagaaggcaggtgcattggttaaaccgaacgacatcaccgtgaattcatacagtccgtatcgcgtggtgaatgcggtcttcggaatatcttcttcgcggatacgtaactggtgatatccggaacgaagatcaatcttggagaataccgtggcacctttaagctgatcaaacagatcatcgatccgaggaagagggtacttgtttttgatggtgacttcattgagagctctgtagtcaacgcacatcctcttcgtcttgtctttcttctccacaaaaatcacaggagcaccccagggggaagtactcggacgtatataccccttttctttcaactcttccaactgtttcttgacttcagcgagttcatttgctgccatacggtagggtcgcttgtacagaggagtggttcctggagcaagatctatccggaactcaatctctcgtttgggtggcataccgggtagttcttccggaaacacgtctccgaactccctgacgatggggatttctgacagtcctatctgatgaagttctgaactactgacagaggttgggggtgcaaagaatacaaccggttgttccggccctcggtacagagtgacagtgcgtctcgcgcaatccactactccttggaattgagccaaccaattcatcccaaggatcacatccaagttcttggtgtctagcagaatcagatccgagggaaaaggaatcccctgaatttctatagggacggcaggactataatactttgctgtcataacccctccaggggtggtgatgaggagagggttcctaagccgttctacccccaactgatttctccccacgaatggcacagatataaacgagtgggaagctccagagtcgaacaaaatggtagcagggatggaatgaatgaggaacgtaccaacgatgacgtctggagttgtcagcacgtcctcggccgtcacgtggttcacacgaccccgaatgacatccttaccaccgttgttggagcggggaggcgcttggccttgctggcgcctcggcttcgggcatttatccgcaaagtgcccgggctcgaagcagttgaagcacagacgctgcgggccttgagcgtccctgcggccttgaccaggctgcacagttggcgtagaaggacggggcgcacgagtcccttgctgactctgctgttgctggggctgtgggacgcgcaccacgaattgaggtcggggcgcggagcgaggttgttgctgctgttgctgctgcgaggacgatccccctggatagggattggtgtagcggaccctttggttagcaccctgttgattgcggaaattcgccaagcggcgcttgtgcgactccagttccttgtgcttggcttccaagcggatgctcttgtccaccagacgttggaaatccggatagtccccggagactagacggacggacagctcagggtccattcctgaacttctcttgcttctcctcatcttcccgcacatcctccggggcgtaacgggccaggttgttgaactcatgcaaatactccatcacggagaggttgccttgcttcaactctcggaattcccttttcttaagggccacgactccagcgggcacatgggttctccggaaagcggcggtgaagcgagcccaagtaataggctgcccctctggctgcgtagcctggaaatggtaccaccatagagatgcgggcccctgcagctggtgggcggcgaagatgactttctcctcatcgctgcactgcacagtgtctagctttttccccacggcatgcaaccaatccaacgcatccacggggttgttggagctagagaaggtgggtggacgaatgcggaggaactcggcgagcttaaagtgttgtgggggtggtggtggagcattctgttgtagcggatttgggagtgggggaggaaacagtcatcatgttggcctgctgggcgaggatttgggtgagaatggcgttggtatctggtggtggtggtgaacacgaaggagaaggtggaggtggcctgccatggttgttgtggttgctgccctcgggtttggttgccatcaccggtattaacacttctcctggtcgtcaccatctgaaaaccccacacataaccagcaaacagagagagctgacaattaaagctaaccaccccgactaccataattcttaaatttattactgctattaaattggttcattaaagttcaaattgcttaggcaaattaaataaagacaggctccgacacaattataccacacaccggcataaccatgccccacacgactccaacaagaagacaaacgagaaagaacacacgcgcaagcctactaacagctcgtctaccgctgcgacgggccagggcggaaggtgagcaacagcgcatcctccgtgctaccaacgccggaggcttccccctcctggggaaccatgggcgcgggctcggcacgaggggtctccatgaagcaggtccacgccagggactgacgaacaagctcgggcctggaggtgctcttgcgggcggtgatcttctggctgcggcagacgcggcggcgcttggggcgacagacctctccctgggcgatcttgagctgatgcagctgcgcctccaccgcgtctaggtccttcttcagctgcagattctcctgacgcagctccaggatcttcatgttgttctcgaccatcccacggcgcaccatctgatggaagtcgatacgagccgcgtcgtacgcctccaccatgcacgctaggtgcacgatggtagcgtcatcctccgagctagcatcccggaaggtggcgtagtcgcgggctcctccgcgacgagggtggtagcggtagggcgagtgctgcaactcgtccgggtagcgctggtgaagagtgccgatggcgaggagagcggcgctctggcaagcggcggggaaggaatctccacccgcggtgactgccaacgaagtccgctcgggagagccagtgaggatcactgcagtaacctcccaagcagcgtggggctctgcatcgtcaccctcctgctccggaagcggcctggcctggtagtccactccatgcggataccccaggacaacgcacatgccccgcagctccaagacgaagccagtcatgtccaaaccacgacggctgacgctgccggccatctacaaacaaaaacaaaaagaaaaacaacattttaaaggtcagattttggcgataaatgaagcagcaagacagagagagactagaggattttcacaaatacaaaggatttttatttttgaagatattgctaaggcttgggatctacggctcgtcctagggtcaagggtggctctgataccaacttgtcacgaccggaaataacccaacgggcgttcctgacgtgcgtgcattaatccttgtcccaggaggcaaggtacaccaaaggttgatacaattcagagtttaacaagcggaagcgtaaatagttaattcattacatgggcgacgaaggcccaacacacacaaagacaaacgagaagcaacggaagactagggcgaccaccacaggcgcttgacggcaggcacgagctagacaccaaagccttcatcttcaaggggatcctcttctgggttgggaaaaattgagcaagactgagtacaaccaccgtactcaacaagacacacccacaagtgcataataaatgcaagggagaacaaaggagttacaatataaagggttagggttgtggtaaacagcatttaaagatatttagttgctcaaagctatttggtaaacacgattctagaactatacaatattatttatcaaggccgtgaacccacacaaacctgccttaacccaaggcctacgatgattcagaccgaactggcaacccgacccagggtcccagctcgtcccaagccaacccaggccaaccattccacattttagttgttaagcaggtttttagaattaaaacactaacttgggtacattgctcggcttgtccataaccgagggcgcggctattcgaatagattatactctgatcagaggtgtatatctttacccacaagacacatcttcctcacgtgtagccacgtgccacataccaccacggtatacagacggaagacgtgacatagtttccaacccatcctagctatagacaagagtaccgacccaatcccacctacggccgtaacccccgggacaggcaggcaggactgagcccctagcagcaggacaccggccctgtgccatgacatctcgactaccgagccgcagctcgtgtagccttcatttgccctggagatgtccatcgacccccgacttcttccatctccatccgtgtacttttgtttataaccagactgagccacaaactaagccttacccactagacatgtggaagtacggtagtgctttgcaacagaggcccgaagaccggtccttatatggccgaggtgctactatcaaaaccatgcaccctgagcccagcctaaaatcattttggggattttgaatagagggggcggtgtgaagccagttccacaataaaccaacaattccaaagtgtccaggtgttatgaacattcccaaagtctagagttgtaaaaccgcctaatgttacctaattaaattgcgaagcatctacctaaaattatactagtggtactatgagtagagtgtccactagttggggttttgtttaatctagggtgaacaaggtaataataacaataacaataataaggtcataacaaaggtaaatgggcatggctagataaaacagtgataacgcgagaatttaaataaagcgataatgcaataatttaaagcaacataattttataaactgggattcaatatgttcaaagatgatgtgacttgccttgctcgctttcccaaacgtcggcttcgacttccacgaagagcggatcttccgaagctgcagcgtctacacgaccaacagaaaagaaaaagcttttactctaataaactccatataacaagcagaaacaaagcacaaaaatgggttcttgacttcttaaggaaaaattagagacttgaacggtccaattccgagttcaaatggccaagttatgcccatttgaaggttatatgctctttaaatggatatttgcgaatttcttcatttaaattttaatttaaaattagatttattgcgtcagccgaggggaggggcgcgcggaccgggtccacgggagtggggcccacgcggcagcctcacggtccacggtggaccgggtgcacccggctcacaccggccggcgccgtgggtcccatgcgtcagccgcacccgagggcgcgggcggctgacggccgggccccacatggcagccgtgggacgcgcccgaaggcggccacgccggcacagccgacgggaggcggcgcgcccgcgcccctatggtcgccggcggcggccataggcacggcggagcggcggccgagagaggggagggaagggggaaacgaaacggcggtccacggctcaccccgggtcgacggcgacgacgggaacggcgaccggagcggagaaaggcggcggtgcggcacgggtcgacggggacggcggcgttccggtggtcggcgaccgaaacggagaggtggacgaggtcggcggggatgcggcgaagccgaaggaggcgacgccgaagcgggagaaggtccggggcgacgacggcggcggaccggagctcggcggtgacggcagagagagagagcgacggcgcgagctcgattccggcggagagagagagagcggcgagtggcgaaaacggcggagggaggcacggggagtgtttatatagggttgggagggggagagagcggccggatgagggggaaacgagcgcggaagatccggccgccattgatgcgccggcgaggtttagggggaaagatttcgaacgaatccgagggagagagagagggaaaaatggggggaaagagggagggaatcacggggaatatttcccccctcttgattgcacgcgggacggacgggagcggcgggattcgcggcggcggcgacgctagggcacgggcgaggcggcgggagcgacgggaggtaggggatgacgggtgggccccacccgtcagcgagggtggcgggcgggcccgcccgtcagcggcgcgcgcgcggggaggaagccggatgggccgcgggggagaggggagagagggagagagatgggccgagacggcccaagaggggggggaaaagactttttagggtttttctttttataaaaccattttaactttgtttatttcttcttaattatcattggtgctctgaaaattccactaaaatttatttacgcattttaggcttttgggaaatatacaaaaatcctccaagccttatttgacttttaacttagcacattttaattgttggaggctttcacatggattttacttattctatgcataatttcgagaatgtattttagagtcgtttcgggacgcgacacccatgatgctgcaagaaggacctcgtgaagcactttgtgactacagatgctacatcagcacccgagaccagtcaaagatgatttgaaccatggtgctatatcaaaccaagattacagaactaaatatgtaatggcaaatttgctacatgacacttaaaaagtatggtttttgctgctagacaccacaagaacgtgaatttgctcgaggacacttcaaaagtatgtaatttaccatagaacaccaaacacattaaaatacaatatccatccaattaatgacagagaaaccatgtaaaaatgtcagttttgtcctcatctacttctcccttctcccttctcacgtaataagggatatttactgaaatcgaaacctacgtataaaccttttaccgatttgtcttaaaccatagcagttctattactgttttatgcgtaactcataaaccatctaacagaatgtggcaaccaatacaacttcggccatctagacaaaattgtcttcaactttcatgttgcgcaaagaatcagattatgcatctgttggtgtcagattaaggaaaaacgaactgttgtctttattttcagacccggcagcagtattattttttttttgttgtttctcctaaaccgtttgtaggattcgagcgatgactacaaacttcatttaggacaactaacctgaaacccgattgtttgctaccagttttgataatacagccagtgcataatcaaaaacctcaaaaaattgtacaaacgaccagcgaattaatttctattcaaatctcttacgtctagggactgaaaacaagttacccttgcaaaggaggaacactaacttgcaacaaatttccctaatttacgagatcgctgaattcctcaaagttgctctgccttttcctctccttcctcatgttcaactgcttcctggtctgctctctggacccttctctctgatcgatgcagcagcagcagcagcaaggccgaagagatcacatcagcagcagcagcaaaccatgcattagcagcagcagaaaggaatagatcagatcggcaacagcaggaaacggtagaagaagaagcagcagcagcagcaggaactcaccgggaaaaagcaaaacagaaagaaacaaccggttgcgatggatggcgacggctgcggcctccagctatggccgtggtggcggcggaaagacggcggcggcaaccaggacgacagtggccgcggccacagcacaggagtgtggcggctagggcaggctgtagcgttctctccttttttcccttttttttatataaagagactaaaaggagatctaacggtttcaatccccggaacatcgtttggactccgattactataaacttcgagtctattttgcagtactcaacaagttctatgcatccacggtttttgagattgcctattcgaacaacggtttaaacgttgaacttttctgtgtttgttccaattttcctcgaaatatactaatttgaaactcgggacattacaagtatagggctccaccaacatgtgtttaattccaagtcaaagtatgcaggtgagcatgcattaaattctccattaatcatgttatatataattaagagaatttcctaaattaaaataattttacaaattaacagagcgagtaagcagggtgtgtctttaaataatatgcaaaagccagtttattaagacaacaataggcagtttattaagacaacaagtaaatttagtaaagcaggtattaataaatacatatgtccaataacacatcagagatctaatggaccattagatagataattgtttttacaactcatgatctacttaactaaattatctaaaaggatggggactaaaagttaaatttgctaatttaattaaaactaacgttaacgaaaaggaagaaaacatgtaaaggggtggtgggccgaaatcaacatgatgcggcccaccaggctggttagggttagaaacgtaaccatcccgcggtttctccgccaccgccaccgtcaccacccattttcgctgccgccatcaagtccacttcgccaccgccgccgagtccaccaccgtcacaacccgtatccaccgccgcttccccttcgagtgcatcgccaccgctgttcgcatccactgtcgctccaccttcctccgctgcagcatcccccttttccgaaagcggcttgctggccgaagttaggccgatagcccccactcctcatcggagtcagagtccggtcagacctatacgctgttccccactccgtccggagcgtgcggctcgcagaaccatgaggaacaacgcggaggccggggcggtgtgctgcaatggctccggcattgacagcaagacgaggacggactgaagagtgccggctcccctgtgcacgtggctaggattccggtccagccgaaacccggtggcacgggagttggggaacaggcatcggattggcaactgtgtggtcattggagatggtggaggtgcagtcggtggtggcacggtgacgacaagcggaaccggtggctattccatctcttgcgggagggatcactactcatcggtgggcggcaccatcgcggttcatccatggtgagtacaaaactatacccctagacttggatgcggtggagcgcccccagcgaccggcgaggcaggggctggcggagaaggaggaggagtgaccggaattgcagcgacaagaattcagtgttgagggtggtggtggtggccaccaaccctagtccgacgcctgtcatgctgatggtggcaactcctcgtcgagcgatggtggagatggcgaagaaggcgatgaagaaggccaggaatggtgtcgatcatggaactgaaggtaggtataccttcttttcttcatcactttttctcgtgaagatcaaagtactgataacgtgttgaaaaggcaattgagattgtaagagtgagagaatataacgttgtgtgctttattgattaactagaaaatttgcgtgccagttggcacgcccaacttttatagcccgtaatatcgtttgaagggcttttaaatttgggtttaaaatactgatgatcacacaaaaaatttgctggcagagctgttggtattttctgtcctgagaaaattcaattaatatgagtactttataaaaaccatacattccacgaaacccttcaacaggttttacttttgtgtttgcaaaaaggttgtggaaaaagtagtaacatacgttagctaggggatatcgagttaataagtaaaatgttttttaataaaattgcacgttcacgtttttatgttttagcactcggaatctgtggatttgttttattcaaaaaatgaacgatttttttaggaagaaatatatatattccaacatgaattcattttggaattgcattttttttaaacgcctaacaatgcaccactaatcttaagatcagcactcttctttccattcttcccacattcagatgggcttggatgggccattggagctgcatgtcacctgctgcatgcctgcatggcccatgatgctgcacgagcatattgcaagcaagcaaccgcgtagagccgtgtatgcgccgtggggaaaaaggtacactgaaggtccctcaatttgtcatcgagttccaagatcatcccccaaccataaaacctgatacaacgtatcccccaacttacaaaaccagtgcaaacttaatctcttagtggttttgacccggttttatctgacgtggcgactgtgtcagcgtgggacccacgtgagccccacatgtcaggatgccacgtctgcacgctagcctctcccttcctctcttatcatttctcctttcttctcaccacacagcaccgggcggagcagaacagcgagctcgccggccctgcctcatccctcttcgtgcgtcgctgccggcctccccgccttcctcgccggcctcaccgtctcctccctcttcgcgcgttatatgcagctgaagacaaagcgagagagagagatgcagcgggtggaagttgaagcggctactcaacatcggggaggagcggaagctccgcgacgtcatccgtctcgtttctgccagtaatgccggcaggtctaaccgcgttcttcttgctcctttccaaccatcccgaggtggctgccgcaatccgggacgaagtcttccgcgtcgccagaggcagggaccctacggctaagggtgtaagttgctaacctgcgaaacccacttacaagctaaaataagccgcgagcccgcttattttgacctataagtgggttcgcggctgacccacttacacacctacccacgaccgcggaccgcctccttcgaattcgaaaagctaaagttcgaccccactgccgcttggagtatgccaacttcctcgagagggttgagatccagttcgagttgggtcggcgccgagtcccagtgcagcggatgatgcctgccagccgcatgggtatccgggaaggtcgacgccttctggccggggctgagcttgagccttgagctagctagctctcgtcaccattcattcaggttgacgccgctcgaggactcgacgtcgtcgtcaaccgcgacgtgatcccgtttggtttgttttctgacgaattccaatttaaccagacgggttgttcgtcctggtcctgaatcctggttggctagtcgatcgatatatgcaatgtgacatgccgattgaaattcttttcaacaccatgcatgacaaatttatcatttcttttggtctggggagtgtgcgccggcgacctccactccctccgccaccgcatgcgctcccacagcttcccctacccttcacctacttctacgctactaaggtctcctccggttcaagcggcggcggtacgtagaggctgcgtgcctcggtggcgcctccggagttcatgggcaagccggtgacggagcagtcgtgctcgttcgtcggggcgctcgagagtacatggccccaaaggtggcgagcgacagcgtgcatggtgtcgccgtggaccactgctcgcccgctccgaccggcgcagtgtggcgaggagaaaagagcagagaggagaatgagaatgagtatgacatgagggtcctatatgaagccattattttttaattattatctagtgtaactgacacatgggtccctatggtattttttcccaatcgaattgccacgtaagcgcaacgtcaataccatataggacgaatacctagctaaaggagccacgtagacatcacgtcagctaaaaccagagacaataccaccaaaagatcttgtttgtactagttttacaagttggaggatgcgctgtatccgattttgcggttcaagcacgaagacaagtctctgtctatggtactttttccgcgccgtggtgtttgctcgaagcttcgccttagcgtaacacgcgtcaaaaactgatttcgccatctggaccaatcggcagccgacggaaccgccagcatgagaatattagatgcgattagagcaaccataggcgcgatggcaacccatcgcgcctgttgccgaggagtgtcgagaggatctgttgccaagtatcgagaggatgagaaggggcggggcacggtacaatcgccatgccaaaccttcggttaccaatctgagattgatcatctatttatttcataacaccataaatggacaaatacatgcaaaaaaattcgataaaacatatgcattctcttatcggtaacaataatattatacattctagatgctacaaatacgtacgcaaaataagatgaactcttctattacacgtgtattctcttaattatgtggtagccttctcaaaaaaagaaaactaaatccttttctgtacagaaaattgaaaaggagtgacgagggtaagccagccggggagggtgaggaagtgaagcgaagcagctacttgtagtgccacggcggccggaacatctggaacgacggcttgtgcgacgccaacaccagcagcaccgccaccaccgccgcgacggcccacggcgacgcgccgccgccgtcgtccccgctactaccaccgtagccgccgccccaccgccacgacaccggcacggcgaccctccctccggcgtccaccagcgcgtggctcccgagcaggaccagtgccaccgccccgagcaccagcagcacccacagcccggcctgcgtgcgccgccgtagctgctcctcgtactcgtccatctgccacgtcaggtagaggaagaaccccacgatggcggagaccgccaccaccggcgccggcggcaggccgacggcgagccatccctgccgccactggaggtcactcgactcatccatgtgagcgagctacaaacgtgtgtatgtgtctgcttcatcgatcgctggtcgtatatattttggaggcaatcatgcaagcgaaggaggtggtattggaagcgatgtgagatttggtcttgtggttgcggatgagtggtgggtggtagatgcttgtggaagatgacacggcgcgacgcgtgtcgtgggtaggagtgaacgagtgatggcgttggagtggccggcgctttcagcatcgctgtggaatgctactcggcagtctgccatcggttgctctgccttgcagatcgctttaaggattttcctagatctttttctttgacctggaattggactttctagtgctacgtcaacaaaaatcactatctgcattgaaagccggatgctgatgatttagtagtattattaaaggtatataaaccagaaaacgtaactaatgttaaactagtttaaagacaaaataaattaaaacaaaatagattataatcatataattttcataatatgagaaatgatcgaacgaactataaaagatcaataacttcatacaacaaaaagaagaagaaagagtatgtgatttcttcgttataaactattttagactcatacatgtatatacttattgtttgtatattatatattcaaatggtgataaatattttttttagaaaacattaacaataaagattaatatgtgatatatcacttcacaaatacacaaggtcattgtcatggttatggataccacatacctaatagtagttgagtaaacttggcatggccaaccatataccatgtcttatacggaaacaaacctcgtatatagaacgagttccggataagaaaggacaaatagagttctatattgaaccaacaaggattactcggattgtatccatctttatctccctagtcttacttggacaaggtgccatctatggatataaatacaagccctcctaggacgagaggggacacgccacaaagccacaagccaacacacgccgccgcatatcaatatcagagataagcctagacataccccatccggtgcctacagatgccggcaagatggatctagcgccatatctgatctcgatgagttcatactcaaggaggaagactaccctgtcgtcgactacgagttggtgttcatgccgccaagtcgacgatggctagataggttatttcaattgttgtgctatgtggttttctatattaatcccatataaacaggatgtagggctattacctatcatataagggacctgaacctgtataaaatctttgtcttcatttcttttacttcaatctcgcatataccctggtaccaacgatccccataccatccaaataccgtagccgtgataccaaattaatgtcgacaatggcgcgtcagatagggaaattttggtgctttaaggttttcgacgagatgggttcaacacgtggatttttcaactactcaacgtcttttgactgtgggagttacaatcccatcgatgtgcgttctccaaccagatcaaaatcatcatcgccaactgttttatctatcacgatcgagcaagcttcaaggcattgtcatcgcagatacccgacaaattccggagttgatccggtaccaattccttcacatgtacgacatcaaccggcgcgaggacgcagcactgaacccaactcggcaacaacgcaagcagtctggatcggcttacttatattaaacgtactcgatcaggactgtcactgaccaaaccgattcatgcacgtgtacacatatagagcctaccgtgtccctgtgcaacagacaaacaatcggactactacatcaagcaagcacgtgcacacgtggacacaaagcagaactaatgcacaagcagtgtcattacacatgtacacaacaaaggtaattggtggattagtttcttaaattatctactaattttggcatgtatctacaaagatacgcaatattttatatacaatttaccgtatctatatttagactgtaaaatattgtcagatttataatttattatgtttacctagagcatgttttttatacaatattattgtgcaagtgtttccggtgttaggccgactacggtctaatatttatacaaatcatgcttatttacggtttacacaatgtctaatatttaatctgctcgttatatccattcgcgcagtcttttaagtacatactcgatattctctactatatatcttgtcttctagaaaatatttttcaggaacaattgagcactcttgtaggatgcggtcgagtacaccgctttattgagaacgttcttgaaaaatgctgagttgtcacacccaacctaccaacgaagactgacgacttatctcatgtatagcgccggctgcggctggactatttgagaaaatgttgttaacggataattcctcgtgaacgttgtcggcttgatcacccgacatgattgcgaatagacatccacggatggactatttgagaaaatgttgttaacggataattcctcgtgaacgttgtcggcttgatcacccgacatgattgcgaatagacatgcggatatgctaaaagttggttatgtgagtcatgctagccacgtgagatacacatgtaatcaccaactctagcgcctctccaggtgatcaagatacgtctacacctggtccttggccaatagatagtagcgatctctcaccaactaaaaattcatattcaggtgattgagatacgcctactcctggtccttgaccaatcggttacagcaatatctcgacatctaacgcaacagccaacattgtcgtggtagcgacaaccaagacccactagatcatcgttgtcaccaggacgacaacgtccaggattaacgacatcaggacgacaacagacaaggttaacgacatcacgacatcacacgacgacgacgaaactcgagatccccagacttctagagggcccgaggatgaggtagtaggtccaggagccgaacctctgactacggtaattcttcattgccttcgtcatcatcaggaggcagttctcgaagtcacaagaacgtcgtctatctattactctggattcccttcaaatggtcgaggtacgactacgactagtcttctactagcaacgtagcgatcctcgtaccacgacttctaatggtcgagttacgactacggctggtccccgaccagcagcgtagcggttctcgtacctcaattttctagtggtcgagttatgactacaataggtctttgaccagcggtgtagcgattctcccactacttttgcgatttgttgagtataactatacacctggtcttcacccggtgtggaagtcgtctcatcacgtcttatacgtcaacttctgtaagtgtttatatgtgcaatattcgtccgatgatcctcttttcttatattgccttcgtcctgaagtcggtcctactatccctttacactgttcatgtaagagtgctcaatggacgcgtattaaccaagccgtgtagttggaaaatgatttttccaacttcactactgggagctaggatttgtcaagcttctgcatggtttgttataagatacaagctgtctttgtggaaaatggcttttccataaaaacagctgggggctaggaagggtaccaaactccgattgctgagggcgactctagcgagagtactcttttattgtaacatgcagattcaatttattttcaatttttctatacatatcatgtcatgttacccttgagcgttcgctcggggggctatttcaacattgttgaagactccctgtctctacgattctataccgggatcgactaagcgagtacggcaaatgttctgagtattgatttcaggaaaatcagacatcagaacaatcaagtcagatttcaaggctttgtcgcagactctacgcctactcgattactcgagaacggttgatggggctcgacaaggaatatgaaacaaagcgatggtgtacccgccgagatggaatttcttgacttcaatccaaattctcgattacagcaaggcgggagacttagtcacatgctccatatcttctcgcttgacatcggagattaacctagacaaacctaataaagtgcctacaaaggccgatgagatctagccttatttctgaacacaccgagaacggtcaagcgagcacggcaatagttgttccaacgtcttcgatcgagaaccttaactcgttcatttgctgatgaacccagagttccactcgacactcaaggctgttgttggcccgatctttcggtgagttgtagctaactatgatttgggagaaacgttgacgatctgattacaaccgtacgagacgttgtgttgcgccttagcgatcgatacacctctccgtgggttgttgaacttgctgatgcaaatcaaccttattcctgtaaacaaatcaaagaaacaagcaataacaagataaaagcaatctgaattgcaaataggaatgaatacacgagataagttggggtttcgaatacaagcagacggacggtctagccgacacgcgcgctgtaaggaagtagcaatggctaaactttcatctaaacaaaacccgagaaaccctaaaggggtacctaactatttatggaggtgggaggatgacctaggggtgcctaggttcgtgctccacctagttggggcgcaccccacatgagccccacttgggccggggtcccaaacgaagttacaaacccattggcccaatataggtgacccaagaacttgtttctgtaattgcggccaaacgacatggaatttggcgatgaaactagatctgttggaaagagggctctgagatctttccatcaagtactcacgggccgaaaacgaaggtcgtatgcagattcagcgaccgtttgaatacagtagtgtagcatgtggccgcatcggattctagcacttggaggacttgatctctatatcttcttgttcatccatgatgtgagcaatggttgcatccatggtagccttggtcacatcatcctccccttcttcacggaaaaccatcctcgatttttccatatgatgctgtttgcatagtccatttacaacaacctatttctactaatcaaaacaaggcaaattcgagacaatttggttagcaataacatttctctctagcttgcatgttttatacacatgtacaggaagctctaaatccgagcaaatgtaaactctatgcacgaaatatattccaagatcattatatttaccaaagatgtaaaatataacattggttggacatggcaaatcagacttagcaaataatttcttcttcaaattattgagctcacaaaaatcatcacactgaacatagcccaaagtatttaaagaagatgttaattcacgttcctctacttcattagcaatgtgaataacacgcttaaaatcatcacataaagaactaacattagaaaatagcatgttcattcactagttgagacattgatataagtgaagcattatcacacaactctgctttatcacaaggaacaacaaacaaatcaacttgtgacaaaggaatctcagtagttggttccactaatggttgctctaccatagcataaaaagtggacaaattcaattcattaacaacacacccaccttaattaatttcagcaccattaagtttacctttgatgccctcttcagatgatggaggtgcctcgactttgagtgtgaacaatgggactatcggctctttcatgtctctctcctccatttcatgattatgcacttcctgcaaatggttagtaatagaagacaaaaacatagcatgttgcttcttcatgacctcctctattttactttcagcattgcaagcaagttgtaacaaatgagaaagagatgtatatctttgacaatcaagcatgtcctaaatttctttgttaagcccacgtaaaaacctcaattctgtagtttctttgcattcatctaaaccacaacgtaataaacaagatgtttcgttgaacattgcggtttgttgaacaagatgtttcgttgaacaacgtaataaagagatgtattctgtagcttctgtaacttcttgttttaaacattgcagtttgttgaacaaaatatcagcataatacataggaacataaatatctctcaaatatcgttttaggtctttccaatattgaggtattttattatggttacaaagatgtttccaatcattagaagcttgattaattaaaacactagaggcacacataaccttttgtttctcagacaagccatgctttttaaatttgctatcaactgctagctcccaattaatgtaaacatgaggattataatttccttcgaaataaggtagtccatatttgatctttccaagaacaatgtcacttacctcatcttggtcatgttgatcattcctcatgactcgacgaagatgtcgatgttgagcatgatggtcgcgtattcccttgcttaatcctgccatggttagtagtaaacaagaaacacacacaagaatatgtacgctcctatcaactactaggtagtgatagctcaaatatcacacacactcaaacttttaaccaaattcttataagatcttaccgaggcaagcggaatggtgacatacaccgactcaactaagcaccccaatggaggttggatatatcgatgcctgtcgtaggctcttcggaccttccattatatttgagagatgaagtgaataattcaagtcatcaaacaagcataatgaaacatccgacgcctcgagagaggaatattggagacattgttaggcccttagcctgccagtcaacttcagcctgagatgtgcctgtcaaccactcgaaggcggcgaccagatgtgttacacattcaggagacttgacaaaaatagctaaagatctacaacctctcaaatattcctaactcatactcatgtgaatctagttcccaggatgtgcactagatccatactttcatcttaagcatgattatacatagcaaacacaagtaagatgaaagaaacttaagacttacaacaacttaataattacataggctgatcggccaaatggatttattagagaatagcggaagcttgactacccaatcacaagcacaccaactaggggtttaccccattaagttctcatcctagaagaagcaatcggaacccgcatcactcaaaaactaagtctaaacttgcaaacaaaaggttatatcaacagcaagagtcagtacattaaacaagttaacgtactggcaagcacaagtcaatcctaccatactacatgtaaggcatatattcaaatgaaggcaatatgtagttcaatttcagcataaagcaagttttgtttcgcaattctttagtaaaagagttgatgcttcaattaacaaaacaaattttaagtttcaatattaagttcatcataattccatcataatcaatctcttgctgtcatcctttgacaacaagtcataatatgtcacctcacacacacaactcaacacatttatcaatttcaaactaatgtcacatgaccacattttaaaacataaagtctatactcatgacacatcaccaaaacgctcatgaccgacggctaatcgattagtttaaagaactctgcagagtttgtacacctttacccacatgatgtgatagaagcccggaggctacactctaggtggttcagtgccggccaagcaccccacactctacattatgagtgcggactagaggtcacaacgaagcctttacactacttagagcctagccttgcaccagcacgatacgtgttactccatcctaagccgtacacgttatatgacctagaaccgttaagtggcgggcccacgccttaaacttaacgccgtggtggcggacacaacgggaacccaccacgtggcacaataccgttgtattggacacgcttagtcacctaaactaccacttcggggtaaataggaagctcctctgaattatttgaactcatacacaccggcctaccagaatgcaaggctagtcctaaatagattaatcagcttaggccatcccatactagcacatgtggatgtacgaatatctttaaatgggtgacacaagttcggtccttatggacttgggcaaatactccccctatcggtatgcaactaacaccatatgcacaccacttgccgcccaagtataaaatcacattttacacattgtagttcgcaaatacccatcatattcattttattccagcaaaggttcatgtatgaaaatcacattttaattatagatggaatgagcatttgcatagttctaagtatggctaagcaagtagttgcacatagagcatatataaacccatttgagcacaaagagtgcactctaaccatttctaagtgttcaaatagcaagaagatcaattattcaaggtggggcaaataggtcataactaccttaacccaattttaaatactgatataatctaagttcacatgcaactttgcaaacaaatattttcattcctcaaatcatgggattcaatgtgttcaaaggatgggaggagaaaacttgccttgatcagagaaatgttagcacctaatccactccttcaccaattatgcaattatctagataaaggacacgttatgcaattaaacaccaaaagagctgaaaatccaaaatgctctaaaatgcatgatttatgcacagtgattaggtactggtctaaaattaatttaggtgaaagaatttttattttatcttatttcattagggagttatgaattttataagttttatcggttatagtattatagtcttaggtagtgttatgaaatacttttgtaaagttatttttattatattagacttcacagaggtgtagaggtgtgttttataagactaactcatttggtttcacaatttttggagttataatgattttcttatagattttacaagttacaacatgttttaggcatatagtgttttatatgtgcatgactctcaagttgtaggttcagaacatactacttcctgtttaagttgaataaaaggaataatttggttaactaaaacatttttagttcacatgtttatggtctttactactatggttcatattttataaactagagatgctctaatctaaactagcaatatattatattaacctagaaattgttatatgagctaagttcttctaagttttagtggatgaggatggaactatggcttcactggtcaattaagtttttatttaggtttaattagacctaaagtgtatatatacttatacatgtttatgtattacttaaacaacactatgtgtttaaattcttatttcactaggttaaggttttgatctatattctctacaaaaggtgccaaattttatttcactatgttgaagctaactatttgctggttctatagaaactttgttcatttcatttggactaaaaatgaattttctacaagttttacaaattaaaggctactctatgttagtaaatctttatatgaatatttagagacttttactacacagtaagtatataatcttatttcataaacatggaaatacatgttttggtgatcctacagaacttaagtttactcaaactgaagctaaattgggttctacatgaatttctaaactttagcttatctacactaatcattctagagataatagttttagaggcatttgatgcaaagtaagtaattacttttatttcacctaatcagagagtgcatgatgatgaatctgtagaatttgattttgtttcaaaatgagttgagatgaattttctatgtattttataagtttgtacatgttttatgtatgacctatcttagataaattctagaaacattatttgtatagtgagtgtcaagttttatatttctaaaatagagttcataactttaagaattctacagcaactagaatcatctcaaaatgagttatattttacaagtttgggtgttttcctgttaaacatttaatgttttagttatttttcctttgcattttcagatttttatacacatgggtccactgatcggtggctgaaccaatatacaaaaaggtccctgggctttatataaactgcatttaggtccataggtccacatgtaaacggctgaagttttatagtttgaaccctatgtttttaatcatttacaggacaaagtcctcatcttcaacctccagcagcccgatggactgggagcttggccatggctttggcgagctagtcggcgacgattggtggctcgattgggaatgaggtcaaaagataaaatgaagagaatgctctcacgattccattcctctagttttcttggctaggagacatcggagtagcgccgatggtgagggtgagcggaaggtatacatgagctgttactgcatgttgcctagggctttgattttgctagatgcatccatgcatgtgtttcctaagaggtccaggaggctcaccaagctgtaggaagaaatcgccgaagcttggatagcagcggctttggttggaacggttcgacggcagcgctcctcctcgggggaacggcgacggctcgaacaactcaaggacctgccatgcatgcatgtccaagatgttcgtgaggttatggagatggtgtatacgcgaggaatcgaacaatggctcaccgaggcagcggtaatcgacgatgatggcggaggcgatcctagatcggcgccgggaagcaaaggatgcgttctccgagtccttcacaactccggctagggttcttgaggcgtcttgaagaggtggtcgaggcgagattcttggcacagcggcttgcttcgggatggacaagaatggccggtcgacaacgatgtcgaagcggcggcgctccggtgcgtgctccagggcgtcattggcgtggtcacgttccggtggctgtgatgcacaaaacgagaggtggtcaacagagaagtggttcggcattgtgtggagagatggaaacgcgaaagagatagaggtgaccttgactcaaacggagatggcgatggtcgtcacctccatggccagtggtgaggtcgctggtgaaggagaggcagaggacctgctcccctcggcttcttcggctctgagtgatgagtgaggaatggcgactcagactggaggagaagagagcgagaaaaggaaagcccgaggtcgtcgacacgttgtggccacgcgtcggctcgctcgatctctccgtgtctgtgttcttggtcggctgagggtgaggcacaaagaaagggcgagctggagaggctgccaagtgggcccaggacgaagtgctctaggtggaagagagaggtgtgggtaagattctgggtgaacacggttttagacgaatttttagattattttctctcccctaactttgtagcttcataacttaatgtgtggaccaaattaattagtgttatttttctggaggtaaatgattacacctagattccattttctttggtttcactcaaaaataatggatagactgctcacagaaattaaacaaagattggctattagaaaggtagattgaatttttaagaagcctaaacagaggaggaaaattctagaaaaattatatttaggcatgacaaataatctagtatttgaataaattattttccatgttcacttatgtgcagttaaatgtacttttggatgaagtatggctttagccgattaaaatttaatttgatttcttttagttttttctgctttgactgattaatttgtggtattaaacttagttattaacttgtaccaagattatagtgaattgtttatgctaaacatagtttacataaatttttccatgatttcatcttgcatagattattttaaagaataagaataacctttctttgtatatgtgttcctactacataattgcacctaatattattatagggattacattaaacttcttttggactgagaaaaagataatagaatttaatattaagtccacatgttatactcatgagacctattataaaaagcgagaccaaaatccaaatacacaatggactcaagtctaggcatgcgttatgcacaagtatgctgtcacaccttgaagttcttttccaagcctaaattgaatttataaatcacctagagaaaatatcggtgtaaaagaaagagagaaaccctaataaattaatgcaaataataatcggaattggcatgtggaatttttcttgagttctatatgtcgaaatatgctaacaagatttttagtgaaatttttagagctctagaactaattttaagcaattaaaaatgagcacaagcaatatttaatcctaggaaaattcatttccttctttttctttttctttttcccctttttctttttcgaatgggccgccggcctattcttttcctcctccccctccccgctgggccggtcgaaggccacggcccagccggaggaggccggtctcccaactgccgctcccgcctctccctcgccttccgggccacgccgcccacgttgccgccctccccacgatccccgcgcccactccctctctcccccgcctgctcccgctctcgaaattcgaattcctcctctctctcctccccacttctccccactccgccggcgaatttgcggccatcccggccacgatcgacccccgcgggtctatataaagcgtccccgcctcctcttctctctttttcgttttgcaaccacccgctcccgtgccctccatcgcctagcgctgtcgccctcctctccgccgccgccgccaccgctccggtcgccgctagccgccgtgccaagccacgccgtcgatgccgtcacgctcaccgtcgtgcgggccgtcccgtccaactctcctccgtcagaatccgccattggaaccctctccgccccatgcgccagtgagcaccgccatggccgccgccttcggccggcgttctcacccctcccattttcctccctccctgtaacccctctcatctttttcgctaggtggttccggagaccgtccgccgttcgccgtcgtcccccggtcattcctcgccgcggttcgccgtcgtcccctcgtgccggccgaaccccggtcagcatctccccgtcgtctttccccctctccctcttagcgccgctgccttgctgctcggggccgcgccgccgcgcgccacggccgtcgggtcggcttgagccgtgcccgtgagcgcccgcccgcgagccgcctccgccgtccgatctattgggcggtagatcggggccgtccaaccccgccacccgcgtggctgccacgtggccgccacgtgtgcgctaagtcggcgccacgtgtgcaccatgtggtgcgccgctcctccccggtccatggacccggtccaccgtggaccgccccccccgagtcactgccaagtggggcccgcatgtcggcgccaccccctctctcccccggattttaattattacgcaataaatcaattttggatttttctgtttatagtaaaaacacagtgaatcttctaaaattcatatctaattcatccgagctccgtttaagcccattcaagtctcagaaaatcaagaaaaatgcatagaatccattaaaaatggttttgttctctgtttcagtaatcttatagcctgtttgtatcatttgctttgtatgtcgcttaaattccggctctcccgacgctccggtgtactttgaaatagtcgccgaggttcctccagcagtagagcaaggcaattcatgcttgtcacttgaacatgttgatctaaattgcaaatgctctaccgttttcccttaaatactgcattgttttataatgttactatgggatgtttacctactgttacagccatgctatttttgtaccttgttcctttgttagcttgaggatataacatgactagatattggactagggattgcttagccatgcttagttcaactagcacacaatgggggaaatcacattaatgcttagacttcaggttctagtgttggtgttggattaaagccaccgtcctggtgttagtcaattaaaatataacatatggtgggctgtgggtgcttggttttgatggtcgcacccatggcacttaaagaccggttcataggaaaccctggaagaattcctcgtacttgccacaagccagcgtgggcaacggctgggcttgtagtgtagcttttctctagctgacgcatccaggcaagggtgggcatgatggagtttggatgggccctgcgacggcctatgcggcttcctgattcacctaggcacgagaggggactgcccgctgccttgcgaggagtgggggtgaaacctgaggtgtggtgtgcttggttagagggggttatgcgaagggtcctgtcacggcctctatccggtatgtcgtggtggcatgtcggcgcacgggaacgtgtcgtggggctgtgtcttgtgggtacagttgtacacctctgatcagagtaaaactattcgaatagccgtgccctcggttatggacggtcaaccagattcaccgtgattagtctcactctagtcaagtctaatggaattgattagttcaggtggatggttgggcctgttgcaacgtggggtagcgttggacagtggatggataatattgagtaattaatacaactgttttactgctttcaactactatttttaaatgcttgatttatgcaaatgaaccgctctagctatcctttggttataccttgcatcataccctctattccggtatgacttgctgggtacggtggttgtactcagtcttgctctatttttcccaaaccccagagtttgagtatgcgtcagatggcggtttctccgaggagtaggcttcgtccgtgccgtcgaggatgcctgtggagtggtgttcccgctgcgctccaagtcaaggcttagctccagttatcttttaattttccgctgcatttatgtaagacttttatggtgtttgtaaggtgtggatctgtatgtcaactttgttgtttgtgtaccccggccacattctgcttggaattctattcgggaatttctgggcgtgacatatgctcaaatgcttgctgacatttctagtctaatgttgggaatgaaaatgttttattttgttctcaaattttaatcatgcaatggtttaagttggtcatcacctaaattaaaacggaaatttttggctctcaaaattggataagttaacctctaactattttgacaagaaattttaagtcctgaaattttgggtatgttataatgccttagcaaatactcgttgtacagctgcaatcaaatctgtggagctgtagatagccttaaatatgtagcaaatgaatagcaaatgctcaaatcagagaatgcaaagttgaatagttgttcaaagtcaagtaccgcgccggttctaggctagaatgtactagagatgtgagcctagagataaatgataccacaagataacacgagaaacaactcaagcacactgatatatcaaaattcagctcaaagatacaactgattttttttctttcttcttctttcttttcttcttcctttttttcttcttctttttttttgtgcggcttttcttttcttcttttttttacggacctttctgcctttttctctatttcttttcaacaaaaactgaatcaaggacctcaatgtaaggtcatagggactcaaatgtaaatttgaaaattgcagggactcaactgtaaaagtccaaaccaaaattaaaaattatacagaaatggaatgctgagtttataccggttctgtttttgcaaactgaactcgaaaccgacgcaaaacaaaaattcacaaaagtgtaatcgagacggtggaggtcgaaacctctaataggtaatcgatcgccatggtgatcggctagcgatcatgaggcgcccctctccctccacctggttttcttttttggcaccgcattactttcctattttagtaaatttatgcacctaaagtttatacacctcaagtttatacatctaaagtttagagaccaaaagtttataagtcaaaagtttatataaccgattcaaatttgaatttgaattcaaatattttttatatatagtatttctatacatctgtcaaaagtttatatacccgtttcaaatttgaatttgaactatatccgatttgaatttgaattcaaatatttttatatatagtatttatatacatctaaggtttatagacccaaagtttatagtcaaatgtttatatacccgtttcaaatttgaatttgaattatatccgatttaaatttgaatttaaattcaaatattttctatatatagtatttctatatatctaaagtttatacacctaaagtttatagatccaaagtttataagtcaaaagtttatatagccgattcaaatttgaatttgaatttcaattttttatatatagtattcctatacataaaattttctaactttttttttaaaaaaaatttgtggtgtactgtagtaggaagagaagagggaggaggaagggggagaggagggaggagtgtatctgaggagggagggggcggacgccattaggcgtgcctggtggaggtacggtggggaaggaaaccgaaaggtgagggagtcggactttggcctcggcaactgggcacgtaggacttactcacatggaaagaaacgcacacgtgggggtggagggagaggactcggccaaattggaaaggtcagccttggatggaaacaaaccaacctgattgatctaatctacaaacagacgcccccttccttcttcctttttcaggcgcaacagcacgaccacgggagagggttcaaacacacgacacaaaacctggatgcaactcatcaacttcaaaaccgaccaacaaaaatttatgaaaactacaaaattagaaccgtggcagcaagctgattccgtttttgtaggtccggacaacaatagagacacggtggcggtgacgactgtggtacaaaacgtaactagaactcgaaactctaaacggactagacactaaaaccagcaacttgattcgacgatgtaacgcaaaacacaacaaggcaaaaactgataagaacaatgcaatagcacaatatggctaggtaatagatgagtttatttatttttggttattttctgggaataggtagatgaaaactcaccgaccaacgaaagctctgataccacctgatgaaccctgagtttcactcgagattcaaggctgttgttggcctgatctttcggtgagttgtagataactacaatttgggagaaacatcaccgatccgactacaaccgtacgagacgttgtgttgcgccttagcgatcgacacacctcttcgtgggttgttgatcttgccgatgcaaatcaaccttattcctgcaagcaaatcgaagaaacaagcaagaacaagataaaagcaatctgaattgcaaatagaaatgaatacacgagataagttggggtttcgaatacaagcagacggacggtctagccgacacgtgctctgcaagaaagtagcaatggctaaactttcatctaaacaaaacccgagaaaccctgaaggggtacctaactatttatggaggtaggaggatgacctagggatgcctagggtcatgctccacctggttggggcacaccccacatgatccccacttgggccggggtcccaaacgatgttacaagcccattggcccaatataggtgacacaacaccttgtttctgtaattgcggccaaacgacatgtaatttggtgatgaagctggatccgttggaaagagggctctgagatctttccatcaagtactcacgggccgaaaacggaggtcgtatacagattcggcgaccgtttgaatacaacagtgtagcatgtggccgaatcagattccagcacttggaggacttgatctcgatatcttcttgttcatacatgatgtaaggaatggttgcatccatggtagcatggtcacatcatttgcattgaagtcgggggctactgtcatggttatggataccacatacctaatagtagtggactaaactccgcagggcccaccacataccatgtcttatacagaaacaaacctcgtatatagaaggagttccggataagaaaggacaaatagagttctatatggaaacgacaaggattactccaattgtgtccatttttatctccctagtcttacttggacaagggggcatccatgggtataaatacaagcccccctaggaggagtggtgacacgccacaaagccacaagccaacacacgccgccggatatcaacattagagataagcctagacataccccatccggtgcctacggaagtcggcaagagggatctagcgccatctctaatctcgacgagttcatactcgagaaggaaaactaccctgtcgttgactacgagttggtgttcacgccgccaagtcgacgatggctagataggttatcccaattgttgtacgctgtggttttctatatcaatcccatataaacaggatgtagggctattacctgtcagataaggggcccgaacctgtataaaaatccctgtcttcgtctcttttactttaatctcgcatatatcctggtaccaacgatcccataccatccaaataccgtagtcgcgataccaaacgtcgacagtcatgttgcaagaaaaaataaatttgattacggatatatcttagctagctataaacttgatgcctcttgttgtattggtttaatgtggtaacataaattctcaatttttttattttgctatcacatccacctcctagttccagatctagatctagatcttgtaatatatagagagagaataaaatttttaatttctatttatttggtgcaatcaaaaaataattatattagtttgtaattgatgtgaccatgactactacggatacaaccattgctcatatcatggatgaacaaggagatataaggatcaagtcctccaagtgctggaatccgattcggccacctgctacactgctgacttcaaacggccgccgaatctgcatacgacctccgttttcggccttgagtacttgatggaaagttctcggagccctctttccaacggatccagcctcttctccgaattccatctcgtgtggccagaatcacaggaacaaggtgttgcgtcacctataatgggcctatgggcttgtaactttgtttgggaccccggcccaagtggggcccatgtggggtgcgccccaagctagtggagcacgaccctaggaccctcttggtcattctcccacatcctataagtagctaggtaccccttcagggtttctcgggttttaatagattaaagtttagccattgctacttgcttgcagcgcgcgtgtcggctagaccgtccgtctgctggttcttcggaaccccaacttatcatttgtattaaattcctatttgcaatatcagattgcttttatcttgttcttgcttgtttcttcgatttgcttgcaggaatagggttgatctgcaccggcaagatcaataacccacggagaggtgtatcaatcgctaaggcgcaacacaacgtctcgtacggttgtagtcagatcgtcaacgtttcttccaaatcgtagttatcacaactcaccgaaagatcgggccaacaacagccttgagtgtcgagaggaactcagggtccatcaggtggtatcagagctttctttgctcggtgagtttttatctacccataaccagaaaatagccatacaaaaaaatttgtatcatttacctagccatattgtgccattgaattgttcatttctatttttgccttgttgaattttgtgttgcatcgtcacgtcgtcttgctggtcttagcatctagttcgtttagagtttcgagttctagtcacgttttataccacagtcgtcgtcgcctccgtgtctctgttgtcgtcgggacctacgaaatggaattggctcactgccacggttctatttttgtagttttcagaagtttttatcggtcagttttggagttgcatctagcttttgcttgagttttggtttgcccgtgaatagatcgctcgtgcttgttgccggcgctgagaggaggaagaagaatttccaaatttgtttttggaagtttgagagtttaatttggaaagaaatagtagatcagattgattgaagatcagtttccctttttctctcaccaaatccggactcctagagatgccgtatccatccacccgtcgcccactaccaccgtgaggagtccgattccctccctcttccgttggtttagatccataccgtgtcttcccgcatagcttggtgaaaattttcagtgtgtccgattgtagatccgtttggaaaaacggaaccagtataaatttagcattccatttttgtataattttaattttggatttgcacttttacagttgagtccctgtaatttttatatttacatttgagtccctatgaccttatattgaggtccttgagtcggtttttgttaaaaaaaaggcagaaaggtgcttaaaaaaaagaagaaaaaaaagccacaccaaaaaaagaaaagaaaagaaaaagaaaagaaaagcaggaaagacaaaaaaaaaaaagagaaagaaagaaagaagaaaaggagaaaatcattttgttatcattgagctgaacttcatatatcagagttgtgcatgagttgttcctagtgctatcttgtggtatcgtttgtgtctaggctcgcgtctctagtacgttctagcctaggaccagcacggtacttgactttgaacaattattcaactttgcattatctgatttgagcatttgctattcctttgctacatatttaagcctacccagagctgcacagttttgattacggccgtaccgcaagtgtttgccaaggcatcgatacacccaacctccattggggtgcttggttgagtcggtgtacattaccattccgcttgctttggtaagaacttgtaagagcttggttaaaagcttgattgtgtgtgatatttgagctgccactacctagtagttgataggagcgtgcatatttttgtgtgtttcttgtttgctactaaccatggcaggattgcgtaagggaatacgagaacatcaacttctacaccttcgacgagatatcacgacttctccacgtgatgcatatgaggtacatgactataattttgaacaagttgcatctaagttaccattctatgatgggaagtacgattctgttgcatacattgattgggagctagcagtagacaatgaatttgatatatatgatttttctgatactcaaatgattaaggctgctagtaataagtttacctcttctgcattattttggtggacttatgttagtaataaacctgaaacttgggatgaattgaaaaccatgatgagaaagcgctctgtgacatcttattacaaatgtactcttcgggagaaattagaacatctgaaacaaggtgatagaactgttagggagtacattcatgaatttaaggtctgtatcatctacagtggtctcaaagagtgcaatgaaaatacaatgcgtagatttttcaatgggcttaattctgaaattcaggttttgcttgataatgtgacatataatcatattgggcacctattcatgcttgctcgtagcattgagagtcagatcatatcaaaggcgaggatgcatgaccaatgtgatttatctcctatttctgaatccccaatatacttatgtaatgatgatgtgcaaacattggaggagcaatcttttgtctcccctgttactaacgttttgcaggaagatcagcacatccaagaaaaggagaatggtatacttgagaagaaagaggatgaagcacctgcgatgtctaaagaaagttcgcaaggtaaattaaatggtgctgagagaaatgaaggtgagtattctcaaggtgagctacacttgtccacttttcatgctatagtagagcaaccattagtagaatcaattgctgagttgcctttgtcacaagttgatttacttgctgttccttgtcataaagaatagttgtgcgataatgcttcacttatatccatgccacaactagtgaatgaacatgctattcctgttgttaatactaactgcgctgattttaagcatgttaccatggctactacggatacaaccattgctcacatcatggatgaacaaggagatataaggatcaagtcctccaagtgctggaatccgattcggccacctgctacactgctgacttcaaatggccgccgaatctgcatacgacctccgttttcggcccgtgagtacttgatggaaagttctcggaaccctctttccaacggatccagcttcttctccgaattccatctcgtgtggccagaatcacaggaataatgggcctatgggcttgtaactttgtttgggaccccggcccaagtggggcccatgtggggtgcgccccaagctagtggagcatgaccctaggaccctcttgatcattctcccacatcctataagtagctaggtaccccttcagggtttctcgggttttgatagattaaagtttagcaattgctacttgcttgcagcgcgcgtgtcggctagaccgtccgtctgcttgttcttcggaaccccaacttatcatttgtataaaattcctatttgcaatatcagattgcttttatcttgttcttgcttgtttcttcgatttgcttgtaggaatagggttgatctgcaccgacaagatcaataacccacggagaggtgtatcgatcgctaaggcgcaacacaacgtctcgtacggttgtagtcggattgtcaacgtttcttccaaatcgtagttatcataactcaccgaaagatcgggccaacaacagtcttgagtgtcgagaggaacttagggtccatcagtaatatgccgatgatatgattttgttagatttttctaatatactaatttggcatgtctgtgtaaaaaaattgaaataaactttgtttttttattaatttacaaataacctttagttaattagtttttaatagcgataagttttttcaataaaccctacaaatttggttttaattgtgcaaataatttatgttcattttttagagatatggaaagtcgggaatggatgtatcattggccgaggtttttgtctccatatagaaacgaagtgtctaaatttattgctattgccaaggcacacgctgagaagaacaatatgaggaagataatttgtccatgtgctgactgtaagaatgaaatagcctgggacttcgacgatgcttttaaagtgaaggagcgcttagtaactcgtggatttatggacaagtatgaaatatggacacgtcatggcgaagaacaagtggacgggcctgaaaatgtagttccgacacaagttgaagacatggtgcatgacgatggttctgttgaggacaaaatcgacctagaggaaatgttacgtcatgcagaacccgaggtgctgatggggtcggctagagctttacagaaggcagctaaggaagttttgtacgatgagtcaaagggctgtgacagtgagttcacaacactacggtcagttcttgaacttatgaggttaaaggcgaaacatggatggtctgataccagtttcgacagtctgttagaacttctgcagaaaatgctcctgaggcctaactcactaccatccagcacatatcaagcgaagaaactcatatgtcccctttcacttggtgtggaaaagattcatgtgtgcgttaatcactgcatactgtacaggaaagagtacgcttcttttgatgaatgtccaacatgcaatgctagccagtacaaatcgaatagcaatactggcctagaaccgtctgacacaactgagggaagacagagaaaaatcccgcagcttgtgatgtggtaccttcctgtcaaagaccgcattaaacggatatactcaaacccaagagatgcggaactaatgtgctggcatgaagaagggcacaagaaggatgggatgattcgacacccggcagatgctcgtcagtggataaactttgatgctcagtatagagagtttgctaaagacccacggaacattagatttgccctgagtattgatggagttaatccttttggagacatgagcagctcacatagtacttggccagtgctgtcaccatgtataatcttcctacctggctttgtcaaaagcgaaaatacgtactactctggatcctcatacagggaccccgtcaatctggtattgatattgacgtatttcttgaaccattgttggaagatattgctgatttatggaaagagggattgaaagtgtgggacgagtacttaagggaatacttcacgatgaaggccatcatcttcgtgaccattaacgattatccagcaatgttttcagtttcaggtcaaattaaaggtaaaacaggatgtgtgatctgcttgaatggaacatactattggtatctcccgggttccaacaagcttgtgtacatgcggcaccggcggttcctacgcacaaatcacaagtaccgcaagatgaaggcggagttcgagggcactgaagagattgatcctgcaccaaaacctacatcgggggaaaaagtgtgtgcaatgacagaaaattgtttgcgaatttggaaatgtgactaagaaaccatcaaaggggacaaagcgcaagaaacccgagaagactatgtgggatagtaagaagcaagatgatagttcgaagtcagatgataaactcccttccccattcaaaaagcattccatattctttaagtacctcccgtactggaaagatctggaggttcggcatgccatagacgtcatgcatctagagaagaatgtgtttgataacatagttggaacattgttagacatgccgaagaagactaaagatggtctgcaatcaaggatggacatagtcgagatgggaatcagggaagagttacaccctcagaaggagagaagaatggcaaagtatatcttccaccggcctgtttcacactgacacctgaggagaagaagtcattttgcaagtcactccgtgatgtcagagtgcccataggtttcttgtcaaacatcagtcgactagtttaaatgaaatatttgtcggtatctggttataattcacacgattgtcatgtcttgctcaccgtgtttcttgcaattacaataagggccataaaaccagagtatttaaaggttgctatcacaaggtagtgctactttttcaacgcagtgtcacagaaggtcattagtctcgaagagttaggaaatctccgtacattcgcacatgagacacagtgccaacttgagatgtgtttccctccgtcattttttgatatgatggagcacctcattgttcacatagtgccgcagatggttgcgcttggcccactgtacctacatcaaatgtggtcatacgagcgttacatggcggttttgaagggttacgtccgaaatcgtgcacatccagagggatcaatggttgagggttatagtactggagaggttgtcgagtgctgtatcgattacctcaaagatggatatgcaattggagtacctgtgccccgacacgagggcagattgagtggtaggggaacgataggaaagaagagattcgtcacccatgatcacaaatcattccaagaagctcacttcagtgtccttcatcagtttgctatcgttgagccttacatcgatcaacatatcgagctaatacgagctaacaataagggtcgcaccaccgagtggataatgaaagaacacaagcgtctcttcatagattggttgagagacctagacttacctaagggacaaactacagatgaaataactatgaaacggttggcttgtggtccatcaactacagtaaattcttggcaaggatatgacattaatggatactcgtttagtacaagagcccgagataataaaacctgtacgcaaaacatcggtgtccgtgtggaggcaattgatgaagccagggaaaaacaatcatacttcgggtttattgaagaaatatgggaaatcgactatgggcacacaatgcaattccccatatttaagtgccagtggcaaaaatacccgaacggggtcaatgttgataagttcggtcttattg

SEQ ID NO: 26531 - DNA, 9995 bp, Oryza sativa
  unsure (1)..(9995): unsure at all n locations
tgagcatggagaaatgcataacttgtccctataatgcacaagtaacaagaatcacctcagaaatgtagaactggcctctatcgtgaaggcttccgcagcctcccctattcagtaaaattaagcattttagtattgatcaatcgcctaactaacacaattcataagcccaatctatttttagatacctattatacttgccaaatttcataaatcagtataacgtagtcagataaaaaaaatgcaaatagacatggtacataccatttaccacataaacatactggagcgaagttactatacactgcaacaactacatgtatctcaatcccatgatacgaccactgatcagcaccttaatcttggaataccgccaatttgagtgtagatgtatgtcaacctagttttcccaaattgatccgtacttatatattgtccatgcttatcttacatgtggaatatttctgtaagaaacaatcaaaatctgccatatatataatccctctaacatgaatgaaaataacagaatgacaataaaaagcactatttagcctagtattaactacagaaagcaacagcctagtgaatacaaacctgaaagtcattaagctccacatcactgtgtgcttccctgtcatggtcacatagactaaatatctgctacaaagccctcacaaaccgtcgctttagagattgtgcctcttataaaacaatggagctattgggttaagcataaccttttcagcatagtagaagacctccggaacctgcaaatatccataaattatattatatagttaatccaagccttgcacaatatctggaattctatctcagggaaggcactggttaaaattatcaagtgcatagtacagtagatgtttgatcaggttacacaaaaaattatcaaggcagatatgggcaatacacgtagtacattgttagagatggacagcactgtgttctcaaactgagcatcaggaaaattagtgatccaaatttattactaaagccctgaaaatcaagtattaattccataagactacagagcatttcatcaagctgtagcaatcaagttgtgtacatcaaaatagcaggcaatgcaattaaccatgcataaatgcaacagtgggatttagcttgcacaacaacatgtatcttccatcacagtatcaacacagagtcaggaatgaaaaaaatgggatttaacttgcacaaccaaatcattatagcttcatgtgccaactctttccccttagccttctatgtaacacatgattggaaatatgtgtaaatagaaaaaaaaaatgtcttataccaaggaattttagtgcaagtattttttttacaaaaatgtggagtaggaagcattcctttccttccaaatcacagaaaaaatatacactctcctgctgaggattttatacatgaaggaatacaaaggaatgttagaaatattaacaaatataatgccgagttgatgccaggagtgtatcgatcttagaactgctttgatatatcgggttcccacccacctagtacgcgacaactgtttagaaattagaagagtatcaaggtttgacatccaccgagaattttgaaaacaaattacaattacagttgatagaaaatattagcctacaggatatcaattattaactattcactcttgagagtagttcaaaaaatatttgcttaatctcctgtcttagcactttgtcgagcacttggccggcagaatgtactcaagcaattcatcaagtcctgcaaggaagaatcaagcaattcgtgaagcacgtaccaataatcaaggcggcccggcccgttgccgatcacgatcatgtcctgcacgatgtcatcccattggtcccgtggccgcccgtcaccaccaaccaatgacctgggcgaagcaactgagggcgtcgagcagcaggtgttcggggacgaacgccgccaccaccaagcacgccgccgcagcacggccgccccgggtcttcgcccgacaccgcccaagcacacgggcgtccgacggcgcccagccagccgccagcctcaccgctagccacgccggctcttcggccggtgtcatcaaccgctgccacccgcgtcccaccagccagccacgccatcgcccgcgtctcccgtcggccgtctctcccgccaaacgccgccgtcctcacgacacctgccgccgtcgtccgctccgtcagctcaccggccagatccggtggtgacgggccggatccagccacggaagggccggatccgacagcggcggcggcggatccgcagccacgcgccgcgccgctgcgaggccttcccggcgcactgtgccgcctcctcgcgccggagacgggccgtcgccgccatcccagcgtccacgcggtttccggcggcggcgaggcggtgagaggaggggagggtggcggcggccgggggctcgcccgcacgtggacgaccgaaggcgcgtgaagcaaaatttcagtgttccttcatacaagaatgtctcggtcgtcttctttgcctgcaggcgtcggcgtcggcctccttgttcttcttattcctccttcgcgtcagcagtagggtctcgacagtcgacggcggggcgaggagatcatggcgaaactggggtgggggtgaggtaggcgcggatgcggtgcggggagaggcggatctgggagggaggtgagagaggcgcagatgcgcaaatccagtggtgccgtcggatgtaatttgtcgtatgattttgcaccgttggatatgtgatatgataaatgatgaatgagtaaaaccatttgttgaactatatggtagataatgtaatatgattcatcccattaatgagctaatgtttctaagcatggctaagcaattatatataaagcatttagttgaaccaaaccaatatataaagttcaagctaatcaatttattacccataggaaaataaagtcatctttggccattaattaattgggaaaggcccaccacccgatgacattcaaaattaatgcataagttgaaataaaacattaactttaaacaagttcaacatgctcaaagggttgtttgggatctgtgtgactttccttgagcttcttcaaatgcttttgaaccttcctcaacgtaaacgctctcctccggaacgtcggaaactaaagcaaataaacaaaatcaacaaaacagtaaaaaacaagcataaacagtatatgtggatatttttaacatgtagatctcgattttagatgaatttagcaactcgaaccacttgaatctgagttacgatgatttagttatgaatttctgaagtttaatcagattttcatctaatacagaaaattattactatttaaataaaggatttatgatgtcaggatgacatcatcgtagccatggcactggaccacgactccgccagcgatagagagctcgggcgactaaaccgaaggcacctacacaaagaggacgacgagacgaactcaccgaagcaaagaactacgacaaacgacggcgaacgaagaccgacgacgaacttgacggcggcacggctcggctcgatgttgacggcgacgctccggcgaattgcagcagcggcgaaggagcggacgggacgctcctccacctggcgaacctgacggtggcgacggaaagcggcagcgacgaccacagcggcaacgcggcgcggccgaagcggctacggcggcgacggcactagggtttacgcggtggcagcggcgctataggcgacggctgcagcttggacttgaggcaaacggaagaggacgactaggggatgctttaaataggcatggttgagggagatcggactccaatcgagaggatttgagccggaaaaatccgatggttagtttggagagataaactcgaaaacgaatccaaattcgcatcgaactcaaagggataagatcggatttttgggggaagggagagaagaggataagggaaacaaatccactcaactaattttagaaatgcacgagaggaaaggccagatttggaggggaaaaaccgagccaattcggcctcaggtcggctgcctgaggtttgaagaagaacagtgcacagggaagcaaagtaaactttcagtcttgggccggctgaaaatataatagagaaagaaagagaagggggaagctcggctgtgctaactgggctgcacaaccgtgctcccaaaagagggagatgggctaaaatcagtccaacggcttatgggaagattaaaaactttttcaattaaaataattcgtaaaatgatgtttcatttattaaaaatactttccttgctcaaataattcacagaaaaatctagaaaatagataaacaagcaaagtatttaatgaaattttatctaactcagttttatgttgctatttttcctagattattagagtttaacttgtaagcctttaaaataatttctaaaaatgtgttacagaatgaattattaaattaggcgattttcagggcgtgacaagcctacccctcttaaacggaatctcgtcctcgagattcagaagaactagcaaaaagatgagaatgagctgacttcaattcatcttctcgctcccaagtggcttcttcttctgaatgattgctccactgaaccttacagaaccgtatgatgcgattcctggtgtttctcttattcaccacaagaattcggactggcttctcaacataagttaaatctttttgaagctctatatgctcaggatctgcttcctccgtaggtacacgcaaacatttcttcaactgcgacacatggaacacgtcatgtattcccgccattgacggaggcaactctagttgataagctacttcacctctccgactcacaatcttaaaaggtcccacaaatcgcggtgccaatttccctttggtctgaaaacgatgaactccccgcagcagcgtaacccgtaggtatacataatctccttcttcgaaagtcaaatccctacgacgattgtctgcatagctcttctaacgtgactgggcaatacgcaacctttcttggataatcttcactttttcttctgcctctcgcaatatatctgtcccaaaaacttgacgctcaccggtttgatcccaaatggagcggtgtacgacactttcgaccatacaatgcttcatatggagccatttgaagactagcttgataactgttgatataaccgaattcggcgtacggcatattcttatcccaacttccaccgaaatctagaacacaggctctcaacatgtcttctaaaatttgattcactctttttgtctggccatcagtttgagggtgataagtagtactgaaattcaaacgagtacgcatctcttcttgtagtttccgccaaaacatcgaagtaaactgactacctctgtctgacactattttcttgggaacaccatgtaaacatacaactcttgccatatataactctgcaagcttatttcccgagtaggttgttttgacaggtataaaatgagcaactttagtaagcctatcaaccactacccaaatagaatcttgtcctgccgacgttctgggtagaccggtgatataatccattcctatttcctcccatttccactctagaatcttcaacggttgcagctgacaggctggcttctgatgctccgccttgactcgctgacacacatcacatagagccacatattccgctatctctcatcgcatgctagcccaccagaattgttgcttcaggtcttgatacatcttagtgctcccaggatgaatggaatacaaagtttcatgagcttctttcatgatagttgttaacagtgaaatttggtaatcggcaaagacgtcatcggcttagaatcattatcggttgtagcatctcggaatcagccgatgggagttatcaagtcgccaataatcggattcctgctatattcggttaaggaaatcaatctactaaaggaagcttatccctaagtgaccgagtttagagaggatgcggcatggcagtttatatattaattaggaatagtttgttagtttccttttatctttaggaaagtgtgtttagtgtccgataaggacttcatattttccttttatctttaggtgagtttctttcttgtccgacaaggacttgtatcaacccatggttataaatatgtacacccggggtctatgtaatctatctctacgatcaatacaattcggctcatcgccaccctttttacttctacttttgttttttacgttccggcggaacttggcacccgacgcggggctgcatcgtcttcgatctccggcgaagggataagtccaatgttccgtcggcccaggcaattgtctcatctacgtcggcgtcgttcaaggctgcatcagtatattcgacctcttggattgctctggtttgaatgatatatttgtctacctatttattatatgtctctgttaatctagtcttagcatatcaatttagctctatcggctgcttctcgttttagggtttctgccggtatcggctaaatcgcgttgctagattagattagcttagatatctaccaccctgaaaatcagtcaacggcttgattgtctagatattgtgtttcttttcatacttagtgctgcatcagttaagtttgatctactaagtcgtgcttagaaccataatctctagcctgcttcttgattgccaataggggttgggtttcagccgatgagttatctggatgttgcatcggctcataaggatttcatatacatataagttggatttagccgatgacaacaaaagtttcattgtttaatctaatcttgtggatttcatggcatcggaccaccagccgatgtgtgctttaaccttcggatcgatgcttatctatcatataaatgctagccgattggtttatactggactatattattgttatattttattatcagtagccgattgcctttatatcatcatctacattggacatatagccgattgcttaaaccctatcgctatcggctggtatcggcatcggctattatcggctatcggctggaactactccatcggcttgtcagccgatcggncttgtcagccgatcggcttgttttgatcctactatttngcatatcttgtcagttgcaggatcaaactgactagcacgcccgcatctcatcaatctttggacttgcactggagctaagcagatctcccaggccggtgtgtccgatttttttttgtcaacaatagtatccttcaactccttattatggggcacgcaaattttttctcctagccacacagttccttgctcatcttctaataaccgatggtttttcctcttctcatgttcttttcaatttcttagatatcaagatcattcacttgagcctctctaacttgatcaaaaagagtaggttgagcttctaaagcggcaacaaaacctttattgactattcccaagttcaacttttccaattcctggcataactcccaaggtaggtgtcgtccttctgacatattacagtagcttttcctgctgagagcatctgctacaacatttgctttacctggatgataatgaatttccatgtcataatccttgatcaactctaaccatcttcgttgacgcatgttcagattaggttgagtgaaaatgtactttaaacatttatgatccgtatacatctccgtacggttatcaaaaaggtaatgacgccaaatcttcaattcatgaaccacagctgccaactctacatcatgtgttggatagttattctcatgagggcgtaactgcctagatgtataggcaaccaccttcccatcttgcatcaaaacacaacccaaaccatgtctagatgcatcacaatacacctgaaaacctttccttggatcaggcaagactaacattggcgcagtcactagccttttcttcaattcttgaaaactctgctcacactcttccgtccacttatacttcacatccttctgaagcagtcgagacattggtctagcgatctttgagaagttctcaataaacctgcggtagtaccccgcagaccaaggaaactacgaatctctgagaccatcttaggttgcttccaatttagcactcactccacattgcttggatccacgacaactcctccagctgagatgacatgactaaggaacttcacttcgggcaaccaaattcacatttactaaacttggcatagagctgatgctcacgtagtttctctaaagcaagacgaagatgctcttcatgctcttcttttgtcttggagtaaataaggatgtcatcaataaacaccacgacaaacttatctagatattccataaacacgttgttcatcaagttcatgaaataagccggggcattagtgagtccaaacgacataacgggactttcaaacaaaccataccgtgttgtaaaggcgatctttggtatatcctcctcacggattcaaaggtggtgatatccggaacaaagatctttcttggagaagactgtggcaccttccaattgatcaaacaagtcatcaatcctaggtagaggatacttattcttgatagtgacctcattcaacgctcgataatccacacacattctttggggatgaactttcttctccacaaagatgactggtgctccccacggcgaagtactgggtctgatatatcctttctgaagcaaatcatccacctgtctctttacctctgctaactcaatagctggcattctgtaaggtcttttatggatagggttggtttcaggtactaagtttatccggaactctatgtctctcttaggtggcatacctggcaaatccctttggaacacatctggatagtcttgtactattgggatctcttgcaaagcaacttgatttaatgtcaaaccatgagatctaggggaggacacaaagaaagacactgtttacccattgctacttgttaaagtcaccttacggttagcacaatctataactcctctgtgatgggttagccaatccacccttaagataacatcaagatctttggattctagcaagataagtgtggatgggaaaggaatttcttgtatttctgtagtaatggaaggacagtactgcgttgaggatacttgattgcctggggtattaactagtaaaggcctcccaagactaataacttccattccatgattgctcgcaaaacttttagacaaaaaggaatgtgtagcaccgaaatcaaaaagcacagttgcgggtatagagttaacaggaaacgtacccaaaaccacatcaggtgcattctaggcttctgcagctgcaacgtgattaacacgagccttcggtgctggagcattggagttgttctggacaggagcattcttcacacgccgaggctttggacacttatcagcataatgtcctggatcaccacaattgaagcacacccctggcttgattccctgttccttcctgacaggctgattttgagttggagctgctacaggacgagtgaccacattacgattgtcgttgctgtgattaccagtgttgttgttgtagaactggcgttgagggcgagcaactgaagaggatcctccctatgggtatggtgcagcttgaggtcccaaagcaatgcgcggcctctggctattaccctattgagccttgaaataagcagccctacgcttcttctgttccatcctattgtacttgtcttcttggcgaatcgccttgtccaccaactgctggaaattccggtattctatagccatcaatgcataagacaactcatcattcagtccctctaaaaacttctcctgacgttcttcatcagtgcgaacatcatctgggacataatgagctaggcgattaaagtcatggaggtactctgtgacagaacaggatccctgattgagtgctctgaaatctctcttcttaagtgccacaacacctgatggtatatgtgtcttcttgaaagtagcagtaaactcccgccaagtgataggctcttcagcag

SEQ ID NO: 26532 - DNA, 1635 bp, Oryza sativa
catcccaccaatgatgtaagcaacacgcaaaacccacacacgcacaagcaaactaacacatcgaactatggcaacggtctaactaggcaactaatcccgccttgcatcggaacgaagagatggatcttcttcctctggagtagctggctctctttcttctgggtcttcctcctcttcatcattacttaagacatggatgataggttcagcatgatcaggcacaacatctcccaccacacgagtcttcgaagccaactggatacgaggtggtggacgggttctcttccttgcggtgaggcgaagtttgggtgctggcggtggtgcttctcccttaagctcggccagttccttctgcagacggtacaccttgctctccaacttgcaaatcctgccacggttccagttttccctgtcatcagctgttttctcccgctccacgcctactgcatccatggcgctaagcatatacacagcatgcttcagagtggtgctatcttcatcttcagggcagtggtaaactccatagtcttgaccatgaggcttgtgtggatgatactggaaagctgatgactctaactcctcatcaaagcgatgacgtagctctccaatggccaccaaggctacctcctgacaagcatgactatactttcttcccccagcttcaaactttatcgacagaaggtcttctcgatcactagtcaacgtcacgcgaacacgacacttctcctcgttggggtcatagggaatctggcgatactcaggggcaacgtcgtagcctacttcaaatgccatcattctcagctccctgacgaatcctaccgcattgatcaagctttccggcggatggggcggcgtctaaaggagcacagaaagaaggaattaatgcatatatttaagttagctgcacaaactagacttaattaatttgacccaaaaagaaaaataaaagaaaaggagcaaacagaactaatttttttatttttttaattaaatttcgaatttttcttatctggccgaaacataaatttttagaaaccaattcgttttattttttcagaatttttttcgaaaatttttatttatacaggggcatagactttggaactaaacaaaaagaagcaaatatattttcttcctgtacagtactcgtgggaacagaattaaacaaagttttgtttggaaaatgaaatcaactttggacagacacaaattgctttacacaaatgaataaaataaaactaaaatacttagtatctaccataagaacggtacagtgtcaccattatatattttcttcctgtacagtactcgtgggaacagaattaaacaaagttttatttggaaaatgaaatcaattttggacagagacaaattgctttagacaaatgaagaaaataaaactaaaatacttagtatctaccataagaacggtacagtctcaccattaacaaggatgagtagtactggtgctatcttgattgaatcgataccataatagatgataatagatgtacagtgccggctaaccaatgaaattcataaaatcaaactacttaacaccatgaacagtaaagttttttttttaaaaaagaaaagacacaggtttctgttttggtaaagtaggatttagtaaat

SEQ ID NO: 26533 - DNA, 647 bp, Oryza sativa
tacaaatggtaattgcacataaaaaatagtacaaactaatatgcaaaatgttgagtgcaattgttcatcaatttgcgatatgatcacacatcgccttacataccaccattacataactactaacttcttagatgcttacatgcgactcaacaatcattaccctttaacatttttttcccacaccgtccatgcgcatgtaaggcttcacggtcttctgagtagatgtctcgacattcttaatcttctgtacaaactgactataaagtgtcatactatcgtattgattgtaatcttcgacatcttcaaccccatccactcccaatatcttttgtttcccgggtagcactatatctttcttcaaatttgaagggactttcacataaaacacttgtgccacgcgattggcgagtacccaagggtcatccttgtgacccacactcgccaggtcaacaacaataagaccgaacttatcaacattgaccccgttcgggtatttttgccactggcacttaaatatggggaattgcattgtgtgcccatagtcgatttcccatatttcttcaataaacccgaagtatgattgtttttccctggcttcatcaattgcctccacacggacaccgatgttttgcgtacaggttttatta

SEQ ID NO: 26534 - DNA, 1676 bp, Oryza sativa
cgccccctctattcaaaatccctaaaatggttttaggctgggctcggggtgcatggttttgatagtagcacctcggccatataaggaccggtcttcgggcctctgttgcaaagcactaccgtacttccacatgtctagtgggtaaggcttagtttgtggctcagtctggttataaacaaaagtacacggattggagatggatgaagtcgggggtcgatggacattctccagggcaaatgaaggctacacgagctgcggcccggtagtcgagatgtcatggcacagggccggtgtcctgttgctgggggctcagtcctgcctgcctatcccgggggttccggccgtaggtgggattgggtcggtactcttgtctatggctaggatgggttggaaactatgtcacgtcttccgtctgtataccgtggtggtatgtggcacgtggctacacgtgaggaagatgtgtcttgtgggtaaagatgtacacctctgatcagagtataatctattcgaatagccgcgccctcggttatgggcaagccgagcaatgtacccaagttagtgttttaattcttaaaacttgcttatcaactaaaatgtggaatggttggcctcggttggcttgggacgagctgggacccagggtcgggttgccagttcggtctgaatcatcgtaggccttgggttaaggcaggtccgtgtgggttcacggccttgattaataacattgtatagttctagaatcgtgtttacaaaatagctttggagcaactaaatatctttaaatgctgtttactgcaaccctaaccctctatagtataattcccttgtactcccttgcatttattctgcacttgcgggtgtgtcttgttgagtacggtggttgtactcagtcttgctcaatttttcccaaccccagaagaggagttccttgaagatgaaggctttggtgtctagctcgtgcctgccgtcaagcgcctgtggtcgtcgccctagtcttccgctgtttcccgtttgtctttgtgtgtgctgggccttcgctgcccatgtaataaattaactatttacgcttccgcttgttaaactctgaattgtatcaacttttggtgtaccttgcctcctgggacaaggattaatgcacgcacgtcaggaacgcccgttgggttatttccggtcgtgacaattatcatagtacgattaaccatcatgagctaccagtaaaaataaccataaataataatgtagtatgattcatcccattaatgagctaatgtttctaagcatggctaagcaattatatataaagcatttagctgaaccaagtcaatatataaggtccaagctaatcaatttattacccataggaaaataaagtcatcttcggccattaattaattgggaacggctcaccacccgatgacattcgaaaataatgcataagttgaaataaaacattagatttaaacgggttcaacatgcaaaaatggttgtttgggatctgtgtgacttgccttgagcttcttcaaatgcttctaaaccttcctcaacgtaaacgctctacttcagaacgtcggaaactaaagcaaatgaacaaaatcaacaaaacagtacaaaacaagcttaaacagtacatgaggatatttttaacatgtagatcttgactttagatgaatttagca

SEQ ID NO: 26535 - DNA, 4851 bp, Oryza sativa
atggcactgaaccacaactccgccggtgatagagagctcgggcgacgaaaccgaaggcacctacacgaagaggacgacgagacgaactcaccgaagacaagaactacgacgaatgacggcgaacgaagaccgacgacgaacttgacgacggcacggctcggctctatgtcgacggcgattctccggcggattgcagcagcagcgaaggggcggacgggatgctcctccacctggcgaacccggcggtggtgacggaaggcagcggcgacgaccacagcggtggcgcaaagcggctgaagcgtctacggcggcgacggcgctagggtttacgcggcggcggcgccataggcgacggctgtggcttggacttgaggcaaatggaagaggacgactagggaatgctatatataggcatgggtgagggagatcggtctccaaacgaaaggatttgagccggaaaatccgatggttagtttggagagataaactcgaaaacgaatccaaattcgcatcgaactcaaagggataaaatcggatttttgggggaagggatagaagaggataagggaaacaaatcccctcaactaattctagaaatgcacgagacgaaaggccggatttggagggggaaaaccgagccaattcggtctcaggtcggctggcagagcttgaagaagtacagtgcacagggaagcaaagtagactttcagcaataggccggactgagaaaaggcagctcagctgggctgactgggctgcacagccgtgcacacaaagaagggagatttaaaaactttttcagttaaaataatttgtgaaatgatgtttcatttattaaaaatacttcccttgctcaaataattcccagaaaattccaggaaacagataaacaagcaaagtatttaatgaaattttatctagcttaattttatgttgcactttttcctagattattacagtttaacttgtaagcttttaaaataatttctaaaaaagtattaaagaatgaattattaaattaagcgactttcagggcgtgacaaactcggatatgccaaacacaacatactgtgaggctagcaccagggtctgaccagctggagggtaagactccaaaagagattgctaaatacaagaagggcttgcacaaggagaaattgattattgtcgcacagaacattggacgaggcttcttgcactttcaaaacaagagagtcgtcatggctgcttataattttaagtaagtctggtacatttatcttgtacacatatatcttattttagctggtactaactaactatactgttgttaatatgtagcgatcaattatatctgtttactcatccaccctaaagacggaaccgtggtagtcttggaccctctcgattacggtcacaagcaatacaaagaatttctagcaatcttacggtagtaagtgattatgactcttgcatttttatatgaatgtattataaataaatatcctccttaatgtgaaacggtacgacatccatacaatgcgtaccaatactacaagttcaagggtggagaatagacccgaacaagggagaagctgctagcacgtaccttttggccggtaatactccactcacttaatgttttccaattgttttactaattgcaaattttaactattcttttctatgatatgtcctgaagagtcacaagtaaccgcgaggaatggtcctttgcgggtattatgtgtgtgaatttcttagggttaatgggaggtacaagattaacgcggaggatgtaagtctctatactatgtactagacagcttcacatatttatgatactaatatattgattaacttcaatgcatgcagttgccaagattagaacgtcgaacaagctttgacgatacagacatcacaaatgtccagcgtgatctgtgccatttcatccaccatgagtgctgtcatgtgaaaggagatttcttcgacccagagggtgccctagcgacaagtgacgaattcaaggatctttgggagtggaacactgctatgccataatgtaactagacggcgttatttgaagtgacaatgtaaaaaaatattgtaatatatatatatatatatatatatatatatattggcaacactttagatttctcagtactataccaaatgctcgataatcttctaatatatgtacataataatctacctagaagaatttctattaatgggcaaattattattaaattttaatattttctacctattttcgcaggcggattttttttttgcaggcggccgattcctattttcacaggcggaccggacaagccaacgtccacctgcgaaaattatcttcgcaggtggacggccgccctgtctgcgaatatcggcgatcttcttcacagtcgttggcttataggcggacggctgccccacctgcgaagaccgttttggcccgcttgcgataatgcttttcctagtagtgggcagccccatgcacggccaccttgaagttgtcgtgctcatctaagctgtcgatgtgctcctgcgccgtcttcacaaaatcgctcaccacgccgcctccaaagtgcctagccaatacatcctcgtgtggcgcgcacaatgctctcgccgcgaacgccgccttgttctttgactgggaggagctgctgcgctgctgcccggcatggtcacgaagagctcccgatacacaatctcgaaggagccctcggcgctgactgcctccaccacctcctctgagcaaggctcgtaaatgggcagattgaacatctcgagcttctccttgtcaaccattccctgattagacatgtatcgtaccattacatcgaaatgaaatatggagatcatggaggtacctctattttttaacgttgttcatagtcatatgaaaatatatataagtcatgtctaaaatatttttatgataaaaaagtcaaatatttttaatatattttttttaaaaaaataaaacgaatgatcacatattattttacctgagctgccattttattgaggatgatggagatgtgatcccacatacgtgtgtctccgcttctgaggttgtctatacatttcctcccttttacggagattaccagccatcctcccgggatgatctccttgcctcgtgactcgagaaacaatgtgaagtcgttcataaactgtagagcgtatgcgtcacatacttccggtgaacatattttgcccgcacatatgccctccttgtttgtcagcttgccgatatgcacttcttcagggacctaaatcagtaatcacgattaatttcaagaataagtttctctgaaatcattgtttcttctgtgacagtaattaagtctctgaatatcctgaggacggcaacaaatgtgttaggaacgactcctaacttaataccatctgcgttacaaaaataattgacattttggggatagcaaaatggtcaccaggatactattttgattattagttactcgtaaaaagattattgttggcatcgaaaatcatttcagcaccaacatatagagatcatatagctcccttctgtaagcgtcacaccaagaagtgtaaaatcaaatgtgtttttgattattattctgtgatgaacaattgggcattggagattattggttttgttatttgtaatttattcacgaagtggttttggagatgattggatttcacaggtgaatatacaggaactgctgtggttttatgtggaccggtcagaccgggctctggtagccggtcagaccggcgtgtaatgcacggtcagaccggcgcagcccgtggtctgaccggccgatactgtgttggtttcggtttcgggttgtttatttggatatccgagtttatttcatgattatgacttctggatggatactatacgtatgtaatactattgtttgctgctaatgagtcaagttggagatagcttggtctcggaatatggtttctttgtttgttccatgtgtaggttactcgatgtctcgggagagtatttgcggtgatggaccgggagtcggcttggggataagacgacgtccgtggtggtcagagatcatgcggaatacttaggctagagttgttgcacgtggttgatggagattccatatggcatacgatggaggaattgtgtgcgtatgggatgcggagtcgaatttggaaggagtccaaatttggtacgtttggttatgtaaagtttatttcttcgatttgtgtttcaccgggtttcggcggtctaaccggcggcgcaccggcggtcagaccggcagcgcaccggcggtcagaccggcggcatctcggcggttcgaccggcgggcacacggcggtcagaccggtggctacaggagtcagcaacaggcattttcggcggttcgaccgatcgatctacatcggtcagaccgacgttcatcaggcggtcagaccggcgcaactacttcggttagaccgtgatccatcgatttcgagggtaacttttattttcgctaaaagtttttgatttttgggtataccaaccattcacccccctctggttggcttagttcctgtgattcgatcctacaagtggtatcagagcctcgttttcttctttggatttttatcgatctaaagtttttttgccatggctactcccgctaggttttcaactaagcctcatgttttcgatggaacggatttttcttattggtgtagtaggatgcaatcttacattatgtctgaaaattatgatatttggaggaaagtttctcatccttatgtgattcctgaagccattaatactgatgctttaaaaactgaatttgaaaataattgcaaagctcgtaatattcttttgagtgggatttc

SEQ ID NO: 26536 - DNA, 1278 bp, Oryza sativa
ccgtggaccgcccctttcgcttcccccttccctcatctctctcgggtgccgctccgccgcgccgttggtcgccggcggcgaccatcggggcgcgggtgcgccgcctcctgtcggccgtgccggagaggccgccttcgggcgcgccccgcggctgccaggtgggcccggccgtcagccgcccgcgcccgcgggtgcggctgacgcgtgggacccacggcgccgaccggcgccagccgcgtgcacccggtccaccgtggaccgttcggctgacgcaataaatccgatttttaattaaaatttaaatgaagaaattcgcaaatatccatttaaagagcatataaacttcaaatggccataacttggccatttgaactcggaattggaccgttcaagtctctaatttttccttataaagccaagaacccatttttgtgctttgtttctgctgttatatggagtttattagagtaaaagccttttcttttccgttggtcgtgtagacgctgcagcttcggaagatccgctcttcgtggaagttgaagccgacgtttgggaaagcgagcaaggcaagtcacatcatctttgaacatattgaatcccagtttgtaaaattatgttgatttaaattattgcattatcgctttatttaaattcccgcgttatcactgttttatttagccatgcctatttacctttgttatgaccctatgattgttattgttattattaccttgttcaccctagaataaacaaaacctcaactagtggacactctactcatggcatcactagtttaattttaggtagatgcttcgcaatttaattaggtaacattaggtggtttttcaattttagactttgggaaatattcatatcacctggatactctggaatggtctggttattgtggaattggcttcacaccgctccctcttttcaaaacccccaaaatggttttaggctgggctcggggtgcatggttttgatagtagcacctcggccatataaggaccggtcttcgggcctctgttgcaaagcactaccgtacttccacatgtctagtgggtaaggcttagtttatggctcagtctggttataaacaaaagtacacagattggagatggatgaagtcgggggtcgatggacattctccagggcaaatgaaggctacacgagctgcggcccggtagtcgagatgtcatggcacagggccggtgtcctgttgctgggggctcattcctgcctgcctatcccgggggttccggccgtaggtgggat

SEQ ID NO: 26537 - DNA, 7419 bp, Oryza sativa
tcggtctgaatcatcgtaggccttgggttaaggtaggtttgtgtgggttcacggccttgataaataatattgtatagttctagaatcgtgtttaccaaatagctttgagcaactaaatatctttaaatgctgtttaccgcaaccctaaccctttatattgtaactcctttgttctcccttgcatttattatgcacttgtgggtgtgtcttgttgagtacggtggttgtactcagtcttgctcaatttttcctaacccagaagaggatccccttgaagatgaaggctttggtgtctagctcgtgcctgccgtcaagcgcctgtggtggtcgccctagtcttccgttgcttctcgtttgtctttgtgtgtgctgggccttcgtcgcccatgtaataaattaactatttacgcttccgcttgttaaactctgaattgtatcaacctttggtgtaccttgcctcctgggacaaggattaatgcacgcacatcaggaacgcccgttgggttatttccggtcgtgacaatggggaccgtatcgatggtattccggccttctctcctccggcaacttgaaggtgacgtgttgtttagggaagccatgagtggtgatggcacacttcgctgcttccctcccctcccctctctggccacaccccgcacaaccctacctcgctgtcacaccctcccctcactaagggaacgggttagggacaagggtagctatgaaggaggttaaaatgcacatttgttgaaacggtgggtcagctagggaggtggccaaagttggtttggatcatgagtgctacattgaaccaagattatgaatctaaatttacgatttacaatatcaccaacataaatgacatcactgtccgtgtttaagaaccgtccatgtttttttttctgttttttagattaaatttcacaaaacttttaaatgtcgtatgaaaactatcaatttgcaagaataagtactggagggaaattctgtgttggttccaacctggatattgcctaatttggaaccggtactacgttagtgctactaaggcctagtttttttcgacttcctcattttccgttagcacacttttgaaactattaaatggtatgtttcttgcaaatagtttctacataaaagttgtttaaaaaataaaataaatttatttttcaagtttataataattaatatttaattaatcatgtgctaatgatctttcttgtttctcgtgcggtaaacgcgagaacattgataaatataaccacaatgaatagatcaagaagtaatgcatcggatcaactgtaattatcatcaaaactcaaggcaatgacattatttcctcacaaaacggatctagaagaaaagaccgacgagagcggatgtagatgtgggtgatgcaagtgagccaccccggcactgctgaagaggagggagccaccactgtatcggtgaaggggaaaaggccatgttgttgaatggggaaacaaaccgtggccatggttgggtcgggggagagaaccgccacagtcaaacagggtacactggctagatccggtcacccccaagctcattgcaaccagatctgactactcacgacctcttggtggctagatctggcagtccctaagctctagattgcttccacaacatgggagtggataggaggtgccaccaaagttgatatcgcgatgaggatgtggggggtggtgaggatgatggccggcggagccacaatggtaggagggggactagtggttgttgactgtcgttaagtaccaaattcgaacgtcaattaccttaataaatagaagagaactagcatttcttatgcgcatattagttacaaataatgtagttccacttatccttggagaatacattgaatgcagggattatacaataaagtgtaggagaatatgtgccagcatgcaacacctccggtgaatcacgtgaaagcacatggactgaagggcccaaaagcgagaccaaaccaacatattttgggtgaacccaacgtgcaccatcataaggacccatgatgaggacacaactagctcggatataaccatgactaccctatgtattaatcaaccaaagatgcatatgttctacattagatttacttgttatatatttgaacaaacgttactacataatgagttttgtgtgtttgtttgcagaggtacttgcttggacgaaggaaaagaggccgagcataacgaatgcttggatgatcaaagaagttgattgaggaccaaaccaagaccttctccatgtcttttgtatctcaccacgtcacttttggtccatagaagacaagagataaagttctacacgttttggattcggattcgggcctcctgatagcatcaacttcaaacggacctagccgctgatctagaaagaatttcgaggcccatgagtacttgttggaaagcttatgtagctgactttcagatggttttattactacatcaaaattcctactgagtttccaggaatctgaaaaacaagccacgtatctcatccagtccgaatctgatttgggtttgggccttgtaattgtgtcgtgggcttagcccatcagggtgtgcaccctagggcaaccataggatgtccctaataatacttaaccaatagccgtcatcgcttagagtcgggttttgcttagattactctgtcaagaacagtttcgctgctagatcggtttgtggaacccaaattcgagtgcttaatcattcataagcaatttggttgcaatctatcttgttcttgcatgtgttcttcgattcgcatgcagggattagccttctcggcgaggtcaaccgggtttcagcacggttgataaccagaggagacgtggtgctgcaattgcggggcttagtagcgtgttcgtttataagccggatcgagttgtgtcgcgactctgcccaaatcgtctgtttatcaatacctatcggaagatcggaacctagcatccctcatcagttggtatcaaagcgtggttgcccgttaggtaagttatcttcccataaccagaaaattgccacacaaaaatatttattctttacctagacaatttgagccgttgcgttgttctattagattttgctttgttgaattctggattgcatcatcgtgtcgagtgctggtttagttttagatttcatttttagttttgagtattgcatctgttcatcacttaggtctaggactcatcactcaagtctgtgagttgtacgtcagttttgaatttagtttttcatcccgtcggttgttgccgggaccttgaagaattgaatcgtctcgatggttggtttccgttttcgtagtttggagaagttaatatccaacggttttggagttgctcgatttttagagttactgtgttggggagttagtgcgcatgtgaggggagaggacgagccccaactcttccgtaagtagtttctctccatcgagtattgaaagtgttaaagttccagatttgagagatatttttgtaaaaacggaacctacatgatacattccatttttgaggagatctaatttagttttacactttgcatttgagtccctgtaattttcatatttacatttgagtccctattcgaggccagcgatcagtttttgttaaaaaatagtaaaaaataaaaaagaaagaaaaggcagaaaggtgcaaagaaaaagaaagaaaaagttgcacctaaaaaaagaaaaaaaaaagggcagaaaaggtgcttaaaaaacccgcaccaagaaagaaaaaaaaatcattcattctttgagtatgttttcataatgcagagttgtgcattgattcatatctagtccttagtgttgtcaggtgcttgcttgagctagagttgagtctaggctaggccagcacattgactagtacttttaactattattcaactttgcattttctgattagcacaattgcgttcctttgctaatatatatcatgcctcccaagctgcacgtatatacttctggtcagcatcgctttgatccttgcaatcgccacatcacgtccttcaaggtgacatgaactagccaccggttgtaccgtccttagcattgctgataagacacttgtaagagcttgataaggtgctccatttgcctaagttgttgagaggcaccactacaccgtgtagcagagtttttatgtttgcaatgataggtatgagtggcgctcaaaatcagcgataccaacaaggtgacataatcgtgtgcccgaagatccttatgctaaggttaagtttaaaataccatctttttcaggttattatgatgctgagaaatattttgattgggagatgatagtagagaaaaaaattagtacccaccttgtgcccgagcaacatagagttcgacaagctactagtgagtttaaagagtttgcttatatttggtggactaggttagatgtatggagacctttacctactactaggaaagaacttaatgtagctatgcgtgatacatttgttcctccatcttatcttagagatttaaacaagaaactgaagcgtttagaacaaggggataaatctgtacatgattactatggtgagctacaaaagggattgaagcgatgtagcgatggagcgattgcaatctatcttgttcttgcttgtgttcttcgattcgcatgcagggattagccttctcggcgaggtcaaccgggtttctgcacggttgataactagaggagacgtggtgcttcgattgcggggctcagtagcgtgttcgttcagaagccggatcgagttgtgtcacgactccgcccaaattgactgtttatcaatacctatcggaagatcgagacctaacatccctcatcaacccacatgtcagcctataggggaaagccagtggagaagggtggtgcccctggttgggccggaacaaggtttggcaaaacagactgaccatacgtcatctccaccttccacgtggtgactcatcaaccctccctgccgatggtcacagataaaccgaccttcgcaaccgccattggatgatttaaaatggagggtgcattctccctttacaacacacactcaagaagcaatctctctattttatacttatatactctctagattagttagtttaggctttgaatagttctttgtttcctagtcgtgttggagatgcgggtatgtcttcattaatttgctctctttgtaagactatgagcttagtaatgaaattatcttctttatttaattgtgttcgttgttcatactttgtcaattgtatgacctatcattagtttatagttctttcatgaaatataaatgtttaggctagtcgatctatgccaaggcatcggtccaacaaacttaacggattgtactagttctaacttgtccatctgaagggtaggagtcagggggaattattgatattattaagcaatataaacatggtgcttagattcattaaatgccattagataccggtatgccccacggaatgtgaattagatgacaggtggtgattgccatgtccgtcttttgtattccaccacgttcggatatgacgtaagagttcgtaaaatgccttaaccacactggcaaactaacaggaagtagtatctcggtagtacttgggtgtctacaattaagttctagccatgtatatgtatatgattattgtaacgattaagcatgataaatatataagtacatattaaatcgtagctttcctttgtctttctccacttgctagtttatttatagattttaattttctgggtgccacactacccaagtatcattatttttatcacttttctctgttagactatggcatattaattatagcgtaattagaatatatcggtctatattttacactgtcgccttccatgtagaaaaacaaataaagacacccatggaatactcttaaatgaaatgctacagtgctatccacgtgcttgcagatttatctattaccgtatcaaatagcaatatgggtggaggttccgctggtgaggaggatgacaggcagtggtgtagcagggagggagagagagggagacgtaggaaggatcaagagagatgaaagagagccatggaaggacactccgtaaaaaggaaagagatgagagacaaccgagagggaccatgagagcgagccagcccgattaggtattcttaatgggcatcagtgctctttttaagaaaaagtagcattgaaatttgaccagcgtgggcctaagaaggcaagaaatggctcatagatgaacaacacatatgaggtttcacatatttggggttttgttgtagtcaacgtggtgatgaaaaatcggcgctcggccgatagtgccggaactgtgttggtacaaactaagttgacaatagcaatagcctgggatatctgcttagctccaatgtaggtcctagaattgatgagatgggggcgtgcctgtcagtttgatcctgcaactgacaagatatgtaaacaacagatcaaataaccaattggctgacaagcttatggagcaattccagctgatgccgatagggttataagcaatcaactatatttccaatgtatattatgatacttgagtaaataatgatatatagacaatcggctgataataatgtaattaagcaacaatataatctagtagaaatcaatcggctaataacgatatgatagaataagcaacgatccgaatgttaaagcatacatcggctgaaggtccgatgtcattaaatccaaacgattagataagtaatgaaacctttgttgcaatcggctaaacccaacttgtatataatctctataagccgatacaacgtccatataactcatcggctaaaaccccgatgaaacccttattggcaatcaatggcatgttagtttttatggttataagcacgactaaggtcaatgcaactaggagtttgcaaacaaacataaagtctaaacaatcaagcctttgactgatttttaagagtggtagataccttagctaatctaatctagtaaagtgatttagtcgataccgacaaaaaccctaaagtagatcccagccaatacaagtaaatcgagcaatcaaactagattaactaagatacatgataggcaggtcggcaaatatatcaatcaaaccagagcgatccaagaggtcgaagcgatgcagccttaaacagcaccaatatagttgacataattgccaggcccggtggaatgtaggacttaccccttcgccggagatccactacaggaattctgggcttctgtgacgattacattatgacgataacagcctgtttctcgtcactgcctggctgcaataacgaaatggctgtcatcacagaaggtgggtcactatccagcttctgtgaccaccagaggacatcgtcattgatactgtgacgatagttctcc

SEQ ID NO: 26538 - DNA, 1485 bp, Oryza sativa
tggctgcaataacgaaatggctgtcatcacagaaggtgggtcactatccagcttctgtgaccaccagaggacatcgtcattgatactgtgacgatagttctcctgtcattgatgaatgacgagacaaattcgtcataacaaattgaaccgaataacgccacgtgtatgatgacatctaatgttactgatgacaaggcggatgatgtggcaaatgacatggcaattcacattcagcccatatagcgtgggcttttttattttcaattacaatcagcccaattggcccaaatatgtttttgacccagctacaaatttgcttttacgtttttttcactatagcccaacaatacaattctagcccatattatgggccagcccaattaaaaagcaatcacaaaatataaaccacaaccatttgcataattatattataatcacattccagccataattaattttctagcccatacaaaagcaagttccaaaatacagtttccaacatatttccatacaaaagcacaaaacatgaatacaaaatgatccatccaccatccaactacacaagtcccagctgactacaaagttcctacaggtagtgccaagttcctgcaccaaaaaattccacctagcagccactaagtttcggcggcgtgcatcttgccagtagccagcaaaaaaattccaccaagcagccgctgcacttccggcctgcatcctgccagcagtcagcaactagtgccaaaaaatcctgcgttccagcaaccaacgcaaaaaaaaatactctggccactaaaagtgccaacctgcaagcaaccaacagatatcacatttggtttttggcacatttgtcctgcacatgacgcagttacatagcataagtaatagaaccactatgcatctgtcatttccttgcaacgccattttcatttgttttcagtggtcactattacattaaaaatgcaaatagagctgatccaaacagagctataaactggattatggaataattattttaccacctgagaatatcaaatttatgttgatgtatcttaggaagctatgtggttaaataactcaggaagattacatgaattatcttatagtcaatctgaaaactgctataataaatctagaattatcagatgtagctggcatgttccaattcctcctgacagaatcaaaagatctcaaatgtacctcatatccaatatgtatatacctagccaaacatgaatttgtgctcgaatcaaagtaataagctcacacaaaatgaaatctgctaaacatcacctgcctcacctactaaacttttttaagataatggatcaagttagtggcacaaggttttgtgaacattttgattacatcactgtaggtttaaaggtaatcaagcccaatatatcattaaccaacaattcccaattacccaacaaggcagctgaaactgtgaaatacaaccataaaaaacaatatagaaacattgtg

SEQ ID NO: 26539 - DNA, 1782 bp, Oryza sativa
aaaagggagggagagagacagcgagagagagagagagagagagcgttgggagagagccgcgagaggtcgagaggggaggggctcggctgaggtggtgggaatggaggtgcagttcccggccgttcccggagaaggacgacgacggcgtggtaggcggcggcgtgagtgtggggaaagagaaggtgaaggagatggtgatgagcagcggcggccgcggcggcgggtgggaggaggaggaggaggaggaggaaggggacggtggtggcggcggagtggatactgtggatggagtttaggctagggtttggagaacaaggtatatatggataagaagcattccgacgcgaatttaccaaactgtccctggtgtgttctcagtagttacaaaattgtatggtcaaaatgggcatttcaccttaaattaatgagaactttaaatttaattttaggctgatttttatgtttcaaatgcaaaaatcataaacaataaaattgtaggactcatcgagatctacaactattgtattgctcctttttacaaataagttcatttgaacaattcaaattttgaattttcaaaatttgacaacttcaaacaaaaattgggttaataaatgatttcaaatggaaaagttgtcagaaccaaagttgtagaactcatcgagatgcaaaatttttattttggtcatttctccgtctgactctatttgaatagtttgaaatttaaaattcaaagtttgagaacttcaaatagaattttttattagtgaacgacttcaacttaaaaagtcatcaacaacaaatttgtataatccatctagatctataatttttattttggtcatttgttcatccgacaaagtgatagtaacattgttcataaaatttacatatctcttatagtttataaccaaaataaatgttttagatattgatgagttatacaactttgttgttgatgacattttcagttgaaatcatttattatttgaaaatgttggttgaagttgtcataatttgaaattcaaattttatataggtcagtcaaactcagatggagaaataaccaaaataaatttggtacatctcaataagttatacaattttgtttttgacaactttttcacgtaagttcgtttagtatgataaaattcgattcgaagtttaatattttgaaattaattgaaaggagggatgtaatatgaacttttcggtgaggaattagcaaaagggctggcccataataggcctagtttcagtccacctctgtttaaccttttttttatttttattttattgtagcattgtgaagtaacacacaaaaaatcatataaatgaacttatttgaaaaggttgtcaaaaacaaagttgtataacttattgagatctaccaatgttattttggttatttctccatttgagttttattgacctatataaaatttgaatttcaaattataacaacttcaaacaacattttcaaatactaaataatttcaaatgaaaaagtcaccaataacaaagttgtataactcatcaatatctataacttttatttaggtcattttacaatatgactttgtttcaataatttgaatttgaatttcaaattatgacaacttcaaacaatatttttaaatatcaaatgatttcaactgaaaaagtcatcaacaagaaagttgtataactcatcaatatctataacttttattttgatcatttcttcatccgaaaaagtgatagtaacattgttcacaaaatttacatatctctcttatagtt

SEQ ID NO: 26540 - DNA, 8893 bp, Oryza sativa
ccaaaccaacgccactgctccacccttcgtgcaaatacgcagccgcacaaaacagcaagcgagagcacggcaaatttctgctcgcctgcatgtatgtgatcatcagcccggccagaagcttgtcgactatagcaaattaatctccacttgcaaccagctgcatgagtcttcacctctctgatctctatctgcatgctaatgcaaatagtacttattaacgcaaaaaccttccttgactatggttaagatcagctaatccataatatttccattccatgataaatgctaaccctccctagccagccgcgcgcacacatttaatcggctctcaaaccaaccactccaaatcatgacagctaaactaaataatctggcttacccaaataaaacaaactattagccaaattatgctacaaacacatgcccccctgttttcggtataagtagaacgtgtaacttttgctttaccgaaaacaccataaaactaaccaacctaaaccacaaccgtcatctcagaacgatactccacacacggtatcggtcctgagcccatccacagttgtcctctcaaaacgatactccacacatggtatcagttctaagcccatccacagtcgtcctcttaaaacgatactcaaataagtactcgttttgagacaatcaagtttcctgtagtacataatgataataacctttcaaatatttctcatgtagtacaaatttcaccactaattcggttgtccctaatgtccacctaaccgaattagcttgattcttaacatttcttagattcaaaatatcttaaaaataacacatctaaacttcgatactgttaaaaataactcatcttatagctcggcaatataattcatcatccaataaagcatatcttaaaacttgtcgccgaacttttctatctctcatttaactcgggtttttacataatcaacgaatggatccctccaatcacttggcttaaactttcctattgactcggttgtccctgatgacctccgtaccgaatcttctaaaccctgctcggccttttctgtgctcaaccgaccagccagcagtttgtatatgaacactactaccatcaactgcagcatgcgtgaccccagccaaataaaaatatagaccatcaggaacgccgccgtgaaacataacattaacacattgctaccaccacacacatgatgcaccacagtaccttcaccattaaacaaaccggcttgcatagatttattatccgaacaaacactgctaattatagccggtttatccactataaaacacacctcaagtcagccatatgatggacaattaagacatctagcaatttaattaaatctaaacattggtcgaaataactatttaacagtccaccgaaacactaaaacttcctattactctatcggactattaaaagtaaatcatcaaaagctacatccctcacaccaacatcgactaaactttccaaaccgaataatagagcatctactcggtctaaagtgcaagcatgctctaaatggactgatagggaccgatgtgtcataagcaatattacttagtaaaattaaaacagcaccagctccttgccaactcacacaaactatatacgaccgaaataatttctaaagagttataaaaaatcacggttatttctagcacctaaatatttcggtctctaaaagtgataacaacacctacaactaatagtcaatgtgtaaaactatacggtaaaatccctccataatataaagacccatatgatatccaaggataagaataaaaccatgagggataaacatgcatacctgagaattgattccatgacataggtatcggtggcataggtgaagaatatgtataatatggtggcgaaagaacctgatgattagatgcaaaccgttgatttggcgcacacctcttaactcccttctcattttttgcccccactccaactttaacatctgtttcattctgtacctgaacacttgctttaagaacccatgccatacctctctccctcagcttttctgcacttagcttgtggagctgcttctttcgccaatttgacaagccatgtgagtgtctcagttggctgccattgccccccgagctcttcggcggattctgacttgttactaactctgccgaagatgcctctcgcttcatattcatatggtgtacatttcctaactgttgtatacgcgcatgccccccaggttcaatagcctttttctgaactgaagcattttgtacactcacatgtgcaccagcagctaagctcttttcttgacctctagacttcggcacccagatttgcttccttgttgaactaccttccgcctgtgccgaagacttcctactagaccacctagaccgatttcttttatcaaaacggtcatccttggcatatgactttcttggagttgcaaaacgcaatcagccttcattaatagccgattgtattttctgacgaaaaatattacaatcactagtacaatgatcggatgaattgtgccacttacaataaattcattcttttaaatctggaagcggttgcatgacatagtgatcaagcaatttaatataaccattttttagcaaatcatcaaaaatatgatcgcacatagtccaatcaaaagtatacttcttttcctttaaccgacacatctgcggagatggttttaaagctaagcaaacaaatggttcagattttccatcaacccattcggctacataattgcttatatttcccttatccattgatttagaactatccactatattagcatcaacctcattaatattttccaattttagttttgtgcttctagctctagatttattataagcaaaccatgtagacataaactttggcaaagatgatatggaaaatctaagcactttactattgccaataagaacattaacctccccaatcgatcccttggagttattcatgatgatattactgatgcaggtatgattttcagataaatgatcaaattgggaaataactacattacctgcagactttacctgatctgatttgttggagaagcattctaattttttcacctgagcgatgtctaggttcgttctttgatggctctccaatattttcaccttgtcgtcatgatttcgtgctccatcgtcaagatgttcatcatcttccttagcacgaaattcagctggcaaaacaaaaggtcctatgtttccagagaaatcaagcatagctacctccttttcattagccgataaatctaaatttatcagcttccattgttgattaaaaattggttttgatcccttgcttaagatatatgcattcattttctcctccacatctctatatatttcttcaataaggttatctatcttggaactaaaatcatccacaaattgccccccaaccgaacttgctaatttggtatcatttgttctatgcgtgtcttcggctttatgcgttgtcgactgcacaaatgacccattttgttgaaaattattaacacttggtttcggcaatggaatatgctcgatgccgaaactctgtggctgtgcaggggacaaactatatgttgtggaattatatggaggtaaatgcttgcttgctgaattttcactaattcggccataatcattaacatcacatgaagccgaattataactactagacactgtataaggtgaaccataagcatgaacatgagcatgagaagtaatctctgatttagcagtatttgacatggcatgtaatgtattaatagaattagtaggataattgccataactatacatgtcattcatcggcatagttagtggtgtagtgacaggtggtgaaataattgccgatgaattaaaaggtgtgtgtacatattgtatattgctagcattactaaaatttaaagtatgtgaagtactttgcataggcagtgacatattattttcgtaattcaaagagctcgaataattatttgaataatcactaccaaatgcaatatgtccattaaaaataggtctagcaatatttatatgagaattcactgtactagcaaaataatttgaaggaacaggcaaagtatttgcagattgtacctcgcaattgacgtaatgaggcagcggtgtagcactcctgtatgactccatgtattttccagcaagtcttttttttttgtgcaattgatctgtacatcaaccaaattttatcaaaataaaacgcagacaagcactgacctgatggcttctttcttcccttctgttaatgcaagtgtgctgctgttgtgtttctagattagcgtacactttatctcaagcggtgactgggcggctagcagaattccagatcggcgtggctccaccgctccagcacggcaatgaccaaccgcgtcagattgatcagataaccgtcagcgcgcgcatgagaagaatagcagatagattatggccgaaagattctacgacaaaaaccaaatagtagatcaaaatattcggccgaactacagccaaatagatcgatggtacaggattgatttccgtcaaattaatatgcccgaaattctcgtccccagtggagtcgccaaaatatgtcgacgctttttcgtggccaacacaagatcacctaacgatttgcggtgtaaacaatagagtcgccaaaatcgatatatcaaaatcggctagtgaaaccgatttcgagattaattcactttcgcggaatcacacgactaatttacaagcaaattagtaaagaagataaatatcgtacttacgtgacgacgaacgactagtttccgagcaaactagcaaaggataacctcctcgctttcgtggagaagcacgaccgtttttcaacgcaaaacggcaaagataaaccaaattctagggttgctagaactcagccataaaagcaaaatagaaaaaacaggaaaagtaaagaacgagaaaaatagtagattgataaattgtgatcggggtttcttcaatcgaccgtagacctgtatatatacagataccatggtccaaccgaaaaggaaactaactgataaaatagaaaatctatctatctcttatcttcctaacagccgtacgcgctaatcacgcctcatcatctccaaaccaacgccactgctccaaccttcgtgcaaatacgcagccgcacaaaacagccaagcgagagcacggcaaatttctgctcgcctgcatgtatgtgatcatcagcccggccagaagcttgtcgactatagcaaattaatctccacttgcaaccagctgcacgagtcttcacctctctgatctctatctgcatgctaatgcaaatagtacttattaacgcaaaaaccttccttgactatggttaagctcagctaatccataatatttccattccatgataaatgctaaccctccctagccagccgcgcacacaattaattggctctcaaaccaaccactccaaatcatgacagctaaactaaataatctggcttacccaaataaaacaaactattagccaaattatgctacaaacaggtcgttagttaaattaatcaatggtaccatcgatatctgcaaaacgccaacacacctactccaaagtatggtacagaatagggatttgggattcgctttgaaatgtctgaactctggatactactggcaaaactattgccgacgaggtgttacagttttcccaggtgaagaaaatgtggggtgagatggccgtccgtctgcgaagattaatcttcctagacagacgatataaggtgccacctggaaagatacatctttatagacggagctttaagaggtccagcaggggaaagattgaggatatttccaggtgaaccacttaagagttctgcctccgaagataattctttctaggtgacacctaacggtatgtgaccattacagttattcaccccctcgattatgatcatatgacgtacagaacaattcctaagaatgtaagtgattctgatctatgcatgtgtactaatgcaatgttcataattattacattctgttcattaatatgaatcataaatcctatacgtacagtgcgtacaactactacaaagtaaagtgcagggaacaaccgcaaacgagtgagaagttgcaagtgcatacatatatattggccggtactactctgcacacttctctatttaaattctttttcctgcaatgtataactaattccttctatatgtgtgttataatgaagtattacaagcaacctaaaggcagtgtcctttacggatagtacatatgcgaatttcatagggttaatgggaggtataggaccaataaagaggatgtaagtctcttgactgaacgtataactctaatagtggaatgcgcatatcaaattgatattgtattatattctcgtgctttcatgtatgcagttgtctacaatcgaacgtcgaactagctttcactacgaaggcattagaaacatacagtgggacctctaccacttcatctaccgtgagtgttgtcataaagatggatttttcttcgaccccgaaggtagcttagcgatgaacggagaatacaaatccatttggaagtggaactacgtgcttgtgtaattaacaatatagttagaaatgatagtattgtaaatattattgtatggccaacacatgatggccaatagtactgtaattagtgcatcaaacatatgtgtattatatccttgttagctgttggatgtatttatgtattgatgaattaattaattgcatcattattgattaaaaattaatattaataaatttgacatgaaaaattatattttggctcgaatattttctccggcggccatcctactcaaatgaaacccgaactacgtatttttgcaagcagcgtaatcatattttcgtaggtgatatgttctgactctgtcagcatggcaagaaatattttcgtaggcggacagcttaggttgtccgcctgcgaagattcatcttcctagatggaccggccggccgcctgcaaaaatgaaagatttcacaggtctttgtgtaaaggcagaccggccgttcgcctgcgaagaccatttatgtcactaaaaatagtattcctaatagtggaaattcagagaatttcatcaactacggtgagctccgagacaacatttaactcccatttcgtctggatttggttcatatggttactatttgatcaactttgtccaaatttttcgaaattcgttcatctcggtggagctcaaaatttttatgcaatcgggttgcaaaaccctgggactttttctattatgagtaaaatacatgagcaggacataaatttagattagggtgtcatctaggtttttgaatttgtgaactacacatatagataattaatcttggtttatcacccaagatttcaaatgtagatgatgtagctctgacggtgatgtggccatctacgttgatgagaattttgtatttaagcccctccactacattatgcctccagatcgactcccatcacgctcgtgaaagagggggcaaagggggtacccggaggacaacaaaagaaggtacttggagccgatattttttttagattataagaaatcaacggctctcctatatcccaagcaccttagaaaatctctttttttagatgggtatttcttttaccggctctatatccaaccggatatatgcagccttattaaactaggaactagcaaatagggaatttagcccataaataacccaatctaaaatttgcttctatggagatttgaacacaggaccttagagtgctactcaaatcactgcaacctgtgagctacttggagctgagatgggcgatacaacgtgtggtatcaccctcgtgctatcaggtcatccatccttgctccgaggacatcatatcaccgacgagatccaccgctgtaaacgcggtttctttgtctcctcttgaacaagcacactagcggactgagctgatcttggtcatgctatagcagagggcgccgctgaatgcgattttattccattgtggatggccaaattagcattgagctgtcaattgcattttggaccttacgtgatacattaaatcaagattagtcccatatatgtacactactacagaaacactaatataagtcggaactataggtactgaaagtggtaaaaaccagcccctacagtgccattcccgcccaccagcccgcccacacgccaaaacgagcaagaactggcacctttgtcacctaaaaggtaccagcaccttttactcctgtcagatatagaggccggttgtaaaaaaaaaactggcatcttttagaacccatcccatcggactagttggcacggggcccaccctagaacctgcatctctaccaagccgagccgatcgagcgccggccttacaatacaacgcgcgcatcagatccgtccttatcctctccgtctctctctctcgttctttccgtctctctctcgcctctctatctcgctcgttctctctcaccggtctaggcggcggccggcagagtggcggtggcagtggcccggtggaggcggcagcagcggtgatagcgccctcccgtctgcctgatgtagccagaggggaggcggcggacctcggcggctgccgggcaacggcccggcggaggcggcagaggcgtgggaaggccaccggcaccgtccctcctcctcttcgtcccaccaccttcctatcgatgctcgggcaaccagatccggcatgccccatcgccaccggcgctcagggacggccaaatccggcatcgcccctccccactggcgcttgggggaggccagatccgggggtggtggtcgaggaggctgggcacaggggacgttggctgtggtggaggccgggcgtggccggaggcttc

SEQ ID NO: 26541 - DNA, 1712 bp, Oryza sativa
tacggatgttatacaatttatttatttattcagtggtttcttttgttttatcacccctattttcctacaaattgtttttctcatgacatttcccctcagacttgcattaggtgtgatctgataaggttatcagcacattaatgggcatcattttcattctgttttggcctgttgatgaatggtactactctttagcgtgttgcatctaaccttgatttggtccctttgtaccttttgtgtcactgttcagtttagttcattccactcctgcgtgatcgaactggactaatattttttccatgttgtataggaagctccagctgttattcagtcatactacaacaaaaggattgttggttgtcccggtggtgaaggaggtatagtacctgtgcatgctaatttccttgttttgacctataaagaagcttctaggatgaaatcttctcctgcatcttctctataaatattcatcgactaaccaccaatggaattaacttaaactgcaaattgcaatgattgatattttcagaggacgagcatgatgtcgtgtgttttggttggagaaaggcaagccacatgaatgccctgtctgcactcagtatttctcggtatgttggtactttctgttgacaaaatcgcttgccttgtgagagcaatttctgcatgagccactaaatcgcgcatatgttggtatgttgtcctgatgttcgctgagctatcaacttgcaactttatgttcacagcttgaggtgataggagaaggaggagatcctgatgggcatgacgatgacgacgatcaccaccatcattaaggttgcagaagtcacctctagcaataaaaacactggatatggccatatccatgtcaactctcaattcagatgacttggagcagcagtggattttggaaaaacaaagtttgtctttttagagatttgttcatgcaaataacaggattcagtaaacaatgatatgcaattctctttttcagcacaccttagtcgaattcaaaataggtatgtttgtttgtttgtcttgatggatgattccatgttcaatggccacctggaccatttattttggtgtatgatctgttatctgaacatttcacaaaccttggtcctgttcaattcagtttaaacaaatgaagtcagcattctgatgatccttctccctcctatccagttcagttatctttgattataaccaagcagttggatgaaacagtcaattgcttttgtaatttctttatatgatccttaatttcctactgcttacgtggtcaatttgttgctttgatgagtgagacagtgatgcattcaaacttggatttggccaaaccagcaccacacacttcaccactcactgatgtcattcacgtgaggatgcattcaaccaaagtgttaactttaccacacaaaataccgaaaattttggacggattcggcgtgacagaattccaatttgcactgcatttaatccactttattgatttgaaccattcctgatctccacacctacatatcttttcccttcatttttttttgatcaggtcagctccttactactgcaagataattagataaatccaatagtgatgcactaggcacaaacattagttgaaatgtagctatcactcttaagatttcagtgtgttttctcacatgtattaattgctaacccatcatgtcaaaatccgaaattaactcgcg

SEQ ID NO: 26542 - DNA, 756 bp, Oryza sativa
ttatactgcttacgccaatttggattaattattttaactttttaaattctttcagagatgatggccttcctagttggacttgatctaatgcaaactgtccattctgtacaccaaatcatctactagtcttaaattaattagctaatagcttagcttgttcttagcctcactgcaaggacctaattaaagaatagctagctttattgtccaggaagtcacgcctgcatatatatgtacctttcaacgtttttgatcaattcatagcaggaattgatgcgaacacgaacaattcaaactggcctgaccggaattcatttcgaattgtcaatgttggtacgtagccgaaatgaattgacttccgtagcaacaaagaaaatgagaagaaagtcttgtgttaggccaaagcaaaaatatttatttattttttgacctccgttctgaccctaaaatggcagaaaaattaaagctctgcaaaattttatcttgcagcgagattgactgtcaagaccttggagctagtggatccgtctctctccgggtttaggcgtttagggctcttttgaattggaggagattcataggactttttcaaaaaaaaaaagagatacagagattcgtaggaattttaattgtaagaattcatttcaactgtcaatgttagtacgtggccgaaatgaattgatttgtgtagcaacaactacaatgagaagaaagtcttctgttaggccaaggcttgtggacctccatttctgaccc

SEQ ID NO: 26543 - DNA, 580 bp, Oryza sativa
cctccgccgttccaaccgtaagtgtctactatctcagatcatgctacgctaggattaattagccctttttctcgtgtcagttcttcattagcagagtaggagtactaacttagagcacattttatgtgttgtttcatcgatcagctggcgagcgtgaggatgctgccatgggcgaaggcgaacatcaacccgacggggcaggcgctgatcatctgcacggcggccgggatggcatacttcgtggccgccgacaagaagatcctctcgctggcgaggaggcactccttcgagaacgcaccggagcacctcaagaacacctccttccagggcgccggccgccctcaccctgccttcttcaggccatgaatttctcctaatcaactagctatagaaaaaaaaaatgctgcttgcattgctaggctagctgctgcttcagaaagtgtttgctgtgtacttggatcgatgtagtatactgtatgtctgtatctccagtttgtagtactaataaacaaatcttttgaacttgagaacgaattacattgatgtggtggttttgtggttcatgtgcattctacaagtt

SEQ ID NO: 26544 - DNA, 1394 bp, Oryza sativa
  unsure (1)..(1394): unsure at all n locations
gtcagcactcaagggagttgtctccaaggatatgcatgtcagctcaccaagctctttcaaagatgattgatgtgaccctcacactcttaaggctgtgatgctgctcttctggtattgatctcagatctgcagaatgtgcaaaaatgaaacattctgcacgtaccgctgcattacntaggatgtgaaagggagaaattttaagtgacatttccaccacacaactactaattttcattcatagcagtaataatatatgaatggcaactcacagtcaggtagaaagtctccagagaaggtgcagcatgaatataagaagccagggacaaatagtcataggctgggaaatatccaataagggcaatgctcaagtgcctgaggcagaggaatttgctacacagcttcggtgcaaaggccgtctgcataaagaggtcaaattaattatgctacaacccataagacagaatctagtctcattcatgtgtcaggcaaaatttctcatacctctttgaatgacttcatggcaagagattcaagatttggcatgatggatggaagttcagcacgagcatgataaacataaccagagcgaaccatgcataggctcttcatttgcaaagtttctccaagtttcagttgcgttttgtccccttgaaatgcaaaaatggagacattaggagcttcattttctatcagtttcagattgtcgcacccaaacaccttcagggagatgagccgctgcagtaggcaaggtaccttcaggcaaacaatcctatcgcagtacctgatttccaactgctcccaatgcaagagaatgggaaagaaagcagcttaactcgttctccgtaatacgcacacaccagagatacaatctcgtcagacttcttaagccaccaagtgtgactgttgggtggaaggaacagttagaaaggtgaagatattggattgagtctccactcccattcgacagaagagagcatgggaaattgtactttgcctggaactgggtcagtgaaattatgagttcttcaatccctggtttaacaccaatctgaagccaattgttgagatatgaagagcccttcccactataatctgaatataccttaatcgtaagttttttcacgccgatgcctgagtgccttttgagaatgtggtcgactttgctgtagaaaagtccagccaattcttcctttccacatgcatttctattcaacccaaatgcttcactactgaaattgaggttgggatggcatctccaggaacttagaaaggaacgagacacacaggcagctcgggcagcagctcgcattggcatcaaggaatgtataagacgccagatgtcctgcttgcacaagcatatgggagagaagttaaacattgtactaattgtgaag

SEQ ID NO: 26545 - DNA, 613 bp, Oryza sativa
gcattaacatcatgatcagtagccagttatccacaacagagcgagataagatatccatgaaggaagctcctgctcatatgcatagcttttattagcacccacaccttaattaattgcacttaggcatatcatctcacaattttcactgcatataacacagtgaacacacacatgcatgcaagaacacagaagagacaacactggtagtattctctctgggataaaaagggcatgtcattgatgccatattgctgcaaatctagttcgattttgtgagagtatattcagatttagccctggcctttgcagcctcgagggagtgcttcctggacagctccaccaccttcttctccccggcgatgaagtaggccatgccagcagctgcatcattaaccaaatcaaccatgaattaatttcccagagctcttaattatcagttgctgatctttttcaagcactattatctgttgtagtaattagctagcatcaaacatttttaccgtaggtgatgatgactgtcttggcgactgggttgcccagattggcctttgcccacttggacatacgaacactggcaaactgcaagggatcatatcaaaagttgcattggttc

SEQ ID NO: 26546 - DNA, 539 bp, Oryza sativa
  unsure (1)..(539): unsure at all n locations
gtccaatgattctttcttcttccgctacatcgatctcttgggtcttggctggcctgcctataaattcgcaggcccccatgcctcttcccaatccaatccatccatctcccttgcttgccgtacactcgatctactctctcacacactcgtgtgatctctctctctctctctcgctagtcgattggcttgcctagctctctcaaactgctctagtgcagttcagcanaatctaagtgtctgaaactaatttacatggcaacggtgacccgtgcacacctggagcagaggctcgccctcgccaagcgctgctcgcgtggtacgtgtagtagtcatgaactacaatgttcttcgtctttgcgttaattgaattccatggcacttattaactgaatatatatcgactgatgcatatatacgtgcgtgctttgtgaatctgcagaggcaaacattgcaggggttaaggcggctgccgttgcgaccatcgcttctgcagttcccaccgtgagtaaactctctttatatatatatatctctctctc

SEQ ID NO: 26547 - DNA, 1532 bp, Oryza sativa
  unsure (1)..(1532): unsure at all n locations
gttgttgcagggtacatccactattgacagtagacatcacatgagcaggttattggttgcagtttacagagtagaagacaaagatgtctgcagactgcagccatgtggtgctgcagaacggctgcatttctgttacaacagaaagatgaatggaatgagtagtgctgatttaagcccattctggcagtttcatgctaacttctttatggattgcanctgtgttgtaaaatgaaaaggccaacatggttaaatggatgtaatgctagcccataatcttatctgctgggtagtttcaaaagaagccgatgatcacaaccttcaagaaagagttaaaacaaacagcgatcctcttaggctgtcatcggttcgcctaatgctggttataagcagtacggtttatcaacaagaaaaacgataatttgtgggtaaaaattttatatatgtgtccacataatttatttcctactgtttgacgcggtccacagatttctgaaatctgaataatctaacacagaatttccaccaacatgacagggcagagcaggaaacagtccatccaaggatgcttctttatttccaaaggccattacattcatttgataaaataacctggaggtgaaggctaataggctgtgactttgagcaaaagcttagtaatggatgcgaaaatatcgcatcaaataattcaatgtcgacaaaaggaatgagcaatggggacataaaggtcaggttacataatagagggaacaaagctaggcttaacaatgacagaattctgtgccaaaagaaagacaaaaactacagctatgagttgtcgaaacttaggatgaagatctaatctaaaaagcataatgggaccatgggtcctagttctgaagcataaacgtttgcaagaagtggtgcagcttcaagaagaagttagatcgatggcccatactctgtaatcatgctctagtgtcaagggtgctttgatgctatatcaaaattccaaggtgacgataaaaccaaagctgtttatcctcaagcanngattcactatttcaccgtgcaggacatgaggtggtgtaagtgtctctcatgcatgcgaatctcagcatcaggtatcatgtgatctagaaattcctcggcgtcgctgaaaattggagagaacaagataaaaacattttagcatagtctactcctgctacatatcaagcaaaacaatgtagagtctaaaaacaaaaaagttgtcgctgtctgtggttacaaggaaagacatgaggaccactttggggaataaggacccacgcggttgtgcactgacatatactggatgcaagaacattgcatcaactagctcaccgtaggacatggaaagcgataggtctagtaaagctttagtaataattttcctttttgtaagaatatagcatcaatgtgaagttgtggatgtctaattaagactaaaagtttcacagggaaccacgtcactgacaacttcaaagtcctaggaaaccttgcaaaagaactaggactctacatatataagtaaa

SEQ ID NO: 26548 - DNA, 997 bp, Oryza sativa
tacttcctcggtttcatattataagactttctagcattatccacattcatatatatgttaatgaatctagacatatatatgtgtttaaattcattaacgtctgtatgaatgtgggcaatgctagaaagtcttataatatgaaacggagggagtatgtaacatgttctcttctaccacttagtgaagaccgggcatacaaaaagcaccaaagaagcagtcaagctcttcataattaaaaaaaggaacattatggaactaatctgaaactgcacaatattccatgtaagataagttggtgatattttttttcagaattccatgtgctgctgttactctggtactagattcattaagggggtttctaaagaaacactgtatgcttgaagatattgatcttttgaattatatatatatatataacagcaatattgtaccacccaatcaagcgatctcgttgaaagaagtcgacccgctgaagtaaagttccaataagatgacgcatgtaatcggaccaagaaaaaaccaggaatactaattagcgggcacgcgctagcaaaagaagtcacgcgcgttttccgaccgcgtcacgacaactagggttagggttagggttgccgggtggggtgggggaaggtggcgctgggagggcgggcggtgggccggtgatggtggcgggggcaaagcgaggcaaaggggagggggaggaggccggcggggtggggccgcgccggcacgttgacgcctttcggcgccggcacggtggcggtggagaaaagagctaacctgttaccgagggaggaggagcgtgctcgccggagcccgcaccggagggtagccgctccgctgcctcggacggactggaacaacgatggcgatgggaagagattaaaaaaaaaaaaaaacaccagttccgcaagaatctttacaaggcatgccacgagagggactccgggaagggatgggggagggtgatgcagggcaggaattctaccatgct

SEQ ID NO: 26549 - DNA, 915 bp, Oryza sativa
ctgcattagtgcacaattgcacataatgcataagtatgtgctgtatttacaaatctttatagctttggccttcaaagttcacaccaactagctaggggatgcatcatgcatgcatacagtcattagtaatttgtaatgcgctaacacatgttgtcagcgttcatacatagcattatgctgtttttatctttttcacttttttccctttgtcccggcaagaaaatgttctgaataaagggcagacaagacagcaaggaaatttcagaggaagttcagaacggagtgaaaaaaaaaacaaggtactagttctcactgatttcatcatcatcatcttcatcatcaaaactaattaattacattacaacttatagaaccattacacagcaagcacagccatattgtagtagtagcggtttatccaggcttccatcagtcactgtgaagttcagtgttcctcatggcctgaagaaggcagggtgagggtgcccggtgccctggaaggaggtgttcttgaggtgctcaggtgcgttctcgaaggagtgcctcctcgccagcgagaggatcttcttgtcggcggcgacgaagtatgccatcccggccgccgtgcagatgatcagcgcctgacccgtcgggttgatgttggctttcgcccatgacagcatcctcacgctcgccaattgaatttttttacagcagcagatttcatcgcaagatcagtacacaaggaaaaaactctgaaaatctgaatgtttcgttgtcagtttagctcaccgttgggacggcggatgccaccgtcgccaccgccgcagccttggctccggcgagcgtcgcctctgcaacaattcaaccaccaatgtaagaaccaagatacagtgactgaccgtcaggtaaatcacttataagcagcataaatgt

SEQ ID NO: 26550 - DNA, 803 bp, Oryza sativa
cagcccgttttccttaaagttctggtaggagtttatcgctacccggcgataaccacacggttaccaagaaaaacacgaggtttcagaaactaatattgacggagcgtggggctcctcaccgggagaccgcgcaggcccccctttaccggttcggccggggactcagggagagattctaagctctctgtatgtggaaggctcgcgagacaggaaacacacaagacacgggcgatgtatacaggttcgggccgctgagaagcgtaataccctactcctgtgttttgggagatctgtgtatgaaggagctacaaagtatcagccagcctctcccttgttctgggtttctaatctggaaaagtccagtcccccctctcagtgggcaaggtcctccttttatatcttaaggggataccacatgcaccatttctctctttttttgtggggacttacccccccccctttttcataaatggacggagatttgtatagttgccgtccgagtcaccttctgatgagacggcccacaactaccttcactttcgccgggagcaggtgcgacgtggaatcgtggctgtctactaacgacatgaccggtatcagaccagtcacgtcggtcattcttgccaccacgtgtcagcttagcaatctacatgctcgcccttcttcacacaacatcttgcctgtaatggttaggatgaagcctggcatatatctgaccaggactaacgtgccatctctaggaggtaacacgctagctccagctggggacgagcgcctagaagccctcgtcctgacgggatggg

SEQ ID NO: 26551 - DNA, 3641 bp, Oryza sativa
gacacgcacggttgccatcaccgttcgacctgctgattcattcctgcgactgcgagtgctgtttccttgtcgtttaaatgggcaattcggttgcggattaggattctccgggggtagatgtgtggtgccatctgcatttatgacggaatatcgtccaggcaactagtaatgatttcttcttttaagatgctctttgccatgctactactagtagttgcttttgctgatgattggtttcttggccaatggtttggttgttgttttttttaaaaaaaactttcagggggctctgatttcttgtttcagttaaccgcccatacgaaggagtctactggcaaaattttgctctctattttttttttctgcggaatgatttcattttgatgtatgatagcacttcatagtatgataagtctggattttgattcactgcataatcttctgaatcataaagttggtgttttcctcggtgtcgatagtgctcgatcttaattgggcatgctttggttttaattagttgatcgcctagcaaaagttgctacaaattataatgattaatcatttggactttattatttttccaggtaccacaattctagcagagattataaatattcagaaatgggtgccaaagataatggggaagtaagagacgagaagggggttggatcagattatgaaccggccagagtttcaggagtttccaagaaactcatgagaaaggatacaagagaaaatagccctcgcatggcaaaaagcagtggcagccgtcaagttcagaacaagctgcaacataaagcttcaaacaacattcagagtagatctccaaaacccaggaaagttgttaacgctgcgaaatctgctgaagttagaaggtcagatactgtaagagttccttctcgtgctccatcagagctttctgaggaaacagacgatatagttagcgaggctggaaccgttgatgatagtaaaggcaatgaagaggccaaggagattgatgtgctagatgaagctccacattgtgatcagagcactggtactgacgatgaaattcctgaaattgaagaaaagatagttgatgatgagaaaccagttgtgtatcaaaggaatgaggagttacaatcaaagattgacaagttggaacaagaacttcgtgaagttgctgcgctcgaagtttccctctactctgtattgcctgagcacggaagttcggcacataagctgcataccccagctgggtgtctttttaggatgtacattcatgcatcaaagttttggtcctcagataagatagcttcggtggcaaaaagcactgtgtgtggcatagtgcttgttgcgaaatcatgcagtaacgatgcatcaaggtaaaatatggccacgatatgcctctatttcaccttgaatataggtcataaccatcaatttccttgaattaaactctgctctcttgtagattgacattctggctgtccaaaacagttgtgctaagggagataattgcacaaactattggtatctcatgccaatcgtcttcaaccattacagccatcaacatgaatggtagtgcaaaaagtcttgatgggagaccgatgccaatgctatggacaaatagctccagtgggcaaacaaaccaaatttactggcatgcaggtaccggatgattggcatgaaacaagtacacttttgggtgcattggagaagattgaatcatggatattttctcggatagtagaaacagtgtggtggcaggtaaaagttagactatattcttgctgacacatgcatgaaactgagcatcccttgctccaaactggatgttctagttgagtgtttcacaaagaaatagctcgcaatgatattgttctgtgattatatctgatttctccatgttgtcaattttctgaagaacgtttgttgttcaggcactaactcctcacatgcaaactccggtggaaggatcgtcaaccccaaagactgggagagtgttaggtccttctttgggtgatcagcagcaaggcaccttttctgttaacctgtggaaggctgcatttcacgatgcattcaacagaatatgccccctccgtgctggtggacatgaatgtggctgtttaccagtattggcaaaattggtattctttgacatccttagcttgacaaaaagaaaagaaaaacatttcttactgaaaatattaatataaatgttatattcatgtgttttgtgaattatcaggtgatggagcaatgtgtaggccgtttagatgttgcaatgtttaatgcaatccttcgtgaatcggctagtgagatacccactgatcctatatctgacccaattgttgacccaaaagtcctgccgattccagctggtgatctaagctttgggtcaggcgctcagctgaagaattctgtatgtacttgattcagtaccttttaagtgctttctcagttttcctttatttactcacaatgatttatgcatgggaagctaaacttccgtgcataaactctagaatgcaaacgtgttgttttcttaccattgcacttaaaatagcaaatttatatgaaataaaatgcatatgcagatcggaaattggtcgagatggttaacagataactttggaatcgacgctgatgactcaaaggaggatggtaccgacacaggaagtgaaagaagtgcagctgaatcaaagtcttttcaactgcttaatgaattgagtgatctccttatgctcccaaaggacatgcttatagaaaaatctatcatgaaagaggttagtgctcatgcatatttcctgatgaataattgtactgttatctatctacctatctagcaatcagttgagctgtgtttaatactataacctctttgtcagatctgcccttcgattggcctcccgttagtaacaagaatcctatgcaacttcactcctgatgagttctgtcctgatcctgttcctagcatagtcctagaggagctgaattctgaggtgttgtttctgtcttgaggaaactttgtagtctagccttacaaaacttgttcccacaacgaagatgcatacagtgcaactttgtagttaacatgatacttgatgttatgcagagtttgctggagcgatgcaccgacaaaagtgcaaccagcgcatttccatgtatcgctgctcctgttgtgtaccgccctccatccctactggatgtggcagagaaagtggcggacactggtggcaatgcaaagctagacaggagagcgtcaatggtccagaggagaggatacaccagtgatgatgatctggatgacctggattctcccctcgcatcccttatcgacaaaagcgctccgcctttgctgtctaaaggtagcgcgcattttactgctcaaagaggagtttccatggagaatgccagatacacattcctgagagaggtatggttggagaggcagtgattggtgaacctgtacaaatccagaatctcttctttagctaccttaaaaagggttgggaaggaaaacctgctgaggtgaaacctttgagagaagttgctcacttgcagagctagttaactaaacaagaatggctactgtcaaaatgcaaacaatttcgtgtacattcatatacatatgttgttcgtttgtagtataatagaag

SEQ ID NO: 26552 - DNA, 8125 bp, Oryza sativa
  unsure (1)..(8125): unsure at all n locations
attttaaagtgcctatatataacatagtctcaaattataggcactcttatgtttaaaaaaatcaaactcggtaacttttcactaataactatacgaataatatctacaccagtattatatacgttaagtcattacattcatattttaaaatacttttatgtaatgctaattttatagttgttgattatataatacaaaataaattaatgattaaattatgttattgaaaaccgtgtaaaaatacaggtcttataatttaggacagatggagtaattcataacacatacaaatgtaatttttaattactaaatagatatatgtctttaaaatatgctaaactagcgctctcacggggcagggtgcatctttagatatttcaaaaacgcaacaccaaaatggatacatactggaatatacatttcttttctagaaaaaagaagaacatgcattttcaaaaataaaaatcctcagttccattggctcaaatacaaaacgtgcaaattcataaaaaagaattacttattaacccggtaaaccctagctagcagcgtttgttactatgctttccgcacaatatagaagttaaacctcaatgtagagttttgtgaagtgtgtggaactgaattataaatgtaaaggtcatatctattacaagggaccataaataaaaatagtatgtttctgctacaaaccaatagatcgatcgatgcttttttttatcagtatttaaacctaaaatttaaatcccattaaataatactagtatgtgtccaaattcatatggatattaatgaacctaaacgataaatttatacgataaatttatacggatgccagtaaacctaaaggggagaagccaaaacgttgttttatgacgtgaaacaatgggggagaagccgtggaacggagagagagtaccatccaaattttgctggtggtatggacgggattctcttatctcaaaggtttactgtatagttgacacctcaaagcagagttatccatcaaagtaacataaacccatgatttataaaagtcatggcaaaacatcataccatcaaatttatcccatgggcctcatgtatgaatatgacgagcaaccacaggcgatttcccaaactggagcattgagtaccagagcttataccagaggcaataatgaacactacatgaacaaaaaggtaaatccatggaatatatacgaagatagacagcttgcgatgtgctatagtccaaaacttctgatttgccaaaataaagtttgatgttgcaatgcaaactaaactcattctaaagatgcagagaaggtaaagcttaatccgtttcgtcaacaaccttggttcccagccccttcaaaccctcaggagggacctcggccacagtgaccagagagtagagctcttccttggcatcctcctcgtcattcctcttgcgggcgatcctcacacgaaccctccgcggcacactcctgatcccactgctccagatgtgcttgttgagcttcacatcgaccctgacatctgtagtgcccatagccttctgcgcaaacttcctgatctctttgatggcattgggcgccttcttcttgaatgtactattcaacataagagaaaaccattagagttatccatcagaacaggttgtgatattcatgtttatgaacagtataatgtagtgatggcataatgttgtgttggatgagaaatcacagcacttgatttctagaggttcagttaaataactacataaaacaaggttaaggcagtaaaaataggtcaccatgccaagaaaataaatatgcaggacacgaagttaagatcatttcgtgttcagataaatacattgagtgctgattaaattcaaaagcgagcactacgaaatacacaaaattcagtatgaaaatttggtaaaaggaccaaagaagcatttccttggtcttcattatcaattattaagtttgtgccacatttcaaatattagggtaaacccagtcagtgcatccactagaattcaattaacaagtttacagggtactcaatagttgcatccaaaatgcaaatgcgactcgcattgtgcccatcaattagctatatacatcttcccaaggaaggccaaacgagttaacgactcattgaacagtccttaagcatagcttgataactagataacttgttgggatgttgttggtgagcaatgacaactagttgcaattccgacgagcactgggcgtggtagtacacaaatagaagccaatcttatcttaggaagaaaacacacgagaacaacaatgagcacatttaccaccgtaaattcaaatctaaaactactgttcagggcatgcaattcagatgtaataaaggaaaaaacaaaaaaaaaacaattgagtgatccatccatcgtatcagatctcacagttgacgtagcggggaacagaagaggggaggaaacggaaggacgtaccagctgtggaggcgcttgtggaggttgatggtgtactccctcgtcaccacctcctccttcctcgccgctcctcccttcttctccaccatcttcttctccttcttcccttcgccctaggctgggtttgccgctgttccggcggcgcgagaggaaaccctatctccgacgcggtggtgcctttcatacctgcacctcgctgagtaccctgtgggccgttggaaattccactcatgggctgggcagggccacgctttcgagccgagcagaggcggatgggccgcgtttcgcgtgtgttcatgggtcccgtctgaccgatatgagaccaaaggcaaaaggaaaaaaaaaagttaatgggatccatgccactgcaacttttgcgaaataaaaaaaataccactactatttgtcatatcggctacatgccactggaaatttctaaaattgaaaccatgcactcccatccctttttccatctccgttcccgtcctcatcccctccctccttcctcatctccgttcccgacttcatcaccctctccggcgagcggtagagcttgaggagggattgcgccttccctttccctctccgtcgtcaacacgatctcctccttcccgccactacatattcctcttgccggtgaacttccaccgcacgcgcacaagcacagtcatcgtagactgcggcgatctccatggctccatccggcggggtgatgatggggtgcgcgagcacgttacacttgaacgcctgcgcgtgggcaacgcacacggctgcgaggcacgcgaagcctgcggatgggtaagagggcggggaagacgacatgcaagggcggcgaggagggagaagatgaacggggtgggcggcgaggcctccggatgtgggagtagagggcgagggaggcggccgcgggggcgcagcggcgggctagcgtggcgtggagcgagtagccccggaagggcgctgacgagaagacggcggcagaggaggaagttggggtccggagctaggggaggaggcagcggaggcggcgtaggagctcgggagccgccgccgccgtcgttgtcctcgatccaatctgtggccgtcgctgccgtcctcgatgccatctggagctcgggagccgtcaccgctgtcctcgatccgcaacgggaggtctcgacagatgccgccgccgctgtcctcgacaccatctgtggcgggagtgcacaggagccgctgccaccgtcgtcgccattgtcctctttgccatcgcaaggatggaggaaaagatggggaagaaagaggagggagatggaaacggttaaaccggggggaacgaaacggcgtgagagaggagacggaaaaagtgacggaagtgatatggttttaattttagaaaattctagtggcatgtagccgatatgacgaatagtagtggcatttttttaatttcgcaaagttgaagtggcatggatccaattaaccaaaaaaaaacctacataggggatccgcatcttgtcaccgaatgccaagatcgtccttgaaatgtaaaaccggatacaacgtatcctctaacttacaaaaccagtacgaacgagatctctcgacaacggttttggttgacgtggcttctacgcctcctccaccgccgtgaggagcccatctgccgtcgttacacctcctccgccactctgcctccgccaccgcattgaggagctcatccgccgccgctatgcctccttcatcagcgatgccgctctgtctcctccaccgtcgtgaagatcccgtccgccgctgctatgctggcatcgccattccgtcgtccgccgccgctacgcctcatccatcgtcgcgacgagcccgtccgtcgcctctacgcgcctccttctctatcggcgtcgttgcttcgcctcctccaccgccgtgaggagcccatccgccgtcgctacacctcctccgccgctccacctctgccaccgcagcgaggagcttgtccgctgctactacgcctcctttgtcggcgatgccgctccatctcctccaccgtcttgaagatcccgtccgccgctactatgctggcgccgccgttccgtcgtccgccgccgctacgcctcctccgtcaacgtttctgctccgcctcctccaccgacgtgaggagcttgtccgccgctgctacgcctcctctgccggtgtcgttgctagcttcgcgtgctccaccgccacgaggagcccgtccgccgctgcttcgcctcttccacaaccaccgctcctttccccgatcgcataggttcttgccatcattgcatgccggaccagagaggagaggctgactagtgagtcccacaccagtttctacccagcgttcctatgttgccatgccatgtaggcaaaagtgacaaatagttaagaagatatctcttaagaggaaaaaaataagtgcaaacctatgaggagcatttggataattgtcgaatctaaaagtgacaaatcgtttcccggggtgggtgggggagagagactcccaccgtcttgtcattcttctctactcttttcatcctataatataagggattttggttggatgagatatatagctaaaattttaagttttataatattactatatatttcatcaaaccaaaatttcttatattatattataggatgaaaggagtagttctctgcatacattctgagttgtcccctgatcccgaatcatcatgaccacggggaagcaaggatggagcctcctgtggaactggaagcccaatcctccggcctatcctacattcctcagcatgaccacctgccggcaatgttagaaattaatctcgttcttttctccaataagagttggataaagattaagattttcatggcacgcttttccaattgctaaacggtatgtttcgtgcaaaaacttttatatgaaagttgctctaaaatatcatatgtatctacttttcaaatntgtaataattaaagctcaatcaatcatgcgttaataccaccccgttttacgtaaaaaacttaatcttcatcttcaagaaaaaagaataccatggcccttgttgggattctccaggctattaaatacccatctggaatattgctatttagaagtaataaacgtagattactgacaaaacccattccataacctctaggctattttgcgagacgaatctaacgaggtatattaatccatgatttgctacagtaatgttacagtaatcatccgctaatcatttaaaatgttacagatagacaaatacacaagggctttgttgctatatctctgtaactagctggtgttaatgagaagaaaacagagaaaagggcgcacgttgtttcagtgccacaaagctcttgtgtatttgtctgtgttcgtgtttcttcctcgctgcctcatctagaaagtgtagcctgtattcccgtgagttgctttgatccctacaggcaagatatcgagctgttgcgcgcatcgatgagaagcggcgtggggatggtgagtggcgacgggagcgggagcgagagcgaggcagccgccagatcgggcgaccatcgctggatccatcggctgccattaacccaccacgctaggcttcacccagtggcgctgctccttgggcgagagggctccgtccgtgttcttgctttccttgcggagaccaaggccgcacggacgcatgagttgagctcacctgacctgagcggctctgcttgaagctgatgctgggatccaatttccccctgcattgattttacccattcagcgggtgtttaaattcaggggtgtaaagttttggcgcgttatatcggatatacggacacacatttaaagtattgaacatagtctaataacaaaataaattacataatccgcctgtaaaccgcgagatgaatttattaatcataattaattcatcattagcaaatggttactgtagcaccatattgttaaatcatggagcaattagatttaaaagattcgtctcgcaaattagttgcaatatgtgcaattagttactttttagcctatatttaatacttcatgtaggtgttaaaatgtttgaagtgacaggtaaaaaaattttgaggtgggatttaaacataccctcatagtgtggagagctagctatgtacagaatattcagttagattaggtctcaaatacaaataataaattcaaaactaaaattactacgaacttagtgtgttttgtaatagatctgcaaatatttctcgagattttacctgacaccctttattttcataatttttattttactagaaaaaaatacccgtgcgttgcaacgggtaaatactatcttaaatcttattattgttatacggtttagctaaattaaaattcactgtaggaatttgcttggatattatttttacaagatcatgaactataattaggagttcaatcgttaaaaattagcatgtaaggttttgaaagagatttcttatatgactccttctatatttctaaaagcaaacgaatttaaaaacctacttaaatataaatctgtaatttcaaaaggcaatgaacttaggaagaaaaaacacgagaacaacaatgagcacatttaccaccgtaaattcaaatctaaaactactgttcagggcatgcaattcagatgtaataaagaaaaaacaaaaaaaacaattgagtgatccatccatcgtatcagatctcacagttgacgtagctgggagcagaagaggggatgaaacggaaggacgcacgtgtaccagccgtggaggcgcttgtggaggttgatggtgtactccctcgtcaccactagggctgggcaaaaagctcgaagctcgttagggctgggcaaaaagctcgaagctcgtggctcggatcggctcgtttcaggctcggctcggatcgactcgagtttggagtcttaacgagccgagccgagccagctgttttgctcgttaagcaaacaagccgagctcgagccagctcgcgagttactcggtaggctcgttaaactcgcatagctcaaaaatcagacatgcagcccaacccaataaggaagcccaagttcctagcccaacagcccaagtacccagtaaaaaggaaaaaccgtagctttgaccatcctcagtcagccgagggcccgaggcgcctctctcgcgcatgccgttgcaggctgctgccgtggccttctcttgcgccactgtagcgctgcctcgtgccctcgcccttctccttgcaccgccggcccgccacaggccgcaacattgccgttgccctgcccaccggctcctcctcccgcaggctgcagccgcaagggccgcaaggccacggcgacgactccggtcgctcctcccgcagccacagcgccacgccgacgatgccgatgaacgccgtcctcccaccgcagccgccaggccacgccgaccacgccccttctcccgcagccgccgcagggccttcatggatagggagcgccgattggcaagcatggagtccaagaaccacagcaaggggaagaaatcatcagaagcttgtccaggcagcagccacctcgcctctgttcagaagccaccaagacaaagacctaaatcaaatccaccaacctcacatccagtgctgcatcaatttttttcacaatctgtagcaattttgtttcctcattttatcactgattgaaccat

SEQ ID NO: 26553 - DNA, 1883 bp, Oryza sativa
attatgtggtagcaatagcatacaatctgactatttaattgaactatttaattgaacttgcagggatcagactcgaaaaatgaagaattttataagccgtctgtttcgtctgatagcacaccctcacatttgtcagttcattcctcaagtcaagataaggaagtggatggggaatctacagatgagggcaactctggatctccaggatcaaagaggaaagggaaacgaaagaagggtatttttgtatcccctacaaagagtgtggcaagggttaagcgttcagattgttggaagcttttcaaggttgtggatgttccatcaaaaacggagaaaggggtcactgagacgaaggccaaatgaaggttttgctataggctcattgcctataagaaaggtggtgctacttcaactctcaatcgccatataaagaagtgcacggcatatttgaacaaattaggcaggcagaaggctcaagctttgcttggctttaatcccgacatggcaggtgcctctctcattgctactctttttgattatgatcatgaggccactcgtaaaatcattgctaagatgataattgtccatgaatatccatttaggatggtagagcacctctggtttaatattttgatgaaatacatgaatgcagcataccaatttattggtaggaaaactattagaaaagagtgtgtggatgtttacaatacagaaaaagaggttcttaggaaagcttttaaaagtgttgatcatgtaaacttgacaactgatttatggacttcaaaccaaaatatttgctatatggcattggtagcttattacatagatgcaaattggaaaatgcagtgtcgtggactgaactttattgaattggatccaccacacactggagttgagatagctcaggccatctttgagggcaataatgaatgggatatagagattaggttatctcaattacccttgacaatgcttctaataatgatagggctgtggccaattaaaggaccagttcattggtaggggttcataagagttcatgcctcagtatttttatgtccgttgctgctcgcaaatagtgaatttgatagtgaatgatggcttggcaccattgggacctttgctagtaaccttcgagagacttgcaagtactttaagaagtctctttctcgtatgcatagatttagagaggtatgtaacaaaatggattgcctatggaaaaggtttgtgttttgatgtgccaacaaggtggagttcaacctataagatgctttgtgcttgtgagtttacaaaggatgcttttgttcaatatgcttatgtggatgctaaataccaatggcaacctttgcttgctgattggttagtcttttccaaaattcatccaatattgaaggcacttgctgaagtaactactgtattttctggatctacataccccacaacaaatgttttttatccaagcattgtgaatgtgaagagggcattgcttgctgcatctaagtctactaatagggacaaggttttgaagaatatggttgaagctatgttggaaaagtttgataaatattggaaagagaagaacaaacttatgatcattgccactacccttgatcctaggtttaagatgaggtatgtgagttggtgttttgttcaaatgtatggtgaggaagctggtcaagttgaggaaataagttgattaactctttgccacggctgaaacgacgcatcgccttgaaaaggctgcaagaaacaggggaagggatgaaacatccacttcaaccattgacacaagtaactcattagcttcagttaaatcttcaagtgagttctagatatttttgcaatctagctctgcaaatgtatctaagtcagaatggctaatctat

SEQ ID NO: 26554 - DNA, 10887 bp, Oryza sativa
ttttccatattgttggccatattcaccaattgttattaaaccaccagcatcttcatcatgcatgtaaaccgttattggcatcctatgaacagaatatgatgttagatctctattactctataagacaacagctgaaagcagtgttcatacttctatgctacctgatagctacattttcattccaccaatacaagggtgtacttggttttaaaaatccaactaccctaaatttaatcaattcgattaaaaaaatccaattcatcgtctcatggtgatattgttggaatttaggtctcaaaatgatttgacttgatcaaatcccttttctgttcacacagacatctcacactacagtaaaaacaaaggtttctttttcttttcattatatatatgtatgttgtgttatatggaactctataatacctgaacgatataaaattttagctggcaagcacaaatataacattttggtgtcattaccgacagtgatagctatgaactatgacatctttgaaatcaatgtaactagaacacataatagaccctactacttactcaagaacatgtgaagccatgaataattctggttcaccgccccacacatgtggatgcctaatatgggacacatatgtgtcgaaatctccctcaataaacctgcaaatcggtattacatcaaaacacagtaatcgaaatatattgatgataacaacttacagcagcattaaaaatgatgagaaagggtatcaaatcaactaaccattccgattcttcccgcctcttaacaaattcatcagcaacctagaaataattaaattatatctgagcttagaaaagaaacaacacaaataaccaaaagtatgactatacacaagaaacaagctataccattgccctcaattcgtcagctagctttctctgaagatcttcatttggtatgggtcttcctgccctaatgcatgccccatgaatcacagagcggaataagcatcttccatctccaggaatccctaggggttttgtaaataaatcacatgttatcacatactactattctcaagatccaaattaacccccaacaagcaaaattgctaaacctaaaaaaatgaatacccacctgttactgaataatccgtatagacttctttgccatgagttgaactggtagatgctgctgaattgctgatgcttatctccacaggaacctcagcatttgctattccagaaactgcaaaacctaagcaaagtccactggttgtacctcctattttttgatgcaaacctctccatttccagctcatactagagaaattgtcacgggaaggcatgtcgagcttcatatttaaactaccttctttgcctgacagtccacaacggaactgccgacccactaagctaacaaagtacctcagactaggccggtcagaagattttatattcctatgtagagaacaatcgacaagacccagcttcacattataactggatgtctgcgagcgtgaacacttccgtaatcccaaactctgtgttaatcctccatgaaactgactagattgggaatacatggtacgtttagaaggtcgccgcaaattgactgcagatgagtagagccgcatccggtccaaccaatatcagctgtacacgaatgaccaaattcaatgtcaaaactcatgcaaaatggtgacatttttatttccaacttgcttttgttttgtttttcaaaaaaaaaaatatgacacccgttttattgcattaatatgagaaacacaagattagggtcttccaactaaagtagatcaatcagttcagcaacagcactactccacacgatgttgttcagccaaaaaatccatacaaaagattttgcgatgacaaagcgtacactcgaaaataacgaagtcgggaactgatactacatggcttttgctaacgataaacaacgcgaaactattagtattactaacaaataaacatatccgacctaccaaaagcaacggaatatcaaaatgctgcacaaacaaaacattcaggtacgcagcaccaaattctccgcgcacaatctctcatctcaacgatggtatacacatacaccagcatagaaccacagccactatagacgagggatcagaggcacataccagcgaaccaacctaaccaaatccagcgaagaaaaaagaaagaattcccctcaattcctgctaacaagacaaggagaagcagaggggggatcacgctgacgcccccctgggtcctatgtaagctaagattcccccacctttgcccttcccttgggcggcgaggagaagtgaaggggaggtgaaaggaggagtgtgtgcttcgatttcgcttcgacgcgggaggaggaggaggaggaggatctcgcgaagtgtatttgctgcagcgagggaaggggatgccattggcgatgggggaggaggaggaagctgaaggctcaagtttcccgacggtcgagaggattccggaacgaacacgacagagtacggcgattgtggggctttgttatataccattccatgggcccatcacgcctgaattgggtggtttatgggcctattgtttacagccgttttagtccttaatgggccttgatttttgctagccaggaggacctaatgcgtcactggtaggggagtactccgtaaaaaaaaaaaaaatcaacttcggactgcgagcctatgtttaaatttataactagaaattaatttttatgagatgaaggaattaatattaaagagattgtctcaagcaatcaaacatatacatctctagatctggatttatgataaccttttgatggtacttatctgtccatatagcccatgcgaattttttgataaatatatgtgccccttcggcttggtgccaccgctctgaccgccccgccccgccgctccgtccaccgcactccactctgcccgtcgccgcctcgttcatctgcccgccctgcgctcctgctgctggccgccgccgccgtagcgccggcggctagacctccctggtgcctgaagagaggagaggagagagagatgaagtgaggggaggtggggaaagaggaggaaggaggagactaagaatgacatgtaggcccacgtgggccccaccatctttattttttagctgacatttaggcccacgtggccccaccatttctttattaatttatatgtgaaactgacatgtgggtcctacgaagtttattatttttctagatcgaattgccacgtaagtgtcacgtcaatgccatatcagataaagaccaagtcaaattagccacgtaagcgccacgtcagccaaaaccgccgagggacctcatctgcactggttttgacagttgaaggacctgttgtatctggttttctggttgaaggacgaaaatcggattcgttgacaagttaagggacctcagatgaacttattccaaagaaaacaccaactgactatgagcctatgggcctgtttgaggagcttaaaattttaataagcagctggttggtagctagcttttgagaatttcttgcttctcattttctgaattctacaactacagcttcttagaatataaaaaaaacaggactgtttgagaagcttctaattctgagaaaaactgcaacaactataagtttcctaaataggctctatgtctagattcacagccagaagttaatttctacgagaggaaggaaatagtactgaagagactgtctcaagcaatcaaacatatagtactccccctagatccggattcatgataacattttgatggtacttgtctgtccatatagcccactcgaattttttgataaatatctgtggccatgtttggaacgaatgaaaactatattgttcgttcctgcagaaactaaagtaatctagcacgtatccaacctttatttgaaaatcttgtatgggaatttattgatagcaccgtaaaaatcatgaaaaacgaagtaactatgtgattttccttcttaatctgatagtcgagctatggccgataggatatactagaaaagaagcagccaaagataaattacgagtaaaacttttaggctgcgttcggaaggggttcctggcacgtaaaacgaagcacatattcttacataaataattaagtattattatttttgcaaaatggattaatataattttttcaaaacaactgtcgtgtgtgtgggtatatatatatagttgcataaaaacacgccgtttagtagtttaaaaaacgtacgcgtggaaaacaagagaggtgagttgaaaaaagtggcataagaacacatccttaatctatattattattggattaagaatcaatgaacaataaaaatctaaaaccaacttcaaaatttagtttcaaaaccaagatttttagtcgtggttaataaacaacataccgacagagttatagacgccgagagatgtctagctgaagcatccaggcttggtatttgcttcgttgcttgtggcaacacatggatcatggatgcacctgagtccacaaaccgaaaaggaacttcgcaaagctccaagaggaaccatgttccatgaaatggcctactggccctatgcctcatgtggccacatgattaaagaaaatgtatttgtaaagccagttaccttctcctttgctatctgctttagcaaaggacactgtcacaaaaccatctctaacttggtagaaaaaaaattctaaggcttacgcctatgaatcccttttcgatgggattgaaggagattgaagtaataaaagttcatataactgttaaccctttttccgttgggattgaaggagatatgaagaaaaataattccatatctattgagacgtggaactaatcggtttagattctttagtattaaccgaacgagctctaacaagacattacaaaaatgctaaaattcgtgcgctgatcaggctgaaataacagtagacgagtcaaatgcatgcatgtcagcatgtgatctgatacatgaaccctatactgaactaaaactacttgtagagctatagggcattgatacggatgaatgcacatcacgagtcaggacagggacgtgcctatggttcacatcgtttggcttatttcctaataagtcaaaacagcttattagaaaataaaaatgaatttgtagatgaaacttttataaatatgttttttgatgacttaaaagccaatgttgtaaaagaaactacgttaaaaatatctcaaaatcaattttaaaattaagtttgaaaatttaaaatttggctttttctttggctgattaggccatccgatgggagcatatgatcagtggcattcagcactctgtctgcgtggatttggttattagattatccccaatcgatcaatgtaatgctccatcagtttaggctaattattaggtgccgacccttaactccgggcccgcgcaacgcgcagatcacaagagccatgagtgccaggtgggcccaccggtccagacagctgtgctgtggtgctgcagcccggttccccatcacccacccctgtctacgatctgacctggtccaccgccgcattcacgtcgttggctcgttgcatgtggcgtggtcaatcactggtcaattattatcaccattttatctactagtcccggtcaattatgagtactcccaccatactataatacaaggatattttattaaaaaaaccttttagaattattatttattttatttgtgacttactttattatctgaagtattttaaacataaattttcgttttttatatttgcacaaatattttaaataggacgagtggtcaaacagtataagaaaaagttaaaatcctttatattgaagagagtatttgggcagtcaatctccttctcactcctcgagaggaaaaaacaaattgtgctgaaataacatgtgcagagatgagaaacaacaacttgtagatgaatatttttctcacaccagtcaaatacggatgaagatcctctaacttaagttaaaagaacggatgtctctctgatatatgagtcataccttctagactggtagggattcatgtttctttaactttaaattagtggagcttcttccgttagatattgtgtttggttctttaggctcctattggatagcctaatcaatcaaagaaaaaactaaatttttaatttttaaatttagttttaagattgatttcgagatattttcaacgtagtttctttttcagcattgacttttaaatcactaagaacgcacatataaagttttacctacaaatttatctttatgggcctttagactgtactccttacaacgtgctccatgatatatgtatgcttgcgaattaaccatccaaacagcaacaagttcttgcatatgcgacagtatgcttgtttaatcatgggagtaattaattaatcaaagtttcgtcgtcgtcatgccgttgcttgcaccccgtacgtacgtgcaggatacacagtgatcgatctgcatcgatctagtcgatcgatcgccgagccggcagatcgatcgaccagccatgtgtccgagaacgaaccagcggccgcgcccacgttggattgctgcaaaccaatggatcgatccatccatgcgccaagtgatcgatcgatccatccatgaatcctcacctcaccggtcgacgctgcggcgcagtacggcacgtccatgcgcttacacagcggcgagaatatggctgcacgtgcccatgcgcccggctcgtccctgtctgcaatctctctagcttaattaagctatcgtcaatcacaatgaaatttaatttgtttgctaactggtttattgattactagtagataatgatgtgtcggatatggccgtagaggaaattctacagcgtccacttcgacttatccgttgtaaaaaggtttaaagagtttttcatttaatagtagtagagttgagaggggaggatccatttcgagtttagggctttaggctatattattttcttcaactctaaacttcaattttcttgttttccgttagtacctttttcaaaatgttaataatatattttttaaaaaaatttaaataaatctatttttaaatttataatagttaatatttagtttaatcgtgtattaacgagattttttgtgtcgcgtacgtgaaatgtttctctccaatttgaacaaacgaacgaggaaacaagattgttagctgcacgcttcttaaaaatacattcttcccaaaagaattcctatggcgactaattgtttcaaattatttgttaaattcatttccaaacatttaaattattcatcatataatgagtacatagtctgcgataataatctgatggataatatgtttcaaacagaactgactaatagtgcatatactgtatacttgaagaagcagattttttatgtcagcctattttaagccaccaagtatttctatttctttacaaattcgtcctatcaaatccctctcaaggcttttgtgctaaattactgtgtttcaacaagcagtagcttaagatcggcgagaagcttctctggtcccggccggccttcccctagatcttcagattggaacgctttaagatagaacaagaaagatgctgctgctgatgtataacttagatccatacacacgtggacgacgggtgatcgtgcaatcggagaatccaacggctcgcatggcaccgtgcattgaatggggttcggtccgaagcagatcgcgcccatcatttgcactgccaacaacaccagtgacgaaaccctgtctggcgcacgcaatatggtgcgcgacgagattaaaggcgccacaccggcacggcacgtgccctgcagacgctcgtgcccccacctcatcaaatgactcttctacccctccattgcccggtctagctctagccaatcaccccatcgtctgatttaactaaggtcctatttagttcctacaaaatggtaaaagtttaactattttagtgtaggttttgtcaaaatggatctaagtagtaaaagttaacaatttgttatttgtcatttagaagtttagagtagcaaattttgctaaaaagtacggtgagaaccatattgtctctctctctactagtaaaataacaaaactttaccatgtatctaaacaccaattaataaaacttcaatgccaaaccttttatcactaaattttttttaaaaaaattgccacagtaaatttatctaaatatgccctaaaagcctacttattatgctgttgttagcccaagggtaagatgggtattttggccactgtgaatgaatgctccatcagctatagattctctggttttgattgcttcgtaggctaaagctaaaaaaactgaagaatgcttaacgaacgcgcttggtggagggtaatacggtcatttcaacactctgccaccctctactaataaagcttagctctgcgagctcaccactctcactctgcagtgcagtgcccacgcgagccgagacgagacgatggcatcatctcccgctccaagccccgccgcgccgccgctcctcctcgccgcgctcgcggcgctcgccgtggtcgcgtccgcctccgccgccgcgtgctccgcgggcgaccgggacgcgctgctggcgatccgggcggtgctgtccaggcccacctcggggtgttctcgtcgtggacgggcaccgactgctgcaccagctggtacggcgtgagctgcgatcccaccaccggccgcgtcgccgacctcaccctccgcggcgaggccgacgaccccgtcatggcgcccgccggccgcccggcctccggcgtcatgtccggctacatctccgacgcggtgtgccgcctcggccgcctctcctccctcatcctcgccgactggaagcagatctccgggcccatcccgccgtgcgtcgccaccgccctcccttacctccgcatcctcgagctccccggcaaccgcctcaccggcgagatcccgcgctccatcggcagcctctcccgcctcaccgtgctcaacctcgccgacaacctcatcgccggcgaaatcccaagctccatcacctcgctcgcgtcgctgaagcacctcgacctcaccaacaaccagctcaccggcgggatcccggacgacgtgggcgacctcaccatgctcagccgcgcgctgctcggccggaacaagctcaccggcgccatcccaacgtcggtcggctccctgacccggctcgccgacctcgacctcgccgagaacggcctcaccggcgggatcccggacagcctgggcggcgcccacgtgctcacctccctgtacctcggcggcaaccgggtctccggccggatcccggcgagcctgctgcagaacaaggggctgggcatcctgaacctgagccggaacgccgtcgagggcgccatccccgacgtgttcaccgccgagtcctacttcatggtgctcgacctgtcccggaacaggctcaccggcgccgtgccgaggtcgctgtcggcggcagcgtacgtcggccacctcgacctcagccacaaccggctgtgcggctccatccccgccggcccgccgttcgaccacctcgacgccgcctccttcgccagcaacagctgcctctgcggcggcccgctcggcaagtgcacgtgacgtgccccaaccagagccgtccgatcgatcgggagagcctgatcgaacgtgtggtgtgcgatgtaccgtgtacgatgcaacgaacttacgtgttcgtatatatggttaattagttgctgcttaagtattaactcacttgggctatagttttgggcttgggtacatatagaacaagatgagaatttgtgcctagtgtgtgtgtgtgtgagagaaagaggaagtggttaaggaaaagaagaatgttttctctttcctgcctttctcttctttatacttttaaccttttttgctagtgatttacttgatagttctactttaaagtttgtattgtacaagtgacaaaagcataagaaatgctaaagatcttgtatgagaggttgtggtttcatatttgtgcgcttgggtacttggcccaatttgaaaggtcataatagataaatggatgataaatcgtatgatttggtgataatgtttgataatacaaacgaatgatgaattaattagtatattgcaaagttaaaaagttgtcacagaaaaagtattctatgcaacttatatataaaaagatttaattggcggcttgccaatttgttaaaaaaaatatatggttttaaaaaattacaacgatttggagtttagaaagcatgccatgataatctaaaatacggagaggaaaaacccggtcttagccttaagggatttaaagttgtgattgattttgggggtatttttctaaaaaggggttgctatcaatttacttagcccacctttaattcaaaggaaatgaatcttctatggaatgcttcatttcatataagttttgaaggaaatttaacgtgaaatagaaccttatgaaaagttttctatgagtctatcttatgatccaatcaaatggttatttatgtgtttttctatattttgtaatctctattttaatttacactacatttctgttataattttgtgtttttcctattccctttaatttaaaggggccttagttatattgggtggcttgattagttggtacatagagatgcttcatatcaaacgacatgaacatcagaacatatgaacaagatacttgttctgcataataatcgcatggtgtttttgtcccctctgccattacgttcaccggttatgtagccccgtttcctggccactctccgcgttcaatccatctgtccccgttgtctcgttcttaatcaaagctctataataaattagcccagccgctatcaactcgattgaaaatgttt

SEQ ID NO: 26555 - DNA, 7514 bp, Oryza sativa
tctcgaactacaatcgatatactctgataccagctctgtcgaccacccgattttggaaatcggaaatctcttgtgtttatcagtaccaatccctggatcagtagttggtacacacatacatagccgaatcacaacatatcacgaatgaattcaggctaaaagagttaaatgcttacattagggccaggcaggccaacaactatcagagaaacaacagcggaagacaaaataatacaagggcccggttgacatgccacaagtagtcgactggggaacgagacctagagtggaactgcactccgatcatcttgttaggtacgcaagtgcactaacaagggcttctcttcaacactctgctagaagatatatatagagcaacaatgagtacaaaagtactcagcaagccaccacacaaattgcagcaatgtacatgataatacaaggagtggctatggttactttgcgtaaagctgagtttttaaatatcatttcacaaacctaagacctagcataaactgatcaagttttaatttcattgttcattaaacagcaacgtttctatccaccatccattgtgttcccaagaatagcttcccgccactgccgtcatggttttctgtggtctaccccttctcgcctcccgagaagttgatccaccagtacaaaatcatcaagcaatatcccatcccaatcagattaagaaattcgagtctagccaagtgtaatacatgtcccggtgctcattaaccgcgagcacgactattcaaaaagatttggtttactcacaatacagtggatgtacactttacccgtactccgcgattgcccaacacatgagcctcatcccaacacatgagacgcgtcacggcaaagcctttcaataacctcacattggcagtacccgctccatgaacttacatcctcatgcactctaggcgtcataagtttctagcaatgagaggagttctggcgctcccgggaagggaagactcacacatgcattaagttatagttaagtttaggtttacacatggcagtcctaccgatggcaacaccgctgtaggcacccactcctcgcggtcctaccaatggctgccccaccgtaggcccctgcctcacacacattaagaaaaccactatgcagggatactgcctccgctcagctatttactccgctaggtctatacacattcgagaagtacggttgtacgggggtcgtttcatgcttaacttcatggctcggtccttaattgaccaggggcgcactagcctttaccagactccacccaagtcatccagccgccccagttgaaaacatttgtttagttttaatttttctttcacaaatcatctcatcaatatcttggcaatgtggcgctcatgtctccacatgccgtatctcaactaccttccctaaggtagttgcccaagcataaagcatttgataaacatgagaatgcatgaatctaaattagcattactaagcatttgccataagtgactagggactcatacgtaattatgggtacaagggaataatgagataggcaataatcaaaggcatggcataataacaagtaggatattcatcactgcatgtaattttatttgtaaacaaaacaattttacaattgggatcaacatgctcaagggatggggtgatgacttgcctgctcaggatagttcttattcttgatataatcttgatcaaccttcacctcctggaagttgcatacgttgcctcacgactaaccgatatacaatttctataatacgcgagaagaaccaatattcaacaacaaacaaatatgcacaaacaaaatataattgttggggttgaacctagggttgttcatactactcgtgtttgctaacggatagtttcttaatcattcttattgtcatggcggcttatttaggagctataatcatcataatataaatgggatacacatttcgttaattcggagttgatctatctattgagttatggaaggggtatgaccacatatgcttctaattagtttacatgggttttacagtgataaagcatgttaaagagaattatcctcacacctactctactgtacaatatcaattttatttattagcacactatttaggttaaccattatctaatcatttgatattaattatttaataattatgaatatattttattgaatagtgaattatataccattggaaaccttatgaatttagatgaatttaggttcaagtttcactcaaatccgaggtaaaatgagcaagttatgctagtttaaatattcaagtttgaattaattcgagaaattgtgaaagggtactgttcgtaactgatttatttttaatccagcattatccacaagctactgtgactgacaggtgagaccagacaaggttgactagggtcaaaccggctgtttttattcactggtgggccccatacgtcatagagaggaaacttaattttaattttagttagatttctaatcatccggacccatgcgtcataggctgggctaatcatcattaggtagaggattagtgtgcgctaataacatgtgggtcccacatggtttctctctctccccatcttcttcttttgtctcacccgttaccgagcgaggcagaggcgcggctcggcgcagctggtgtggtcggcccgagccgggacggcggcgggctgctcggcaactgccgggcagagacgcggaggatctccggcgatctcccgccggcggccaaggcgcgtggcgaagcggaggcgagcggcgcggcatagccgccatggttgagctcgggaggtttggggcttgagcgataggtgaggcctccgaccaaattgatgagtgcagaagcacctagagcgaccgagtgttcgatttcgctaataatgtggctaggtggagttgtgggatggcatgtccacggtgagctcgctggcggcgaaacagcggccgggacagcacgccgaagggctctaatagccaaaattggtgggggatttagcttctacgtgactaggaggagctataggagcgaggttttaccgagagacggcaggatgacgaagttcggcggcgcgcggctcagtgcggacgaaacaggggcggctagcggtcggcgacgcttgcaggtgttcgatgcgtggttcccaacgtccagcggtcctcgactccctcaatggcgacggcggcagcaaagctcttcctccactccctccaacctccagctccggccggggagcctcgcaatggtgatctctagcggtggtgagagagtgatcgcatgatgttcgatgaaatgcattcgagggaaaaaggcagagagggttggggtttgtatgggggcttggcttggagataagccaggatggcgtggaggataagatcggtagctggtacactcgatggctgcctatacggcctaagttagggaggttgacgtgggtaagtttcctcctctctcactgactcggggatttggggatccatggagtaatggtgccactaggattgtaggcgtcgcagctagacggctagaggagaagccgtttatctgatgggcacgacgtgggacgatgtgacacgaggagatgggtgagaggacaatgatgacaaaggggcgacgtggtggccgttatccgtcgatggcgaggcgacgggtgatgggatcgtgacggcgcgacgagacgtgcggcgccgtgtttcccggaaggaaaccggagcgagagagcgtggttaggcgtcgcgtggcgcggcgcggcacagaggggatggcgcaccggcacagacacgatgcggtgcacgggggcgacacgagatgcgaaggtggtgtggtcgatcgcgtgcgcggcgtccgggcacgagcgcggatgcggagggatgcggcgcatggcctagaagcggcgcatgacctgggagcgaatggatgcggcgcgaggagagggaggcgcggcatgcggcacacgggcaggacgccggcgcggacatgggaccggatcgaataggtgatagcccataaacagtgaccgacagaaaaagaaaagaaaaaggaagaaaaggaaaagagaaagagggaggactaaactgcaaatagctgagatttgatttggagttgagatgtagctctatatattttgcatttgagaattcaattatttgatttgaatatttatttggttattcattaattcccaaatgaatttgctttccattagattatccaaaaattatccaatataacttctaggctttgatatttcttaaaaactaattaaatattctattgtgacaatttatagtttggcaagtaatagcaaccataacatccagcatgatgcaaaagttttaaaaagttcaaaattttagtgatttttattgtcgggaattttcaggatgttacacgctcgtggtgtctagttttaggtgatgctttgtatgagagcctgccttgagggattgatttctattcggatatcgatttgctagcctccttgtttcatgttttccattaacccgccttcgcaaaccatttaggtaggttgcaaaaccacattttttgtcaattgccctacatctctagccttcttgatagccgcatgacctatttgcaagctcacactaaaaatagatccatcttacaatctctaattctctaagttccatccccaccactgatattgcaggcaaactatctgctataaaaggcaccccaccaatcgtgtatgacaaacaaagacagcttgctacagataatctcgtgtgacctaatttgcatggagaaggtaagcatgaggctggtcatggtggccttggtgttagtgggcatcgtgctggcggcgagccaggaggtcgtcgatgcatccacgtgcgtggcaacagattcccctgaacttgctgaagaaaggaaaaaacttgagaagctcacggcaatcttctctcggcctcgcggtgtttgccacgcaagcgagggttgccgcgatgaaccactactaattgatgactgatgccaccaaatgtaccagtccacacaaaatcggtgtgtgtgaggcatttcccatcttccccgacctgtgcaggaggccaaaattaggaaccggcaaatatatcccttgcaccgatttattttgctgagaaccgacgcttacagatgtttgtctatgtgtcagttctcaacagaaaccagcatatatgtactttcatatgtaccggtccttgaaaaatggcactaatgatgccactactcaattgtgctcttttgtacgtaacatttttttttatctcaagtcgtatgttgacaaactttgtgtttgtttttatatctttattggcatttcttaatcggcctcatatgcatcaagatatctaatttctctactattataaaattgaagatgtttttgccggtactttggtacgtcatctttgtttgagtcggtttttaagttcatttgcttttggaattacagatttgtatttgagtaggtttttaaattcatttgcttttggaaatatagaaggagtcatataagaaatctctttaaaaaacttgcatgctagtttgagacgattggagtcctaattatagctcatgatcttgtaaaaataatatccaagcaaatttctacagcgaatttcactttaggtaaaccgtataataataataagatataagatagtatttaaccgttgcaacgcacgggtattttttctagtaagataaaaactatgaaaataaatggtgtcaggtaaaatctcgagaaatatttgcataactactacaaaacacactaagttcatagtaattttagttttgaatttattatttgtatttgagacctaatctaactgaatatttcgcgttatagtgcttaatagcctatacaatatctagccaggtgttaggacaaagttcgtatgtatactttttttttttgccaatacattgccaactaacatttaaaaaataaccggcctcaatatcgaatgggcaaaaagccatcatgtaaacgacatgcgtccatgggccacaatgtcttcgttggacctttggctggggcattgaaagtgaaaacatatattttttttccaactaggccacgtgtagaaaatgtaggctacccgcgtacgtgaaatcgtgaaataaagggaattttttttccaaatacacatagcatccagatctggaaggtgcatgtgctgctgattttgtcgttttcttgatcgtgcatgccgatggcgcgtgaacattcacgtattagaccggtactatttctccactctctgcttctcgacaaaaggtcaatctgttaggttgggaggcggagaagaaacgattatgagggcaccaagccgtacactaatttgatgcccaaaccaaataagttctcaaaccaccactacagatgtgaggatagaagatgaagatcatttctaaagctgatcaatcagatacaacatcgcgtgcctctcaatcccttaatcatcggaacaaatccaatgaaactgcagctcgatgaccaccattgctcgcttctcctcttgaccatgcgcgctcccggctatgatcctaacagcctatgtcctcttggaggatccatcgaatacttcgatgttgacgccttgcagccatggtcatcacttgtcaccttaaatctgaagtgaacctcacaattcatttctcctaggaaaacaaacctcgaacatgaagaggagcagagaaacagatgttttttcttcaaactcataggacttgttcaaggctgtcccacatcgttgaggtaggactcttgctaagatggagcagcgacgtcgtgaagttttctaagtggcacccatttggttcatcggtacacccatatagccaagttttgtttttcaacatgttcagttttcaagttcttatatctaatcgcacccacgcgtttagtgcttatatcaccagcgcaatctacaccaaaaaaatacttcatgttctccaagcatgtttgtgccatttgaaagtttaattgcagtttcgatttactctgcgtgtgtccaggatcaagattgctcgcttttcaagtgtggcgctcgtggtgtctagttttagctcatgctttgtatgagagcatgccttgaggcattgatttctactcagacatcgatttgctagcctccttgtttcatgcttccattaacccgccttcgtaaaccatttaggtaggttgcaaaaccacattttttgtcaattgccctacatctctagccttcttgacagccgcctaacctatttgcaagctcacactaaaaatagatccatcttacaacctctaattctctaagttccatccccaccactgatattgcaggcaaactatctgctataaaaggcaccacactaatcgtgtatgacaaacaaagactgcttgctacagataatctcgtgtgacctaatttgcatggagcaggtaagcatgaggctggtcatggtggccttagtgttagtgggcattatgctggcggcgagcc

SEQ ID NO: 26556 - DNA, 1574 bp, Oryza sativa
tcaccgacgggaggaacggtgtcggcggcgagttggggataggaagggatggaaggcggagggtagcacgcgaccgagcggcggcgcacggcgaacgacgccgaggcggcgcggcgtcgaggcgtgtgcgccggggaaggagagatggagtgcggcgatggggcggcgcagagctcctcgtcgactcctcgtgcgcacgtcggcacgcgcgacggcggaggaagggcgacaatggcgcggcggcagagggaagtaaaacgggaagaaaagagggggagctcgggctgggttttataggtgaggaggagaggtcggtttagaggagggaaaccgaccttggcggttgagcgctcggctggcgctcggcgggcggtcacgagcgggagcggcgttttcgtgggctgcgcgaaacgtggcgacggcgaggatgcaaaggggcggtggaggcggtggatcgtgcggcgggaattgaatcacgggcgcgggagcatcggcgtggccggtcaaagttgggggcacaggcgtggcaggacgttgtcggcgtcctctgcttccgcgcgcaagaagacaagggcgagaggagagaggctgggtttagaagggaaaaagtgagggccgacggtggaaagggaagcctctcccttctgttttgggccgcgggcaggcgaggcgcgtgggagcggcgtctttgccagtcggccatgcgtgcgagaaacggcagcgcggttgggattttgggcggcgtcggcgggagtcaatgagagagaggagagagatagagggtgagagagagcgaggaagaaggagagagcgagtgcacacgcgcaacgcacgtgcgagggggaggaggaggagcggctgagaggagatgggctgaggagaaaacggcccacaaaaattcgagggggcaaaatagactttttcggaggagattaattcgaagagaatttgaacttggaatttgacttagatttcggaattgggatctggatgagaggaaggagtcgacggaggattcaagatggggttttggatattttggatctggggaagtattcggcgatgattcaaagagagggatagaatttcagagtttgatttggagacatgagtcggaagaggaatttcgaggaggcaatttttgatggtgacgagagggatcaaggacggatttgaattgagatcttggcacaacttagattcgcacacaaagaacggaaattttcgcatataaaattttgccgaattagtttttaacgtctcacgaaaagcggagcgttacaattatccggattatctacttatttacaaaaataaatcaaacatatttaaaaatagcattaaaatgttatatataagtagaagaaagtttttttaagaaaatatttttcaaagcgcaaaaacaaataatccaacgaatattttttttaaaaaacgaggcacgagtttttcttatattggggcaatttttgggttccttttgagttcttcaagactaaatggaacctccatgatacaccagtgattttcatgatacatcgatccccatatgataacaataaaaacatactcaa

SEQ ID NO: 26557 - DNA, 796 bp, Oryza sativa
gatacgaacttattccaaacacccatcggtatcggaggtttgcaacaaagcctttcccaagccgacccagggttacctcatgccacatagaagaatcaaatcctcacataaatataggccattttagttttcacaaatcaaactccaaccaccttgatcggtaatctggcaagcttcgcgtttttgccttaccaggaacccgggttggctccaactgaccccgccccggcgttcccaactattggcatgcgaggtttccctgaaccgactagttacttagctagggtgtcccataccaccttgtggttgcactttgttatgcttgatgagtttcacacaggaatcggtccttatatgcgaatacgggacagcgccacgcaggcaccacccccgcatcgcgagttttcacaattcattttatttttaaacacaccgacaccatatgtcgggttttcaaggcttctcaaacccatttcccaatttttcgacaatcaacggtgtatatgaggtattaggtatacgcgctcagagagcacggataccgaggtaccacaagagtggagcgacaaagaattagggtagtacagcctacaggaatttgtgcgactactgggtaggtccatcggattggcacgcaaaccgaggccaagcaagttaagtgtgtgattctactaatgcaagttgaaaacaaaacaataatgagtttccaattataggagcaaatgatcaaacggtgacttgccttgctcaaggtcttcacgaagcttcacgaatcttcgagaaatcccacgatcga

SEQ ID NO: 26558 - DNA, 1544 bp, Oryza sativa
aaaagtacttgtacctcaagcttatagccaaatgatatatttttagatggaggtagtatgcatttttacttgcataatcatcttaattattagattcgtgcatacatatacttatctaccataacatgcctaatttttttgctgctgatgacgtaggaattctgcgcgaagcacaagaaggacatggccgacgagcaccccgtcatctcgtcagactccatgttcctcaaagccatccttccgacgctcaatgtctcaccgtcaaccccctaaccatcaccggcggcgccggttcaagcactgtcaccgcggcggccttcgctggcggaagctcttcacctgcaccacttcaagttctggttttccagcagcaatccactggcaacggcaacgtggaaattagcttcaacagcaatgcttcgcctatggccatgtaggcgccagccgataattctatgatatccttcaacaacatcactgctgcaccggtggccaatgcggtgatctccttcaacaactttgctcagtcgacagccgggcaagcgtcggcgacgatgggacatcatttgtcaggtggtgtccagcagctggatgctccctagcaaagggggccttctcctaccaaggccctttgccaccttccatgcgcacccacatcaacctgtttctaacggccttgccactgcagattgggatagccattgacaaaggcaaggctcctttgatcgagccttcatacggtatacccatggatgacttcctcgtcggacaaaagtgcatatgggggggccggaccatccatcgaagcccctgacgccccggccggtgggtacccctacatagatgcattgaccaataacgttgcagctggctctctcatggcgtcaccaatggagccaacgttcagcatcaccgagccaaccgtgttgacccagggtgagggatcagagacgaatgcggtagcaacaacacgtaacaacgccgcaccattaatggtacctgatcaagttactgctgatgctgcaatggatgctgaagaagacatcatgttttcactggagtctctccttgggctggactacgacatgctgcctatggaagacagcagcgccgccgaagccgctgccgctgatgattcagctggcatggacattggctgggacctcgacctgcatgatatcttggtggagaatgccaatgacttcgtgttcctggacagcattgccgggagcgagtagtcggtagtcatttcatagcaaataaattagctctagttaagttagagattagagagaggggatgtgaactctctatgataaaacaactttagtcttgttgcaagtactctgaacatcgatgatttttcctccaactgagcaatcactaattttgtgttatggtcacacatatatcgatggaggtaaaaaatactacaattgtttcaccagacacaaatgatctttttatattaaatgtgtccttcacatatcctaccctccctacacaacacacacaaccctaatacagggaaacaactaaatgtg

SEQ ID NO: 26559 - DNA, 7869 bp, Oryza sativa
aaataataaaaaaaaattgttactaacatcactcattgcactagtaatcgtcaccctggcttgccggtattcaaatagagcgcttactccccttaattctaatcacttcatgtcagtgaaaaattgagctgtaagcggtgtgtgtcatgcacatatgtgtggcaatggaggatgagacaatcttctccttcttccctgatggcctctgtctcatgattctagatgacgacatgaaggtcatcaaaaccgcaacatcggcaacgttgttcgaactccactatccatgtagattttggacgatttttggtgtcctgcgtgcaatatacatcagtagattgtgtgtacaacacgcagatatctggacgggtatgggtccttgatgaaatatttttgtttgtgtaatctttcaatttttgtgggatttcttgtgaatgaaagttttattgtttgtatataggtgtttttttgtaggatttgtttggaataaggaacttttgtggttctttcaacttctttgataccatcttgtttctaaatgttttggtcgcttgatttgagatgcaaaatgtgtgtagtacattttctgattttcagcaaggtgttttgttttacttttgtatgtgggtcggctatagtctacgggtaaaggggcagtcagtgactcattgcatgttataaaaactttcttttttaatgaaactgaagataatgtgtcccttgcatatcatctactcaaccacctccccctacgaacacacaatgcgatgtttttcagcagaatgaaatggttcaaaaagaaccaaaccgtgagttttcaacatagtggagtggattggttgcattcgtttcaaaaaatccctcagtgactcacgtggtgaacatctgtgcattaaatgtcaatattggttcatgtaggtgtgatattttttatcggaacaaaattttttaataaccacaaaaacatgtgttttggaaaagtctctccatgactcgcatggctaacatttgtgcattggatgccgatattagcccacgtgggtaatatttttttcattggaacaaaatatttcaaatagcaccaaaacatgatttttgaatatattggagtgattggggtttgttcgtttgaaaaatctttccatgactggcgtggagcaaagttcggaaattaatgctcgggcttagattgatgtgatatttttcaccgaaatgaaatatttcagaaaacaacacaatagattcttatcggtctgctcttcttctttcatgtaaatgctattgtgctttaactatatctgtagcgatggacccgttatgatcgtgtctcaccaagatatttgtatatatttcttattttcctgatattgtagaataaccccatatttagggtgttgtataaactaatgtataaaaggactaaaatactcccaagataatgttgtacatatatagcaaatcaagagaaagatgtgatttccgtttacatatgaatacaatgagccctcctaggacaagaggggaggggtctccccattccatccacctctctgagccttcatcctcttcctgtcatctcctcacaggaccaagcttgggctgcctcccattggagggatgcccttgccatgcatgttggattttgttccaacacctgattaatatgaaaatttctaaagtccataccaccattttattatttaaaattttaatgatttttcagttaatcattgggggatttattttatatttattcggatggtaattaatctcatgtggggttctatgataaaatggcatttaaatattttttattttaaataaattttctatgcatgcatgtcgccgttaaggacatcaccctgatctagtgatcttccacccccgtgcgtgctttgagtcatagctcggtctgccgctcgatcctattgcggagctcgatctggcaccatcgaagtttgattcgctgccgtcggcaccccttccttgccactggagctccatggtccgtcctcaccactacagctctcctgtcattgtcaagctcagtctacacatcggagctcatctaccatcagtcgggaggggatgggagggtacacgaggaggtggcaccggcgaagatgggagggggaagaggaccaaaagcagttgaatgcgcgatgggggagaaagagaatgggacgagggggttccgtcgataagcaagggtactctatatgtaattttttttatcttgataaagagtctaaatataaaagttgagttgatttgttaatatacaatatgaaaatgactaacatacaaggaatcgaggcctgagacgaaatagaggcacaagttccgctccgccgttcgccatcgttgatggtcgggttaatttctgtcgggctcggcacaccgtacgtgacgcgtggtcgcgcgcgcgcttcacccgcacctgcgggggcgcccggcgcaacgctcgaggaggatacacggttggatgaagacttggtgagttggcatgcgacagtaaccgtgacgctagctatctcttgctacctgatcacttcttgtccatttgcacttaggtgcagcgtgcaacgttggtttcctctgcatagtagcacgcacgatcgacgtggggagtggggactactttttattattttttaagttgcttttgttctttcctccctattgctgcaatggacgtcagtttcgaatgggtgcaaagtttttaaagtatacgggcgtatatttgaagtattaaatgtagactaataacgaaacaaattatagattctgtctgtaaaccgcgagacgaatttattaagtctaattaatccatcattaacaaatatttactgtagcatcatattatcaaatcatagtgtaactagactcgaaagattcgtctcgcaatttacatgcaaaccgtgtaattgatttttttccatatttaatgcaccacgcatgtgtccaaacatttgatatgatgtttttggctaaaatttttaagaatctaaacaaggcctaaggtaaaaaatatttttccgggaaccatagttatagtagctggtagttgcctacatgaaataggggtggagatatttcgatatatatggacctgcatgcaaaacatagaaacatagaaatgattaaactactcttgttcaacaagacttaggaatgattaataaaccactattgttttttatttagtactccctccatactggtaaaatataacgtttaggacaacatttagcatactaaggggtgattaattagggggtatttttctatatctgtccctattaaatacagttgtgcgtagcattccatttgagaagcaaacttaactcaagcggctagtgcggtgaggctggagtccttgggatgattttgcatgggaaacgaggtgagcaggcgtgctgcggattaattgtggaagcttggctattgaatagacaagagcaatcccgtccacaaggcctagctacggttcataacgtcgtttaaatcgcaaacgaggttaggggctagaacgaagtttttttctatattgagagagtacgtgctgtatttcctatcatcgttttagatgatatttttaaagttttatattagtatgaaagttaagtaaatgttgttgagtatgcatatgtggctaatggagctagcgtgccataattttgtacggttcatctcaatatttgtgttcataaagatggcttcatgtataatactaattgtaggaataagcacgcactcgagagtaatttgtgtggacatgaataagtaatttgcgggcccatacaaatttactttagatgacaagataaattaatggtagtaataattgatatcaggctgacgttgtagaaatgaccgcaacgaagagaaagggagatggtatggttgatgacataaaattttagtaatagaaaataaatggagtatgatgacaatagtgatagaaacgcctgtagcgatagtaacggtcaaaaggatgacgattggatatgagtgctgattggccgatctttgtcagcgaggaatattctggtaccgacatttcaagattcttttccaatgtgtattatctatatgtcatgatagagttaacgaccatatatatggcggcgggaaggttaaaagtaccattattactttaagagagctgaaaaacacatatattcccacgaaacaaactataatttccatattctaacacaaggaaaggaaatattttttaattaattggaagctgagagtctatcctctcatatctgctagtaccaattttcacacccctatccattaacacacttcaatacatgactacagtaagctttctccggtgcactgcaaacgtaagcgagaaatggagcttttacgcctgacccagctcttagcctcttaattattgtcctcacatggacacgtttggcagatgatgttcccatctccccaaattttcaccaggcctgttttcctccgttctcctagaccgatgattaatgtcctaagcaaaattccaatttggcagatatacgatgttgtgatgcaagatagtattaaaaagcacgaccattttgttggcgttcctccgctacgccgtgcgtgcgccatcgtcgatggcccgacgaatgcacgccgtgatgtgtgggcgcggcacccacgcagccggtactcgctcgccttgcgcgcgcgcggccgcccaaagttcgaggccttcgaggatatacactggcaggtgcgttggcgctcgacagtgtgactatagctttctatctctggctggcgacctcacttctcctttgtccatttgcacttagctgcagcgtgcgatgcgagaagaggcgtacgtcggtttcctctacatggtctcaggcaccggatggatgatcgacatgggggccactttctttcttttttttaaaaaatatatttttcagatgctatgttcttatccttcatgttgttgtatttgggatgttagcagtttcattggacactggcgacatggactaggtgggtgaaaaatttgaagcgaaacaagcgttaaactatttctatagttagtaggtgtgcaacgagagagggatggagatatttcgatatggaaatgcaaaacttgggaaaggactatactacttttgcgctcttgttgaacaaaggactaaacaaatcttgttttccattgcaagtgtatcgaaaatcaagtaggtgttcttgagtgagcgtgcacaatgtaattaacggaattagtactactaccgaattgatttttctgaatgagatccctttaggttgcaggcagaccataactactaccacatgcaaaagccacttccccgaatcggttcaagggctgcatgcgaaaatatattcactctgctacttctcccctcttctcccacttcctcttgatccaggccggccacctgctcgggctggtggcgatgacggcgggctcgggcaacgacaggagtggtagtgccagcgtcgacgcaggctgcgatgagctcgggtatggccgcggactctgcctcggaccacacggatcccgccgtatctcctcactatcttcctcggcttcttctctccttacggccaatgggcacgggatccgccgatgctagcgaaagagtgggagccgcaaaacacaaaaccccagccagatccattggtttttggcggggggcttgctcggggcggatgcagtagcagcgggaagcagtggatccggccgaggtggatccagcggcgacaggctcaggagccaagggtgtcgatgagggctgtgatgactgacgagctcggctgcggatcccgccttctgtcctatatctctctctctcccctggccttggcatatcctctcctgacggctggtgggcatggatccgctggcggcggaggcttagggcccggcgaggtggagtgcgacgacgaccgagtggtggcaaatttggcttgggttttgattttgacaattttttcgaccaaaattattttcgcatgcagtaggtataggtgaccgcatgaagaaattccgtcttcacatacggttgcgctggtcgcatgcgaaaatattgattttcacagatacctggatgcaggtggctactttgcccatatgcaaaaataggttttggccgtctacagaaacaattgtttactggtgtagtatgccattaatttgcattgttaattcatcccagtatttgtgtttataaagttgggcttgtggattcacatattcgaatgcaccacattgcatggacacgaattagtaatttgtgggctctaataaatttacttggattacaagataattaagtgaaaaggagaaagggtatgtcgttgtgactttaattttctttaaaggatctatgactttaaatttaattagtagtaaaacatgcacagaggatggcgacaagtgaagcgtccgtgctatcataacggtcacaggacaacggttagatggaagtaatacatatatggctgttcttcgtcggcttccaagaaacattctaatagcactatcacttgaagattctttcaatgtctatatatattatccatgcgctatgatgagtcaatgaccgtatacatatatggcggcgaaaggttaaaatacaattatatataaatagtggaactgaaaaacacaaatatttcaacagtaaactatatttttatatatctaataaaataaaaaataaatagcaagtctgagtatatatccatatctgctacctacttccacacccttatccattaataacactcttctatacatgactatgaagtactccaccccgttgttattaccccggggcatgacgaccatcgatggatcaatataacccttgtctccaccgactgatccgagccgattcgatcgacattgaagaaagtgtcgacataccccgcatcacttcatcgctgactgcgcttgcgacgacatcatcaagatgactagatgatcaacgctcgagagtttagctacatttgttcatgtatatatccatgcatctatggctgcacatatatacaagcatgcatatagaacagtccaagtcagtcaaagatcatatatatttatatacgaacaaaaagcaaccacttctcgtcacacaagaaagttcaaacgtcttcacggaagagatagagatcagagaaaatggatgcctatttgttttctcaaagtattaatgtacaatgagtaatgtgcggtatcattttgtttaaaagagtgtagtaccatttaccaatggggtagatttttaaccgggatgttcatgcgtatatgaagcacatatacacttttttgaaaaaaaaggccccaagaacgtataataacgtgtataagtgcaaaattgaggggctttcaactttgtgcaggaagtgacagtcgtaatttccggctaaaaatgcatatagaaggacacgtttcacctttcacaccggctcaaatgtggcagtgaaacttcagttttctccacaaaaataataaattaaggaaaaaaatcgtcactacacgtcactcatccccatctcccaggcttgtccggcctataaatgcagcctccctcccctctattctctaatcactcaaaacactcatcaatgaaatctgatcagcggtagctttttttttttctttctgaaggaacaaaagtgagcaatagctagcggtacatctctctctgtggcaatggatcaagcgaggatctcgttcttcccggatggtctccgtgtgatgatcatcgacgacgacgcaaaggccgtcagaagggcaacggcgacgttgtcccaactgcagtacgcaggtagattaatttggatgattttctgtatgagatttttttt

SEQ ID NO: 26560 - DNA, 752 bp, Oryza sativa
agtagctcatcatcctcaaggacattatgaatggcttgttatgccatgaggattaaaaaatgcaccagcaattttccaaaggaaaatgcagaatatatttaacgaaaaccaagaattcatattagtctacatagatgacctgttagtcttctcaaggacttacaaagaacatattgctcatcttgaaatattttttagaaaggtggaacaaaatgggttaatattatccaaaaagaaaatggaaatatgcaaagaaaaaattaacttccttggacatgaaataggagagggcaaaattcatttgcaagaacatattgctaagaaaattttagaatttcctgatgctatgaatgataaaaagaaattacaacaattcttagggcttgtaaattatgctagaaatcacatcaataatttagcaaagttagcaggaccgttatatgctaaattaagaaaaaatggtcagagatattttaattctgaagacatcaaattagtaagattaataaaagagagggtgaaagaattaaaacctctagaattaccattagaagagagttactttattattgaaactgatgcatcgcagcttggttggggtgctgtattaaaacaaaggcctactaaatattcatctaagtcagaagaaaaagttcgtaggtatgcttctggaagctataaattaaaaaccgtaggcaatacagatagagaaatacttgcaataatcaatgcgataaatgcctttaggttat

SEQ ID NO: 26561 - DNA, 1677 bp, Oryza sativa
atatatatatatatatatatatatatatatatatatatatatatatatatatatatatagtaaatttgtttggtgctccatggtgcccgggcaccattgttgaaattgagtatatacccaattcaaatgagtatgaaactttttcaattactcaggtattaacattaactatatatatatatatatatatatatatatatatatatatatatatatatataaatataaagcttccaagcgcgctctcaccctccattccaccattcttagtagtagtgactttagcctaccttgcatagtatattgaagcaaggagttgtgttataacgctgtgtaaggtaagaacagcttgcttgtacctaccttcgggtttcccgaaagggaaaaccgtatgtaagcttatctgtttaatatgaagtaattttccttaagtattcctgcacgtttgttctagacaagtgtttatgctaaggaccctataggagaaacctcttcggtttgttctcgtttttagcctgcatcttgcataggcgtctggagaatcggtatccgtagagaagtgttcccttcgggtggaactgcctggggagacgataaactcttagctagaacaagtgtgacttggaatatctttttaagttgcttctaaaaagatagataggtgaggcatacggtgagtaccgagtaggactttacatcatctgaaacaagcttctgaggctgtctaaataggattcgccaccctgcaaagatcctaaagttaaaatatctctcgaagtgaacagtattgaacagtaatttaaacagtaaactaaatagtgtttttgaacagtgttttttgtccgaagcatatatatatatatatatatatatatatatatatatatatagagagagagagagagagagagagagacacacacacacacatacttttttttgttaattgaccatttagttgaccgtaaaaaatttagttttaccctcggatatggaaggaacatagaaatttgtgagtctaccaaaaagtagttgtttgaggaagtattatacatacaaaatttaatatatattaaaaatagtaagtgtagtgtatctttagacagtaaacataataattagtttagtttaactttttttagataatacatacaacaggtggcaaatttgttatactaccatcaccgaaatacgctaatatactcttttaattaataaaaataaatattactaaattttatcattatctaaaaataaattggcatgaataatactcgtacctcacacaaactcatcaatataatagtttcatgtagtaagttttctacacttccaataatgttatacacaaattttatgtttcttctatgtctaagggtaaaatagacattttcataaatcataagcattaaatgatcaactgtcaagtaacggaattggcatgtaagggattaaaccgaaattcagtagtaatataaaggaagtgagaaaatagtagggccatatagaagtgatcggctaaaattttaggacatatatactgtacaagaaatctttttatgctttacacctttggccgtgtttagttgtagattttttcttcaaactttcaacttttccatcacattaaaacttttctacacacaaactttcaacttttccgtcatcgtttcaatt

SEQ ID NO: 26562 - DNA, 3008 bp, Oryza sativa
ggggtgtatatgtatgctagtagctagctagcgcggcggcggctgcagggaggaggcagccatggaggacgaaggtctgacgacggcgtcggcgtcggagacggcgccgtcgtcgtcgtcggcgtcgagggcggtgtgggcgtggccgaaggcgcgggcgtggtccttgagggagcgcttgtgcttgaactcggagccgcagaggcagtaccagagcttgccgcagttcttctcgtgggtgcgccagtcgcccttgacggcgaaggccttgccgcacttgcggcagaggaagggcttgaggccgtgcttgcgcttgtagtgcgtctgcagcgtgcggaagtccttgagcggccgcgcccgcgggtggtcgatgttgttccggcaccccgccgcgcagcagtagcacggcagccgcagcatcgccgtcggctgcaccccgcgcagcgactccggccccttcctgtactgcgacccatgcccccacatatgcatctgcatccatgcattttttttcaacaagtttcattaatttccatctcgtttttttttctgatcgacatcaaaatgtatatattcaccaaatcaatactccctatgtcccataatataagggatttttgggtggatttgacatattgatctagtaaaataaatctaggcggtccgtctatccagattcattataatgtgtcacatctatccaaaatcccttatattatgggacagagggagtagtatatacaatgtaataaaaacaaattcagaagtttttttttataaagcttcatgtatatatatgggatgtcgatcgtcctctccaggtatgagaacacacttaattagatccctaacgatcgtatcattgcatgctcaatgtttcttactttatctaaaatcatatgctgatgagcattcatttcaaatgcatcaccttttggttatggttggtttgtttcaggaaatttagcaccattatttcacatttactcctactagtataaccaaaaagaacaaaaagaaggtgatgtatttcaaatgaatgttcatcagcatatgattcgagtaagtatattgcaggtatttaatgcaccactgcagctatagttgcattgctagcaatattcagctgcggcaaacctgagagaactactcgaactgaagctgctgcatgcatatgtcaattagtgcagctgctgctagctagtgtgtgatcttttgaaagtgagggctctactactccaggcagctatgccccctttgctagcttggcttgtgtgtttgttgtgttcaatgtgttggtgttgttcctttaaagagtgcagccagagtggcactgtgttggctgcatgcctacaggaagcacactgcagatctctcttgctgttcttgggagatgtgttcagcagcagcagcagctccataatcttatgctttccaaaccatgaaagcctgtcctgaaacaacccccatgcatatatctacccaaatcttatttgagccctgagtcctgagtgatcaggattcaggactactaggtgcatgatagcaagtgtagtactagtactagtacaagtagtaactacacctccagaaaggagtatatgtaatctgatgagatcagtggaagtgtactaagacagtgagagaagcaaagataaaatcttcactgggatctccactgcagcttggccactcatatgattctcccaaaagccagacaactcaaggagagaaaagcataaagattgcatgcatggtaagctctagctctacctctagctatagctgctcctggcatgccagtctagttcaatcacacaaaaggcagacaccactactgttgcatgctcctgtgagctcaagtctatttcatggcatgcatctgctctccaaagctagcagcttgctacccacctcctctgtactttaattgcaatcaacaaaatcatgaccaaccaatccttgcaaagttatcacaatcatattgtgtgtccaagaacaagaattaagatcaattattcagatgagatgtttctagctagtagtactagctataataagaatgtgattaagatgattattagctctgacctgcaaagttatcacaatcatattgtgtgtccaagaacaagaattaaacagcaatataagatcaatcatatattcaaatgagtagctaataagaatgtaattaagatgattattagctctgacctgcatgttattgtatctgttgaaggttttgaagcagacagggcaggagaactgggttgggccgatgaggatctgcgatggcgtcggaatccagtactgccctttgttcagcttcccgatcggcgtcgacgagaaccctagcggcaccacctcgtcgtcgccgccgctgccgccgccgtccaccttgcagtcctcctcctcctcctcgtgttcgacgccggcgccggtgagcccggagaggagatcggcctccgtgccgccggcaggcaggccgatgcgcagggcgaccgcggcgtcgatgtccgccgttgtcccggcgacctccacgtccatcgggtcgccgccgtcgttgtcgtcgccgcagcaggtggggatgcagttgaggtcggcgaagagcggcgcgcgcgcggcggcggcggcgggggtggccgtcgacccggccgccgccccctcctgatcctgcaggtggtggtagcagcagtcgccgtcgtcgtcgtcgtcggagtccgagtcagccgctgcgtcgacgacgccgccgcggcgcgccggcgtgggcgacagggacagcagcggcagcgcttcccgcagcggcggcgacggcggcgcctgatgctgctggtgcaccggcggcgggtggaagaatgcggccggcgggtactgatgatgatgatgcgcgccgacgccgacgccgacgccaccggcggtaggatacagggcagcgtaaggcggcggcagcggcggagggaggtgagcggcggcggcggcggcggcgggcgcggtggggaaggagctag

SEQ ID NO: 26563 - DNA, 1376 bp, Oryza sativa
acccgggaggttggtacattattaattgagttggtgaaatttgataccccagtcttttttccaccccaacttaaaaagaaataaaacacttaaggaattccaaaagatttcaaacaaaagatttaccaaaacaaccttgcctcttctttccaagcttgcatcaaacacctaaattcccgtgacttgctgagtacgaaagtactcacccttgctctatataaatatatatagttcctccgccctgaagagaagataaagtgaagtgaagattagggtttcgtcctggttcccagccgtcgcctgtggtgttgggtgttagtccgttggttccgctgctgctgctgttgttggtgttttcctcgtccgcgtcgtcggttgcattctcgggctgttctgagctgcaacctaagttaaggtaaataagtcctttatttattttaaggattgcaatgattcatatttttcatcgtgggtaccagcactatgtcctgggactggtactgtaatcgcggattcgtaagaagcggttcacgccgttttttctacgacacgctcctgtcaggtgccgttgtatggcagtgccgaattggggtgtgacaataatctactgaacagtctatcaaatggacatgatctttgcaccaccaaacctactatgtggcatccacaattcgacatgccacctcccctccaagcggccgtactcgattcatttttgcttaatatcatatcacacattaaatattctctctatcaaaaaaaagtcgaactctagggatgaatttaaacatggtaatgcatccctagagttggactcatttcgagatatagggagtagtttggaagtaagttggaataatatacttaatttaaagtgcgatgtgcaggcttagtccatggcgtgcactaattgaggcccaatcatttatcctcttcagattgcatcatgtactgtgacgagttctttaacttcatccgcgttacgttgagagtcaactgtcgaggtcaacgctcgattcaccatttagcaaatcgcattcaagtcaatttgctgtttcagtcgtatatagtgtgacaaatcagatgcaacgcaacattaattaattagcaattactgataattaatcacagtaactttttcagcagcaaaaaaagtttcaaagcatagtctacactgtacaccatattatatgacaccaaccaaaccggcgagcttgctgcgaggctgcatgccacagatgaaagctccatcgcggggaggacaacgacgaccgtgtccaagtccactcatgcctggcaatctcttttaccctacgcgattgcatcttgcatcaagaactcgatcgatctgatatatattactatgagctaagctg

SEQ ID NO: 26564 - DNA, 2818 bp, Oryza sativa
taaagaggatctttagtcccggttcaaaagggtaacgggcatatttgatctttagtcccggttcgaatgctgtcagggcatgtcaggccccccgggatctttagtcccggatggtaccaaccgggactaaagatcgtaactttagtcccggttagtattaccaaccggggctaaagatcctggtgatctttagccccggttggtgctaccaaccgagactaaagtcccacccctatatatatatatatatgtcttcttcctcctccagctgcccgagcaagcttcaaaatttcttcaaaaaagaggggaggtcatgccaaaatttttattgaatttattttggtgattacatacaaatcggaggtgcctaaaaggtttgcaacttcatcctccaatgttttttttttgtcatactacatttgcacctatgtttttgcacacttttttgtctccaaaatttagttgtaagttgatgagagagaaaatgtgtgtggggaagaaagaatatatagaaatttagttcatttgctaaataaggttttataaaatagttgagaaggaaaactctagtgaaagttaatctttaataatagaaaaaaaaacttaaatgaaaattaaaagaagtaaaacacattaaaattagtttaaaactttacaaatagtttttaagaattatttggtgtaatattttatgatttttgtatgaataaagatatcttataattattgtatgactgtcattattgtaagaataattatttatgtacggtttttttttgactcatatagatggatcggcaatggatgtacgctgaccggcggtctaaggagtttattgacggtgtgcactattttttgagagtggccgaagctaacaggtaaaggggttttatttgttgtccatgcaataagtgtaagaatcagaaggagtattctgcatccaggactattcatttccacttgtttgagtcggggttcatgccaagctataattgttggacatccccacggaagcaagggggttgaaatggagaaatattaagtgaaagacaacaatattccggactttgctcatattttggatttgaaaaaatcaaacggccaggaggaatagcttgtgatggtaacacgttgcggatgatcttggtcaaatgttgcaggatgccagggaggactgcgaaagtgaaaaggaggcccataaattggacaagatgttggagaaccacaaaacttcgttgtacccaggttgtgagcaggggcacaaaaagttagataccactctggagttcttgcaatggaaggcaaaaaatggggttagtgacaaggcatttggcgatttattgaaacccgtcaagaacattcttccggggggaaacaaattgcccgagacaacgtacgaggctaagaagatagtctgccgttaggactggaagttcataagattcacgcatgtccgaacgattgtatcctatatcacggtgaggagtatgagaacctaaaagcatgccctttttgcaaagcactacgatacaagattagacgagacgatccagaagaagttgacgggcagctaacaaagaagagaatacctgctaaggtaatgtggtatttccctataataccacggctaaggcgtttgttcaggaacaaggggaatgctagaatgttgcgatggcacgctgaagagcgtcaacaggacaggatgctgagacaccccgccgatggttcgcagtggcgaaacatcgacagaaaatttaaagaatttggaaaggacacacgaaacgtacggtttggtttgagtacggatggcatgaatccttttggagagatgagcagcggccatagcacttggcccgttacgatgtgtatctacaacctccccccctggctatgcatgaagaggaagtacataatgatgccgattattattcaaggccccaagcaccctggtaacgacatcgatgtgtacctaagaccactggtcgaagatcttaaacagttgtggaagaaggaaggtgtccccgtgtgggacgaggacaaccaggaggagtttaacctacgagcgctgctgttcgtaaccatcaacgattggcctgcacttagcaacctattcggacagtccaacaaggggtacaaggcttgcactcactgtatggatgaaacagaaagtacgtatcttaagcactgtaggaaggttgtatagatgggtcatcgtcgattccttgcagcaaaccacccggtacggaagaaaggcaagcacttcgaacataaggcccaccaccgtacgaagcctaaatatcgcagcgggaaaacagtgtttgctatggttaaagatcttaaagtagtgttcggaaaggggcctggaagccagcctatagagagcgaagatggtcacgcgacgatgtggaaaaagaactctatattttgggagttaccatattgggaattcttggacatacgccacgcaatcgacgtgatgcacctcactaagaacctttgcgtaaaccttcttggcttcctaggtgtatacggaaagtcgaaagatacactagaagcacgtaatgatctgaagcatatggaacaacgcggcgaccttcacccggaaccaaaggagaaaggaagccattacttgagtccagccagctacactcttagcaaggcagagaagggaagtatgtttgaatgcttggagagcataaaggtaccgtctggatactccacgaatatcaagcgaataataagcacgaaggagaagaagttcacaagcctaaagtctcatgactgtcacgtgttgatgacacaactggtaccagttgta

SEQ ID NO: 26565 - DNA, 4315 bp, Oryza sativa
  unsure (1)..(4315): unsure at all n locations
actatttttggatgtatggattatccatataaatcaattgatgtatggcataatttactatcattcatatggtacatttaattgaatatcattcatatgctaattataattgactagaaatttttaaaaagtattaaattattcatgtggcatttacagatgttaattagagtttttcacaatttaatttactatctttcatatgctacttatatatgactattcgaatttttaaaaggtttaaatcatgcatgtggcatttacatatgttaattagagtttttaacatttaatttaatataattcctacgctaagtacatatgatgattacaatttttattaattttaaatcatgcagtatgtacatacatatcttaattagagtttttaccaatttaataatatcattcatatgctaagtatatatgattattggaatttttattcattttaagtcatatatttgcttattacgatttatccacttaatttattatagacaaaaataatttttcgaagtaattgtcattaatatttgtactttaaataatgttaatgcattaacttctattttagaaacacatatgtaagcaaaaataatatgcagtgctataatctttagtcccggttcttaaccctaaccgggtttaaaaagaatttggaaatagcgggaaaagatctttactcccggttgatgagaacaaccggcactaaagatcgagggctatatatattcccgatgcgcgccctcgtcttctccaccaacaattaacgttttcggccgatcgatctctctcggcctctctccttcgccgtcactgcctagggcaaatccccgcgccgacgccgccatatctcgccgtcgtctcgagcttatagacaggtaccgtcataagttcctctgttaattaagaaaatcttgttatgttaattgctactacgaatcatagctttaaactccatgtagggcttggtatcggttccgtcatttggtccgcggcaaatggagagaaagacttaggcggaagttcaaatttcctatgagtacacatgctctacatttatatttctccgattcaaatacatacaagtgtatattaattagatctctcgttgtttgtcatttatttgtagtgcgcaaagcaaaagcagggaactaacttgtgcggctattacgtgtgcgagtattgccactgccttgcagaccaaatcatcaccacaagagagctcgatgtacgtccaaataaattcaaaatttcattacgtaaccatttcttgtttaattactaatcaatttcatacattcatatagtttattcgcacgagggataacctgaccacacacaaggaatttatcgcggcggttcaagaacaactcatgggattcatcaacgaagaaatccttgatcccaagggtgaattctactacgacggaaacacaattcactggtccttagcttctgagcntagcagcggagttaactttaagcttttaacccttccgtcgaaatcgtagctagctaggaaatataatggattgtaattaatacatgactacatatgtttctatatgcatgtgtacacattttctataatgtaaatatattttggtcatatatatatatatatatatatatatatatgcatgggttatatatatatatatataaaccatgcacaacagggccattcaaaaaaaaaaaaggcccgctgaagcatttttaatccccggtggtggtacccaaccggaattaaaaaccatatttaatcccggttttttccacccggaataaaaaatagcgatctttagtcccggatttgtactcccggtttgaaaaccgggactaaagggggttacaaaccggcactacaaagggtttctccaccagtgattagtagggatggaaattgtgcccgtttgcccgtttacccgcgggtaaaaaccctattaagggtgggtttgttctccatttttataacccattgggtttttttttgggtcaaaagctttccccaatgggtaaatgggcttgggtttaggtaatccctacccttgccccttttgcccgtttaccccgaaaatctaacttacatgtaggctaggagcaaaatccacttaaatacataagccacgttctttgttttctatggtttcccttttattccccttattatttctctcctcttactctatcgctgccagaggagagacacgacaccgaggcggagaatatttgatgttttaagttcgattcgaacttagtagcttgtagactttttgttccactgcttttgttgtggcgggtaaacgggcacgcctccgggaataagacacccgtgggcaatgggcatgggcaaccatccttacccgtcatgtagtaatgggtatacccacgggcacaaataatctcacgggcatgggtatgggtaggcactacccgtgcccgtcgcgcccgattgccatccctagtgattagtcacattgtgcatgcctccctcaggaacagttacttgattttcgtgttaatactaataaaattaaaatttcctctacaagaggataggaaatgcaccactagtagttcagtccttcccaagttttgctgaacacgagtaaaaaaatagtttagtcattttcaagttttacagttccatatccaaatatctccatccatatctctcatggcactgcacacctaccagccataccaaaaaaaaaaaggttgaaaaaaatagatttggcttatttcgcttcaaatttttcacctccctctccctttgcacccacatgaacctccaagtcgccaaactccaaagaaactgacgtccctaattgcaacagcagggaggataagaacatatagcatctgaaaaatatcaaaaaaagaagtggtctccacttcgatcgagcatccatccggtgcgtgcgaccatgcagaggaaaccgacgacgtactacgcctctcgcattgcacgctgcagctaagtgcaaatggacaaaagcagaagtgaggtagccagccagagatagaaagctagtcacggtttgtcgcgagccaactctcaccccagccaatgtatccttgaacgttgggctcacgcgcgcatcgcacggatggcgagcaaggctcgctgcgggtgcagcagcgcccacacgtcacggcgtgtgcagtgcactgtcgatgatggcgcacggcgtagcggaggaatgccaacaaaatggtcgtgtttttttcataccatcacaacatcgtactatctgcgacattggaatttgttgcttagagaacatttttccgtctagggagaatgaaggaaaacaggacgatggtcaaaagttggggagaggagaataacatcgtgccaaacgtgtgtgctgcatgtgaggacaatattaagcgctggctcaaaacgtaagagcttcattttttggcttacgttgcagagcaacggagaaaaaccgctttataataaaaaagcaacaggcaaagagttggtaggcttgtggaaacagtagcacacaaggcaacagcttttactcaggtgcatccgcgaattacgatgcgttacaggaacagaatactggcctctaccacgcaaaacatctccagaaaacggcttcatgctgcacctgacactcggtgattcgttttgctaacgggctgatcggtcatcaacctcttgcaagagcatgtagaatttgaaaagcaatgtgaccaaaatgatacagttcactttctttcaatagtttggtactttggtaatgtaacgttggatttttcataacatgaacgaatgttaaacactcgaatgctaatcctctataggatcatctaattgatatcagcagagagcagggtaggcttgcaaaaatattccctgccagaagctacagccaccttcaggggcttcgacatcatgactaagctgaatggctagtttaatgtaggttatcatgggaactaaagactccccgtttgcttcagtatattcccttctatcccaacaattgtaaccagcgaatttgagtggcctttcaggaaaacatctgtgatctggaaagcaacatgaacagatcaagttagataaaaataaatgtgaaattgatggctcatgacactacctagtcaactatgaaccatacgagctcctaagtgaggtttgtttctttctgcataactgctggcagtagaagatcgagcatagaacatgaaccaaaaaaaaactgagcctttatactaacatcctagtagtggcccaggaaagaaaaatcctggtaggtatgcacaagactaaaggatagcagaaaaacat

SEQ ID NO: 26566 - DNA, 5550 bp, Oryza sativa
  unsure (1)..(5550): unsure at all n locations
gcaaaggagtgcaataggacttctccaaacgaaccacaaaagtggaccccaagtaggttatttcatccagcaaggtttgaatctaagagaggtagcgtatttggctatccactagatgggctcaatgagcagccactatagcgtgtggtactagtacaagtacagcagtagtttctgcttgctcttgttcttctaaaaaaactactgtttttctgctctctacttcattgaataggcagagcgcctgacattttgtttcaagaatatactaacgccctagtacttaatatgtgaataagttatcatacctgggtacacccaaatagcttgagaattctcaatgatgagcagctgtcgacaatcagccccaacgcttcattggtcagttcacgcaaaaggaaagatccagaacctccaagtgcgttgaacagttgcgagcaattgcataagcagtaagatttccagcctaaagtaaaagcagtagatattattataagcataagatatatatgtgcaagacttataaggcatcatacaacagtccaagaaagcaggaaaaactacccaatggtacaggtttacatgaagcaaacaaatgcataggaaatggaggcaagggcaacgccgcaacagtatttaaaatgaataaataagaaattagaagtcaacaattatgtgctaacagccagggaataaatgattatacatcagcagttaaacatcagtgactcagcaattagttttgcagtacagcaattcaatgagtcaattcaagtataccatcatatcccaagaaatgcatgaaaagaacccatacaatgtcctaattccaatcaacacaacgcagagacaggcacacacacatccaagcagagaaatggaacaatgggcagagtaccttctcaacattgttcaggcataactcagttaggtatcctccagactgttccaagaaccgatacacagcttcatcactgcaattacaatcaacatgattacagctcagaaacaactttgcacgacctcattacacaaaaatcatgtgtcatcttcatcaatacaaaagagtaccaagtattaatgaagagtcacgctaaaatgaaataaaggtccaaaatatccatcagtgttgacctgtgttgatatgttaggctgacacggcaaatactatggaattgtaaaaacatgtggatattaccatatgattttgaccatctcttgtatagaactataaatggctaaggagggatccattcctgctggcctaaaaaccaaggaaattttttggaactgaactttgtattctatactccctccaatcagaaaagaatgttgttttagcatgtgtgcagtcaacaagtgttnaaaaaancctctttttncgcccactaattattgtttacaatgcaggttatgggcatatggaaatgaagtggctaagtttgtgttaacaaaagttttcataatattatacctgtaaaactttttttatttatgcaaaagaaataggtggtcaaaccgtcaaagttatctattgttgactttgaaaagtacaaaacaactttttgtgacaagatagtaatttcaatgtttccttaatctacaaaagaaaaaaaagtagcagctcaattttaacaaacaaaacacaatgacccccctaccctgattacaaatatcacatcctaccagaatttccaataaataatgagtttacagtaggacatagaatcctgtcagcattataagtaagaatgaagtaatccgcatcacatcaactatgttattaattgtctctaactgtaagtaaaatcaggcagaaaagcgtataaggctataggactttacagtacagaggagaaattcatttgaaaattggtaacagaaagaaaaggaattacaaggtaaaaacaaacagatacatgaacatcataattggggagtatggtcagaagcaacccaacaagcaggttgtcctagacagttagactcccagtcccagccaacaaaggaaagtgtgggttcctttcacaagcagtataatcaggatatgtaattgtgtgcaaaataagggagataaattcagcttcttttcacaaggttaaaaacctttttttacatagagaaactgaaaagacaccctataccaagaaataaattcttattgaaaagatgataagtagaacactagtcgaaaagataaaactcattcaatgatcattatgtaaaaaaaataaagccatggatgtacatactaacaaaattatcctgctaaagaataaaaacactccaaacagcatcagaagagaaatacctgaatgtattcctttggagctttattttttttataagccggcaaccattgcgaagatgtctcattgctgaatcccgcaatctattcaggttgcgaaggtccaatgaagataattgtgggcagttccccgcaatagtcttaatggaagatgatgtcagttgcctacatatagatgacacaaacgtaggtagtcagaattacaccctaaatcatgtatctatacctgcataatatgtcatattatgagtataaacatttatggtatcagatgattgtgacanaacagggggccttattagtttactatacgagaataacttattaacaatatgctctcaaatgtgacacttaaataacaacaataaggccagtgccccagtgaatacaattattaaataaatatttaagggattgatgtcaaaaggctttcaagaaggtaccaaagctattggcagcctgcaatatcatgttatagtttcattttggtcaggactctcatcagataaaaagttacagatccacatttaaaatgctggccctatattgatggataagcatttccctagcccctttactgatggaaattggtgctgtattaacacataggacagctgtcatgtactgatattgaggtaaataattgtcttattactgttgtttctctattgtagaccttctagttacattagaatcagcttttggacttatgctttatatggaaaatttgttttgtatgcacctgattcatggtgtagtttgggagatgaaagttgtaacctaaaactagtgctgataaagtaataatacaataaagaagatattcctcataattaagtagaatgccatgaagacttacaagcaaccagcaaatgccaactccttcagatttgaaccgtgtacaggaataagctcattgacaaacttattgctgacagattgtatgccagacattgataaaacctctaaatgcttaatcttttgtaaggaaggaagaatcatcatggcatccacgtttaagcagtcatcaatatatagttccgtaaggactaaactcaacttgttagcaagattctcgattccagttgaagtgagaagagaacactcgcacaaatttagcgaactcagagaaggggctgcagagattattgtgtctaacccactatcagaaagacggtaatttcccttcagagatatttttttcaataatggcatgctgttaggaacctttgctaaggtagcaggcaacatgtagtcaggcatgcatcgcccagataagtcaagctgcaaaacctcagtaagagcaaaagggagggaaaatgagtcctcaataggtgacttaaataagaaggccgcaaagttaacaaaatatcagtgatcaaccctaagacccaaacactgttatggtcataatctaaaaccgacaaatttaacaacttgtttttcaacgacaaatcgagacatggcacatggacgaaatggtgcttctacatgttttaatatcttattcaacctctaaaattctagttaatcacggaataatctatggtaacaaaattttcacatatatatgtaggataaatgataactttactattagaatgtaaaattgtcatgtgctccctgtaacaaaaatattaagggtgtgttcaatgaaatagctcacaatttttttacaaaaattacaacatgtaattcgtttttaattcatatcagcgcacggcatttagctataaagagtaaaaaaaatattacctgcaagatttctgtcctgcatttcccaaaaatggtctcaaagtcatcctcactcaaccatgaacactcactgagttgcactgtcacaggattatcacacatgagttcaccaagaagatggacattcatctttctagaatggcatagactagataagagtctattttttagctcatctggaatgccagcaagtgattcgatagcttcagcattatttgaaagagtttgcaagcacaagctagtaagcgatggagcagatcgcagtggagatttcctatctttggaaggtatccacgaaatgaccttattagcagacttgttcaagttggaagaattcaactcccgagctctcagtttagcttctctgtcagtaatgatcctcattgcagttgaaaatggacctggccagtcctgaggatcaggaaccggttccaactcttctgcattgtcatcatcatcatcaccatcatcactatgtccatcttcatctgctttgaagaatgcaaacctaggagccatttcaatagctctctgtcttgccctttctctccgacgtggttcccaatgatctgctgggaaactctgcacctcttcagaaatcactgagttcaaatccatttgatccgcacctgagctaacagacaatgaactctcttccacaaccatcttagcctttcctttactatcgggactaaacttaccaatcccggtaccagcaccagaatcatcgttccccaaatacagcttccctttgcctttaacatcatacctagccttctgccttctctcctcttctgtggaatacatacctgcatggttttcgcctaatgcacttcgcataggagatgctaatagctcaatactctcaccaattgccgaactctgtccgtgcacatgctcgtcaatggggatgtcattttctcgaatagtaactccactagctttctttttacctgtcttcacagaatcacccattctcccttcatctgtcctgcccatgctcatggtgaacagattcagttcaatcaaatcagaagcagcgcataactgtaccggcatcctactgccatcctcccctggaagtatgcagtcatcatcattgtcactctctgaatcagagacgtatgggatctccatccctatcttacgacgcttccccgaactatccacattccggtgtggcatttcatcatgcacctggcctccagccccgccacctccattcgatccgagacccatctccccacccatttgaacaccaagctccatcgaccgtttcgcaaccctagaccccgattgcaagcttatgaatgccgcttcaccactacggattttaccgccgccccaaaccctaacttcgccgccgcccccaaactcaccagcgctggtcggagaagcaacgggggcaggaatcgcttgtgccctccccttcctcctcccggacgacgcggaaccagagccggaggaagcgccatcggcccccgcag

SEQ ID NO: 26567 - DNA, 2519 bp, Oryza sativa
aggcttgcgggggaaggaggaggaggcggtttgggcggcggcgcagttttttatggttttcccgcgcgggcgagggggagagcgcggaggcaggcgatggtggtgggttgggtttgggtcgtggatggctgcgggctgaggcgggttcgaggcccgaggcggcggacgtgggggcgggcccaaggtgaggtgagcccggtgcaccgtgcgcccgcgccgtcgtttcgctttgagattcgtgcggtgtcttggttccggtgtatagggtgggtctagagtaactgggactttgttcgtgtccgttatcggggatcggaatggttgtgcctaggctgggttcgtgcttcgtttgttggcgtgttgctacagtgcttttgctgtgacagggagagaccgggagggttgtgcatcgtgcatttgtgcattcagggggtgtttaggctgtatttagatctagcgttgaaaagtttatgcgtgtctcaggatgtacggacacacatttcaagtattaaacatatattaataataaaacaaattacagatttcacatgtaaattgcgagacgaatttattaagcctgattaattcatcattagcaaatgtttactgtagcactacattgttaaatcatgaagcaattaggcttaaaagatccgtctcgcaatttacacacaatatgtgtaattattttttattttgtctatatctaatactccatgtatatgtccaaacattcgatgtgacaggatgaaaagtttttgcgtaggaactaaacaggtagattcaggggtgtaaagttttggcttgtcgcatcggatattatatagggtgtcgtatggggtgtttggacactgataaaaaactaattacaaaatccgtcagtaaaccacgagacgaatttattaagcctaattaatctgtcattagcaaatgtttaatgtagcaccacattgtcaaattatggagcaattaggcttaaaatattcatggagcaaatgtttactttaccattcccatattttccctatgaaatgtccaagggatctcattcggaataacattctcagttaattctctttcaatcaatggcaagttctgtaccgatacaacaggcactccatttcccattttgatttatttttatctttaccttttttttaacaaacttataaatgtgtgtcttatgataaaaaccggagatgtaattcatttctattataaaaaaaaagatacaacagggcacttgctgcagaaagcgcatccgatgggaatagacgagtgatcaaaaggatcttacaatcacaattattttccaaagagtacatttgaatagataaatactataaatacaacagatgaacagcctgcacaggtaattcatcatctataagtgcagaaaacaatgctctttaatcctgacagagttcagctgctaagaaaggaaaagaacagtgcggcagcaacaagagtgttctactggttttcagaagcaaaattccaaaccaggtccaagacgagcaaaagaatggtgcaacaacacatttctactcaaactcacaaagcgaaaacacaagccgcggagaaaagtagtgcagccaccagtctccatgtacctgcaccgatcgaaactgcagcattggcacccatgcaatcgtcgttgttgccactgaagcatcctggacggacagacttgggcactccaccatctaccttgaagctggtggttggcttcccgctgctgaacaagacacaccagaagtacggcccgccgccagaagtgccactgacagctgctcccacctccgtgtggttcttgctgtgcagtacctgaatgctcttcgcatcattaaccaggaagttgaacgcctggtctggggtcgcatagttagactggcaagccagaagcctcccggtgatcttggtgagtgttgcagcttggacgccacaatttggggcaaatgtttcagcgaagctggtctccggaggcttcttgctttcaccgacttggttgcactgaccctcgtatgctttaatgtactgcagagcaatgcatcctaggccttggttatcatcaagagtagatgccttgctggcagtgcggttgctgttgatcaatgccacaagctggtcggcagggttatctggaaaggagatcagttaagaggtggaattggtacacaaatgcattaggctgtgattgggtggccatttgattacaagcaaaaaatcacaacactggaaccaacaaatgcatgctaacttaaaattttaaactcttattaataagcctacagtaaatgtggagggaagtacagcaaatttccatcagcaatgatcagtagtccagacatttttcaatggagaaagcagcaaccaatgtgaaagttgagcatgctagtatcaaacttaatgtggttacttttgggaattttgtttattaaagatgttattataccagcattcattattagcaaccggggtgtgaattgagtaatagtgttttacaattaactggtgtt

SEQ ID NO: 26568 - DNA, 2016 bp, Oryza sativa
cacattaatcggagaaaaagaaaagaagagtccaaatagaaatacaatcaaaaatagctgaaattcggaattaaaaatatgcaatattgaaagaggagtccatataggaacccaatacgtgattaattaaagttcggaataaaaataaaataaatttcgaaattagaaaaaggaaaacgaggagttcgagtaggaatacaatttaaaaataactgaaattcggaattaaaaataagaaatattaaaataagagtccatataagaatccaatacaagattaattaaaattcgaatgaaaaatttaaaaaatcaaaaattagaaaaaaaacgaaaaaaagagttcaagaaggaatacaatttaaaattaacttaaattcgaaattaaatataagcagtgttgaaaataatagtgcatataacaacctaatagtagattaattaaaattcgaaagaaaaaacaaaataaaatccgaaattaggcaaattaaaaagagagttaaagtagaaatacaattttgaaacaactgaaattgaaaataaaaaataaaaatatcaaaagaacacaatacgaaaaataaaataaattctaaaattaaaaaaagaaaaatacttggaataccatttataaataactaaaattggtgataaaaaatcaaaactattgaaagaaaataccatctaaaacacatggcgagattaattaagtaacatgcctataaagaagtagagtggtggcggttgatacgacatataaaaactgttaataaaacaccaaatagaatcctaataacgattgaaatgaaggacgacaggtaggccgtgaatcaatcgatcaaggcggtgccgggacttttaaaaagtaaaaaaaaaccaatgctaatcatattcgatttttaaaatctcaatgataataaaaaggagaagcagcgggcgggatgtataggaaagccgccgacggttggcgagacttttaaaaaataaaaaatgaattccaacgatagttatgttcgatttttagaatcccaatgacaataaagagtaggcggcggatgagccatagaggagtatagtgacatcgtttaatggaacttctaaaaattataaaaaatgaaaacaacaagactataaactctaaaaactatgaggtccaatttttaaaggtttggaacttctaaaaagtaaaaaaaacacaatgatagtcatgttcaattttaaaatctcaatgacgataaagaagggaggcagcgggcgtaccataaaggaaaacaatggcaaagccgctgacagttttggcgggacttctagaaaataaaaaatgaattccaacgatagttatgttcgatttttagaatcccaatgacaataaagagtaggcggcggatgagccgtagaggagtatagtgacatcgtttaacaggaattctaaaaattataaaaatgaaaccaacaagactataaactctaaaaactacgaggtccagtttttaaaggtttggaacttctaaaaagtaaaaaaaaaacacaatgataatcatgttcaattttaaaatctcaatgacgataaagaagggaggcagtgggtgtgccataaaggaaaacaatggcaaagccgctgacggtttagtgggactttagaaagtaaaaaatgaacccaaacgataattatgttcgatttttaaagtcccaatgacaatatagagaaaagacagttgacggcctgtagaggagtataataacagcgtttgacgggacttctagaaattataaaaactataagatctgatttttaaaggtttaaaggagaatgaatagaaataatggtagatcaagcaagcaaataaagaaggatatgacagaagtaaggggtaatagctggtttgacttttaaaaactatataattagaaatacggggatgataagatgtggtctttcaaagtcttaagacgacgagatagctatttaataaaatttaagtaaaatcatcctaaaaaatatatgattttatttaggtgcta

SEQ ID NO: 26569 - DNA, 1136 bp, Oryza sativa
tatgtcataagatccagtgagacagtgagcccggtacttcaatgaggtgttgaaagctttatgttgtcttgctaaagatatgatacaaattaggtcaatagagacccttcaaagatagttagtaatcctggtagattctacccatattttgaggtatctcacgtgaaatatacttattcaacattctaattaatgtaaccactttatgtttgtatagtaataatttcttctaacttaggattgcatcggggcattggatggcacacacatccctgcatttgtcccagagaatatagttaacaggtttagaggtcgcaagtcctatccaactcagaatgttcttgctgcggttgactttgatttgaggtttacctatgttcttgttggatgggagggttccgcacatgactcagtggttctcaaggctgctcttagaagatcaagtggaattcaaatacctgaaggtgtgcatgaagctttagtattttcaggtgcacaatattttgtgacaaggcaataaaaccattcatcttctgttgtaggcaaatactatttagctgatgcagggtatgcagcaagacctggtatactaccaccatttaggggtgttcgataccacctgaaagagtacgaaggcgggaaatcaccagaaacacctcaagaattattcaatcttcgacattcctcccttcgcacatctgttgagagagcatttggaaccttaaaaaaccgtttcaaagttcttgctagcaagcctttctttccatataaagtccaagtgaagatagtaatagcgtgttgtgtactgcataattggatccttgataatggtcctgataacatcatatatgatgaagctcgttggtatagtaagctacctagatcagctagagtagcgacagattatggcgaggagcaccaacagtggatagaatttcgagaaaatctagctaatattatgtgggaggaacattaacagtggtgttgtatggcatggatattgttctatgactgttagctatttctaatgaattcttctttcagctcttcatattatagcattttctactttatgtttttttgttggatgccattattacctactgtgcattgctttgtagttcataacatggata

SEQ ID NO: 26570 - DNA, 1526 bp, Oryza sativa
attatatttctatcatatgcttatggttctaaagcatctgggggtctggggttggaaattaataaatctaaggctggtatttcctttactattttgataacttatataattttcaggctgactcaaagttttgctttcaattaaatcactaatttccattcttctcctgccctttcttcagaacttatttttaaagggctcatgacagttattcccttagagtgcatattttcaatcacgtcatttacatttattttgtatttggaggcacttctattagttaatcttcctataaattctatgcttactagcaaatttgttcctttaaattcctcgtatccctttgtttgaaaaccaaaactcattttatctataaattcttttataggcatcattagatctggggctatatatgttatcaacatattctcattcatgtcaccttctaaaaatcctaatgctgctttatctattgtgtcccaccttttatctaacagagttattagaactttagctcctaatttctttcttgtcatacctttgattcctattatatacataccttggtgaatatatttataccctgaatactttaatccattttcaaattccttggctacaatttttagctcaactgcgctttgttaaaacgcttaactctacttctctagatattctgtataacccatttttattctcaaaaaatcccatgcaatatatttgttgaggtcttattgccctcagagtatctctttgatatctttcgagctgtttgtctacttctgcaatatcttcaagctcatctatgtcttcatttttacctttttgtttatcaatacaacttaaagatttatcgtctctgcttgctattcttctaaacaaactcctagataggtccatttttctgaattaatagcttgagatgaggtaattatgcctgttgaagccaaaactatctcttttcctttactagaatttattatttctaataattctttgatatagtcactgttttgtaatatcttattctgccttgtcttatattcctctagctcttttagcactgaatttaatttattactgacaagcaaatattgttcttcagattgctttcgttctttaaacaaatcttcaatccttcgctctaaatcttcctgctttttatcccaatttatataaaaattatatatcagatcaacaattaaatttaattgactattgttagagtgccaactatggtcttcaatgtgatttaacctacaccttatattcagattatctttggtagtaattacctttccaatattagcttctgaatttgatttctctatgatgactggctctgataccacacttatgcttcggacaaaaaacactgttcaaaaacactatttattcggctgaatactattcagtttactgtttattcggctgattactattcaaaaacactattcagtttactgtttaaattactgttcaatactgttcacttcgagagatattttaactttaggatctttgca

SEQ ID NO: 26571 - DNA, 5000 bp, Oryza sativa
atgggaaacttttcgtgggtctatctctcctataaatcctatacgacttttcccatgaagcattgaataaacaagaagtcccatataatttctgcattttgaaaatcctaaggatcaattaaatatgccaccttaagtttggattcatgtgttccgaaagagccctaaagagagagagtatacgagggcataatttaatttgcatgtatgcgttgaaatgtaatggattgagagacggctgtgttcggcagtaggagattgtgagagagtttgtttcgttttccgtatgtactcttcccgaactactaaacgatgtgttttttgcaaaaattttctatacaaaagttgtttttaaaaaatcatattaatctatttttaagtttaaaatagtttatactcaattaatctcaggtagccgagtggaggggcatctcatttcccaatgcgtagatagagaaatggcacgctcgtacgacaacattacctagaaatctgaataagattgtgctatactcatctcctggactggaatgacccgggtacaccattcaatttttcatcaattgctaatcgctatattcactagtactccctccgtccctaggatatgatataatgtttccattatcgagatatatatattatactgaaaaatatcatatattatcctagattagtttattagctctagtgtattggtaaaatttctatgcctagttcactgtacaagtcgatgtaaaattatataatttcttccgtcccaaaatataataacataatactacaaatctaaacaatgtccaaatttgtactattagcatgtgtctcatttagttctagactattatattattagacggagggagtagtcaagataattaattttgtactagaccataattaatcaaaaccttcagactattattatttgtaaaccagaggaaaaaataaacccatataggagtatatgaaaaagggatgtatatatacgtagaagtagttaattgaccatatatgcagctcgggtgtcattaacccttttctctgcatgcactgcatgcacacataaacaagttgatctcccatgtttcccttgacagctacgcggttcttcttagatccttgggtatatgaacgagaaatattattgacactaccaatgatcatgttgaaatgtgcgtttgcatctacacatgcataccaaattgccaaccaagtgaccaacattacactacatgcccctttcttatactctcttctagtaggggcagagcagggcatgcgtgcgtgttgtagactcgagcattgaaaaatggagtgatcacacagctggtagtggttgtagttgtagtagtagtgctactactagtactatagcgacacatgcaggtagatggggagaccaggagaagcacaagagggaatatacaagtgacgtgctgtctcgtgcacgccctaacagggtaggaacagcactgtctccccaaatcgggtttacgaggcactttttactctggtgatttgctctccctctcgtccgtatcaggcacctagggagagaatccctcccagatagtaacacggcccaacagtactagtagacgttgttttcttaatttaacatacattttttttctttgaaattaattagtaatccatgtgtttgtatacctctacggccagtttggttggaggaagtttttaggagggattgagagtttaaagggatgagactattaagtgttttgtttggtagggtgacataggaattttggtgggctggggatggggaattgaggaagaacttccctcattttcaatacttgggaagcgccaggtaattgtaagggaattcttcttttatttggtttaagcaaatttaacccacccattttaataaatgccttattttccaattaaattcccaaccaatttcaatcccttttaccaaccaaaaaattggaattaaaaatcaaattcccttttaaatcccatcaccaattccctggggtaaattcccaatccctttccatcgagataccaaacaagccactagcttattccatcgacatagatataagagcattaattcatgatatattaactccgttacagctatctagattcattgtactaatatctaatatgattatagatggctatattattatgtgatgaagggaatttacattacaaactagagttgtccataccatctaaaacaccactcaagaaaactgttcacttagtgcatatacatatatatatatatatggggtttatctcagactcaactaatcaatatcgttaccttaatccccatttcaatcgattcatgtctagacacaatatgtatgcatcaaatgctttttttatatattcttaaggttggattttatgtaggacataggttgtctctccccgtattaattgcagtgacaccttggattttatccaatcagacatgctatttataatatcatgaactctagtgatggtggagtacatagtacggtaggatcttacaatgttattcaaacatactgtataagttgatcgatctatatgaatactttctttattccaaaatataacaacttttaacttttagaatttattctaaaatataacaacttctccaccaatatgttttctcaaccaatcacaattctctaccattcaacatatcttcacttcttatccaatcataatcttgcccatttaattctacctattttcttaaaagttatgtctagtcctaaaagtccttatattttggaacgaagatagtacaatttacccagttgtgatatattttttctttgacgattaacattggaaagtgtaggaccttatgacaaacatgacgactctctttcagcgctctgtttgtgctctcatcaaaggcagagacaggggggcggcagggtccgcaagccccctccaggcctccaacaaattttctacatagaatcatctgacgaattatgtaattaagctacgtaatggagtattagaccccttcgtgactcttatacctctctcccaagtttaaattctggctccgccgagggctctctaaaacacatctgaatgggataaaagaaatttgggcaaaatgtatgcatgggatggatatatgcatgcatgtaatttggacaaaatgtcagcagaatggaagagctatagctaggcagatgagatgagagtaaatgcgcctttgggcaagagggtggtacagttactgccatactggtgacacgtacgtacgtactccacggaacacagcaaaatggatggatgggtgcatggcataaatgcaccccacattacttcctgtccccccctccaaaaccgagtagaggctggaggccggcagctcttgcattctaccctacccttgcattgccattgccattgccattgccattgcattgcattggcagtagtagtggttgcacagggtctcaactgtagtgacaagccaactgtaaactggagtaaaagcagcagctatacaatgcacacaatgcatggatggatgcatgcagatgcaggcaggaaggaagggggtgaaagctagtatgtagctatcctacactaggcctggctaggaaagctgacatgactactggagtaactgtgccagctcggaatgacccaaacagagaccatgcacaagctgcagctaccgcacgttaccgctagctccccggccggctacatgcagatcgatcagcatgctgaatgatgaatgaatgcacatgcatgaatttgttgagcactgttcgagctcgaaatcgcagtataggggaatggaaggagacagcactacagcagaggcattctaccatcagctgagaaaaattatgagagctcccattttgctacggactactctctcaatcccttgttccaaaatatatgcatttctagctagcggccttctttggaacaaagaaattttgctagtttttttctctaataaattgaactaattcgtacgaaaattaatcctgtaggtcattagcatccaccatccggttaccagagcacatatgttaattttggggtattgttcgattgatattgcttggagttagatgttggagaaagttttaaattgtactaccttcaacagcccggctaccacccggtagtttgacttaaccgtaccccggtcttgactactactaggatctgattgaactgaactagtatagtgcagcaagcaccacgtactccaaatgaacgtaacattgtgagcaagttctagtgttgaacccaataaaattaaagatgaaaaacaataacactgctagaaattagaaaatcatcagagcctaataatgtcataccagatggcccaaatgtattgtggcccatagaagttcttacctggacagaagcaggccagcctaatgggccacttgcagaaatgacctggatatcaggcattcgtgccaacccaagctgggagcggatggcgtcgtcagtcctcgcattattcatttatgatcaacgcaatagagcaaacactggccctgttgacaagtcacaaattccacattagtttgacaacagttcatgcactccaaataggaggactgaatgcccagttcaaattaatttcaagttttcaaggtgaaagcagaagatcagattaacaaaaaagtgaagaacacgcccgaaaaagtgaagaacacgttatgctggagtggaatgtactaatttaagtctacagtagcaaatctcgctacaaatcatgcactcgcacctcaggtttcatttatatagtgccagaaaaggatgaagctacaagtttccaactagttgtacaagcatacattgtgaggatgaataggatgccccatgtttcagacctcgcttgcctttgtacatgcactctataaggcagacctccgaaatcctgttacagcaagttcaaaattgttaggtctcaattgaacatgtaggcagaggagatgctagtgtgatat

SEQ ID NO: 26572 - DNA, 1303 bp, Oryza sativa
tcacaactgcattacaaaagggaagcggaagccaagacttgaaccaaacatcacaggcgcgacttgggaactaggccgaaaccctaaaactcatcgaagccggcttgctcctggaagaactcctcatcagcgggatccgcttcatcttcttcagcaacttgggggggttatttatatagagcaagggtgagtacgggagtactcagcaagccatgggaaataagtgtttaatgcatgcttcaaggaaaggctgttatttttgcaattgatttaattttgaactcctttattgaaacaactaagtgagtgcttctcaaacgacacggatgagacagtgcgtctcgtccggtcggagtatgtgcaatgtatcagtcttttgaattgttcaagattggcacccggccaacaacttttaaacggccacctgggcctagctgatcccatcagctacagattttccaaacatcgatccccttcccacaacagcaatttcacaaggcagtagtcaaacaaaactacgctaggaatcacctcacatccgcccatgaccgtgggcacggctgttcgaacagtttgttaacctctgcagagggggtacactttacccacacgacattactaacccggatcaccctgcccacggggatcagccacgtcgggagacctccaagctttcatgacaaggcatttccaaagccgacacaggtttaccatatgccgacgagaggggtcccagaccaacaacaggttaggtcccagaccatactgtgccaggaagcccaggggtcctccccgacaccaccccggcgaatccacatgtctctcggcatcaaggctcccctgataagctaattactcagccaggggtgtcccattccacccatgtggtcgtacttgtcttatgttcggatgaaattccaaggaaacggtccttaagtgcaagaacgggaaactgtacacccggtacgttccccggtccgcggttttggaaattcatttagttcgcgagcaccgacccaggtgtcgagttttccaagtcttttgtaaaacccaagttttacccaagaagttactcagattttaagtttgaaggcgaccgtcgatactcgcacagagtgcacgaatatcgaggcgcaactagatggttacaagggaacatggtataacaattaacaaaggaaggatcaaatgcgacaaattaggtaggtccgccaatctgccttcagacgggacaagcagactaagtgcgatcctatcaatgcataatatttttcaagcaacataattaagttcaaatataggc

SEQ ID NO: 26573 - DNA, 1157 bp, Oryza sativa
cgggcggctagggcgcggcccgagagaagaagcgcggctcggccgagctaatgggccggccggcccaagaggactcggcccagcagggcgcgcgggaggggaggagagagggagccggtggaccgggctcacctcgcgtggtcccgagtgggacccgcttgtcggtgacacggttcaccgtgtggagcgagcacgcggcgcgcgctagggttcggggagagagacgcggtgcacgcgcgcggttcgcggaggacgcggtgcggcgggcccacgtgcagcctcacggctcgcggtggaccgcgcgcgcgagggaggggaaacggagggagcggttggccgggtcagctgatccgggcgcggccgaggtggtgccgactggcgcctacgtggcagccacgcgggccggcgggaggttgaagaagacgccggccggaacggacggcggacggcggctacgaaaggcggggcgaaccacggcgatacaggcgaaagcgagcacaccgggtggttgttcgagacgaggggagacgagccaacggctcggattcaccggagggagctcgacggcagcgaattgcggcagcggcaaccggcggagagaaaaggggaaaacggcgacgaggtcacgaggggccgattcccggcggtgagagcatctacgcggctacgggaatccgttgctagcgccggattaggaggaaacgcatcgagggaggccggcgacgagaggcgcttccgagctcgggcggcgacagcggcgagcacacggcgagcgacggcagcagtcggggcggcgccggctagctacggggagggtactcgtgctactacccgagtctaaggggaggagatggatcgaggaggaagaacggagggaggcactaccgagcggacggggcgcagtgacgatgggccgacggcacgggagtgatctctccggccctcggctggggaagaggaagaagagggcgcgcccggagtccccttccgtgcccttgctcgtgccggctcctccgacacgcgcaacgacgaacggcgacggcgaacagagcacgggaggcggcgacaatggagtggaggcgatgggacaacgagaggagaagagagggagggcgcctgggctttataggatggcaatgtcggtttgggagagggga

SEQ ID NO: 26574 - DNA, 716 bp, Oryza sativa
gggtggattgtcatggaaaaaatatatagattttgatgaagctttaactcacgccagaaaaatattaggaataaactactacttggaaccagcagcaaaagaatatatacaaaaatgcaaaaaagccaaaaataagaaagctccagagaacccatattgttcaaatattaagaatgaaggatcatcccaaaaacctacgtataaggaatgcttgactaagggagtagatcctttggatggcgaatatatcgattggaaaataattgaaaaatttgaagaagcatccccccaaattaaaaaagaattgaaagaagaaatacttaaagaattaaagaaagaaatgaatgataaatttgaagaaatgaaaaaagcatatgatgaaaaatttgaagtctccttttctgatgtagatactatggatttaggtggtcatgggcagcctgaccaataaagcaatataatataaattgataataaatatccattctttgggcgaatgaccaaagtatgaattgaatttgaatcaatccaaaatgcaaggacagtgaatgacattgactgttaaaaatactgtggagaatattgctttcggcggaaaagaaaggcgcaggtacagaggtgtctccaccttggccaattcaaggacaaagtaagccaaaaagaagataagcatctccatggtgcgagccagctcgtgaaaatacagtatctagaag

SEQ ID NO: 26575 - DNA, 1953 bp, Oryza sativa
tattttgtgaagagaataatataccaattattatttttgaagtaagataatatatcaattttatagtctcttactctcttttgcctcatttatcatctaaatgtataagaacgcaaaatttctgttaaacatgcatgtaccaaccgtagactaaatatgatatacatagcagatgaagcaattcgattcggcagcatgcaaccttgtaaaattataatatgaaatataatcatgtttagtggatatatattaagatttgagatgaaagactgtagtatcccttgtgagtgggagggtggttgatgcgataagtagtactattttagtaatgcttataatgtgtataaattctgaatcctaaaaatgcttatatttgagctagctgtgcgattgtgcagcatgcaaacatgtactgttgtttaatttttgttccgtgcgcatgcactacatcggtcctagctacctcaaagtatgaaaactgaataggacataaattcaagcgtctgatctcagacataccaaatgaagcatccaaccgtatgttgcttacatactcctcgtttcaaaataactgacatagattaaagggtggttgggaagaaatttaaatgaggtgattgaagggaaaaatagtattctaggattgcttttttgagacaagatttaaatgttacaataattgttttgggacagagaggtagtccatgaatagatggccaagattttttttttctttttcctgatttaatctgagtatttctttctttttcgatcaatatgggaatttctagatttttttttccttcactagattaatgtgaggatttttaggagagccttagtatatataatgctattgaagagtccaatagttcctacattttcaaattagagttagtttggtcccataaaaacaaacgttgcatctattttcttattactaagcactgaaaagtgcaaattcttccttcaattcatatcaatgagttcattgaaaaccattcaagactcaagcatcaattgagatattaagttagtctagtataaatcaatgtgatcatctgcactgtaagtttgttaaccccaaaaatcaatgtaccttatccaaattactcatgttgtgtagattctacaggctgcactgaacttactggtttcgtagcggcccagagggtccatgttcctaaccaaaagagcaacaccataaagatacagtcagcgggtccagaagaatgtataatataaggtactagaggatttagttaatttacaaatgttaatttgcatgatacagacatacaccttagggcttaggccatcgatatcagtatgtagtatgctaatttacatacaacacagtagccccaatcatcttgcaggcacagacaacaccatcaaactccccccttatttattcacaatacagaaagacactagcagccccagtaaaacatcaagaatactacgctactctgtcgttttctgatctttgagacgacatgaggatcttggcctatgcagacggcgcaaatccatcattgaaaatgacctcacaggcacagatgatgttttaggatcacaggatcctaattgtagtgctggagcattataaaccgcagaattttcatcattagcaagcgacggaggagaatgaagctgctcagtgagctcggtttcttcgatgctgatactactgctgctcctggaactgctactagccaaggtcaccaaagagtttctgctcagactggcaagcctcttagggggtccagtttcataaacttctgctgctgtctcctgtgaagtttcatacatgatgctgtatgcaaggagattcttccgttttctcgaatatgcgctctctgccttcgcgatgtcctttgcagagccacaagatgaaacagcttccttgagacacgcgaaagattttgattttccattgtagaatttgga

SEQ ID NO: 26576 - DNA, 8974 bp, Oryza sativa
cgtgaagaccttgagcaaggcaagtcaccctttgatcaattgcccctataattgaaaagtcattattattttgtttgcaactttcattattagaatcacacttaacttgcttggcctcggtttgcgtgccaaaccgacggacctacccagtagtcgcactaatttccgtaggtcgtaataccctgattccttgtcgctccacccttgtggtacctcggtattcgtgctctttgagcgcgtataccaaatatctcacatacaccgttgtttgttgaaaacttggaaaatgggtttgtgaagccttcaaaacccgacatgtggtgtcggtgtgtttgaaaataaaatgaattgtgaaaactcgcgatgcgggggttgtgcctatgtggcactgtcccgtattcgcatataaggaccgattcctgtgggaaactcatcgaacataatcaaagtgcaaccacaaggtggaatgggacaccctggctaagtaactagtcggttcagggaaacctcgcatgccaatagttgggaacgccggggcggggtcggacaaaccgggttcctggtaaggcaaggacgagaagcttgctcacttaccgatcaaggtggttggagtttgatttgtgaacgcctaaaatggcctatgtttatgtgaggatttgatccttctatgtggcatgaggtaaccctgggtcagcttgggaaaggctttgttgcgaacctccgataccgacgggtgttcggaataagttcgtatcttgtgggtaaagtgtacccctctgcagaggttaactaactgttcgaacagccgtgcccacggtcatgggcggatgtgaggtggttcccgttgcgtagatttgtttgtctgtgctttgtgaaaagttgttgtggtgtgggaatcgtaaccagaatcagcctatgtggcagatggatgacctgagtggtcaagaaacgaatctgtgtgattcgggatgtctgcgggcatcatagactaggcttcctgagtggaagcggattgttgtgctgctaggcagctggactctgggagtccgagaaaatgaaaaaggctctgggagccgattaatcaagtggaatggctctgggagccgagaagtaatgatctgacccgggaggtcggtacattactaaatgagctgttgaaaaacatctcttaaagtcgaatcgagacgcaagtctctcttcggcccaaacttagaaagaaataaatcacttagtgatttcaaaatgtcttcaaataaaagatttgtaaaataaccttgcctctcttccaagcttgcattaaacacctaagttcccgtgacttgctgagtacgaaagtactcacccttgctctatataaatatatatatatagttcctccgccctgaagagaagataaagtaaagtgaagattagggtttcgtcctggtttccagccgtcgcctgtggtgttgggtgttagtccgttggttccgctgctgctgctgctgttggtgtttcctcgtccgcgtcgtcggttgtaatctcgggctgtctgagctgcaacctaagttaaggtaaataagtcctctatttagtttaaggattgctatgattcatatttgtcaccgtgggtaccagcactatgtcctgggactggtaccgtgatcgcggtttcgtaggaagcggttcgcgccgttttccctacgacacgctcctgtcaggtgccgttgtacggcggtatcagattggggtgtgacagtagcccgctactcttctttttcaatttttcatctcattaaaatatatttatatcttgctaatagtctgctatactgtacctgctctaagtagatgatgggtcatataatttaccctccttcacaaatgtgttatttgtgacaggtggtaagttaccacttgctattgatgactcattttgactggtcatatataacttatcatccgagtcactaatgacaagtcatgatttttaaatttggaatgaacaaaaaactataaagaatattttgaatttttctagttattgaaacatcactactcataaaaccacaatttttcattttttaaaattttataaaatgcacaaaaaactagaaagaatattttgagtctatataattatcctatacatgatcacacatcactacttgtaaatccataatttttttcaattttaaatgcatagaaaatgtaaaaatatattttaaattttactaaccatcctatatacatgatacataattttcagataatattcacatatattcggctatggagttcaagacataatatctccctctcttcacaaggcacgcccttaccaactcacctataaaactcacgttatcaactccttcatcattattcgttttactgttcttatatatccaaatcatgtttcacactccagatgacttcaaatgaaaaggtccttaactacaaagttaccgatcttatgtgttccgcgacttttgtataaggattttctctatcaaagatcgttcgaagaatttaaatttttattttttaaaatatatttttttaaagagtatgtaaacaatctgaaataaaaattaatattatcgcttttaacattatagacctagacattcttaacgagttggatcaacataatacgtttgagatactcatctcgtacagttaattataacattttggttgcttattacgacgagattgatggatgaagggatggatctaccatgaaggcaacgaggtctcgagtcttcggtattgacgcgagaatcacggaagcctccacgaagctctcactaaattttttttgatatatgtaaataggaagtggagggggggtgagggtagttttgtctaatttgtttggatgaacattggtacgaacggcacgtttcggcttccttgtctatatgtaaccgtatatatatatatatatatatatatatatatatatatatatatatatatatatatatatatatatatatatatatatgcatgcaccgtctttctggttgaatttataattttgtgctgtcttattaattacatggttaattacgtctacgtgcatgcatgtacgtgcaaacacggatgatggatatcgtacgccgacataacgtacgcaggttgaactcttgaccgaactcggtgattcggtgtgttattcacgaaaaagttcgctgcctctatatctatttatgtacctatgctaattataattggttatttaatttctcgaacgaactcgatcgatcggtgattcggtgttattcacgaaaaagttcgcggcctctatatctactatttatgtacctagatatactaattataattagttatttcaacttttcaagggagctgactaggggtgttgattagacgcatcataccgggtgttgattagacacatcataccagcgcggaggcgcggaaccatgtagggttttatcaccacttttccaagtcatctgtctcatttttcacgcgcccacttattaaattattaaatggtatatttttttaaaaaaattatacgaaatttgctttaaaaatcattataatccatttttaaataaaattaactaataattaattaattatgtattaatgcaccggatttgtcacaaaatttatgacgttttttttaaaaaaattaagacgtatgatgctgtgtcaagatttgtcctactacattttagttaaaaaatatattttaatatattaaaaagtactatgtaacgtcgtacattttagttaaatttcttgtaactatattataacctctatataataaaaagttgcatatatttgcgtatatataagttgtattatgttgtggtatagttatggtaaaaggtattataaatagtttttcgttaaaaagaaacttgtggcagttttttaatagccccctatatgaagagcctgtattagactgaaaaaaaactacgatgaactctttaattgtagtttttttttccaaatttgtaattaataaacatggatttattcccatattagatttctactactacaaaatcgattttcacggtcgaggcaccctataggttacaacctggatataaatgcttccacatgcaaaaatcgatcactcccccagggtcgattgaagagccacatgtaaaaataaattatcgcatgcatctttaaaattttccaagtcatcatacttatctcctcacctcctttccccctctaatttctactctccactctctcccttgcctccccctatcaatcggtgggcgagagcaaccagtgacagcgggctcgctcggcagcaacaccgacgcatgtgacgactgcagcgacggcgggtagcaaatgagggtggccgattcggcggcgtggtccttggggaggggcggatatccaccgcccttggcattatgaggggcgacggcagagctcgagggcggtggtttaggtggcaccgtccttgggaggggtggatccgccgtcctcggtctcaggaggggcgatgccgacggtgaactcgagggaggaagctagggtttcgaccaaatttgttttatttttatttttatttttttcttgaaattatttttgcatatggttggcataggggactgcaccagccacatgaaaaaatgtggactttcgcacacacctgagtgtaggcgggccacctaatcgcttgcgaaaatcgatttcgatcgcatgcaaaaatcgattttgtagtagtgttttagtttaccaattttgaatatattccaaaattcgaaattgatactgattagcaaattgcaagtgacgtggactgtgctttaaatctaaatatctaatcccctataatttagaaataaatttagaattaataaatatggaaatgtagctatcttggatttattttatcaacttaattctaaattcgaacttaacaggtagtaagttataattgacgtggagtcttctgtttagtcgctataatttcaaatatataccctacaattttttttagacagagaagtcgaagcctccatcatttcacaacgaaaaacaacagaaagccgtcatgttatttagagtaaaaaaaagatagtacttcctccgtcccaaattataggacgtctcctttgtaagaaaaattaaattcgatagcttttgactaataatcataataactatatttatactaagtattacttatgtatgttattatattactagatttatattttaaaatactttcatgtgatgctaatttcatatttattgggattatagaataaaataaaatactggtctaaatatattattgaaaattatgtgagaaaatatatatcttttaatttgggatagacgtagtatatctgtaataacagcacgcgtaacgttcgggttggcaactggagtatagctaatatgtgatcgtcgagccgtgtcatgtcaactgtctcaggttagtgataaaatatttttctccgcgaattccttctgccgctggcttggctagccctgtagctacgcgtccacctgagactggcacctcaggttagtgattaaccaactgtacacgtagctatctgcgcgaatgttagtctgcataatcatgtggttaaaactggaaccactagtactactgtagtaaaccctgtgcccatcggggtgcaaatgtcatatacgtgggtacttatggaccaaatgatagtggcacatcgtgtcatcattcatatcacgctctcaaagatctctaagggtgtatgtgagggagagaggattgggaagatacgtaaaatgaggtaagtcattagctcatgattaattgagtattaactattttaaactttaaaaatggattaacatgatttttttaaagcaacttttgtatagaaaatttttacaaaaaaacgtaccgtttaatagtttgaaaaatgttcgtgcggaaaacgagtgacaatctcccctatctccaatatctccaatgaacgaacgcagcctaaaataagttgcggtcgccgcccttttcaatgcccttctgatcgatcttccagcgaaatgcggtgaggttgatttcactggttgcatactagtacgacaaattaaattaaagctcgcgccccccactactgctatgcagtatacagcgacgacgaatttaatcaaatctgtcaaagcgagcagacctaaccggtttcatgatatttgttcacacctaacttcgcgtggagtgcatgcgcacgcgccggcgaagtggcgaatccatttcaggtccagtcctgcgctcaggaggggcttctgagttctgatgaagtctagggctttttggcaggatgcaaatcctccagtgttctgtacctgtagtagtgtcactgatgtgggtcccacctgctccgggcccatatgacagtgacacatactgcaatatacagtactcatttggatcccctgctcatttggcatcggttttcagctcaaataaagcgctgggtgtttattcagcttagccaaagtactgatcagctctaatgctaatgggtaagcgtttaattggactcggatggggacgacatcgacaacggaacggtacgaagacgatgttattgtccttaagcgaagccgcgatgataccatcaccataggcacagtacgaacactacggagtacttcctccgttttacaatgtaaaacattctaatatttttcatattcataatgatgttaatgaatctagatagatatatatatgtttagatttattaacatcaatatgaatgtgaaaaatactagaataatataataacttacattctaaaacggagggagtattaattttgaagcagatctcagtcgtccaaaagcttctccacacaacgcgcgaagccaccgtttcccccgaaaaacattgaagaaatcaaacggttggtaaaaaaaacatgtgaatatattgcattatactcgattcacatactaaaagccaggattatttgaccgctccttccggcctcatcgcacgagagcgcaactaatcccttgaggaaaccaggaaaaccctaaatgattggttaatactccctccgttctgtaatataagagattttaacattttgtttgcattgtttgatcgttcatcttattaaaataatttagaattattatttatttttttacttactttattatccaaagtactttaagcacaattttttgtttttttatatttgcacaaattttgtgaataagacaggtggtcaaacaatgcaagtaaaatattaaaatctcttatattacaggatagagggagtagaaaattactggtaggattcattgctttatgttcgatccacactctcagctagctcgtctacaatatgagcccattgcaatgcaccagcatattcctagtaattgagaaaatttaagtactattaaccatcaagatttgttcacatacatcgtaccgccatgttgaattatagacatcttttttttttttgaagtcgactttatagacatcttacgggagggttaggttacccatcgagagaaggatggtgaagtgaaattggcagatctggacctgaacaaacagtaaaatgagtttgttattatttgatatacgaaacaatactagacaatttagctgtaatatctacttcatatgtcttaagatataaacatgtgaagttgggtgagtaaggactaaatgaatttcattattaaaaaatacgggatatatagttgcgattggttgagatgagtagcatatggttaattatattttggataaaatttagacgttgaaaaaaataactatattttggaaaagaggagagaactagtagtttgctacgtgcctcaagaacattgagtaatttattgtagcgctttcgtccggacggccggtccatgtcaaattaaatggtaaactctctgcgcgtacaattccgtacgttcagccctgccgtaactagtactagcaacggaagagggtccaatccttagaaagggagtcactagaggagccggcatgttatattgtagaagtttccacgaagtggattatacgtgcggattatattgctgagggttttccatcatcaaaaaaattattacggaggtttcgaaaaggggattttgatggaaatcatagcagattatattgcagaggttaattttcacgaggatccaatattctctatattcattttggacaataagaggaaaaataatgatggctgatatatctgtagaaagaaaacaataggagggcgaatattccatataagtgtggggcaatgtgtatttttaccctttttgtattttagactacccactctctttgcaagtagatcaatagtcccagttacatccgtgccctcatgttgacgatctcccttatttacgtccagcccacattgttaatgaaaaaaaatgttggatgtggttagaaaaaccactaggatggtctaaattaagtaggtaaaaataattggtccaaagttttttttaaaaagttagataaatagtgatcgaaagtaaaacttatatagataataaaaggtggtccaatctagatactacagtccatttatgttttaaaacggaagaaatactattggacgacaagtccaccaccacagtcaacgtgcccactccggaggcaaggaagcacggtatatctatacacagtacgctatcctagttcaataatcaagtctgttatagctcctgctagctatatagtatgtgacaaccactctactgtaatgatgaactaatgatctagctctagtaatttttatatgtaaaagaactagaaccataaggcatgagaacttgtggttatctgtggatacatgagctagagcagatacaatagtaagttataagacaactataaacatatttaaaaagataaagaaagagagaagagcagtgagctacagatctgtagccagctacagcacggactccaagacgtaatgtgtat

SEQ ID NO: 26577 - DNA, 9588 bp, Oryza sativa
cccactattagctccaattcatccatagccaattctaatagctaattcatataatagttgccttactatactattaatatatggtcccacctgtcatacacatagtgtgtcttggagtccgtgctgcagctggctgtagatctatagtccgctgctcttctctcttatcgtttatcatattttcattaaaatatgtttatagctggctaatagtctgctattgtacctgctccaaaccagtacgagtagtttaattatagtgctccgcgccgtggcccagttaatcagagggtcgtagcatatatagcagcgcagtaaatgaacgatcgagccgtcgtccaccgccgacaacgtggtcgctcgcaaggccgtgaaggggacggcggcgaggcctcgcgccacggcgcccagccacacatacccccgtgcgcccacgtgcccccgtctccaaccgcaagtccacactcccctccctagctagctcgctcgctcgctagctacacgtacaccacgccgcccgtgctacttagctagccagccagccagcccgtcctcctcctcctcctcctcctatattacggcgccgtgcaggccgtcgtgggcgtggcgcagcctctccatactggagtactactagccaacgactgcgcgcttggacgcacgtacataggcacgcgtgcgcgaggagctagccagtgcatgcgtagccggacactacagggcgcacttcgaacgcgccggctgggagctgatcgatcgagtgagctgagtggccaacgcagctagctagctaggcacgtatacgccgtcgtccactcgggcccggcgccgcgcgcgcgcgagagcgagaacgagggtatagatatcgagagggatggggagggcgccgtgctgcgagaaggttgggctgaagcgcgggaggtggacgacggaggaggacgagaagctcgccggctacattgccaagcacggcgagggatcctggcgctcgctgcccaagaatgcaggtgcgtgatctacgcccgcccgccaccgccggaagtccggaactagctaatttcatcacacacatgatctgcactgcgtatcgatctttattacagtatatcgtcctttattcattccctgctgctggtcatcacaaagtctgcggttgattaaacagcttgctaattaaagccctaaatctagcaaaaataataaaaaaaagcgcactcttgcttcccagctataggagaactagtactatagccatagctactaacaagctccgactgtcacttgacgcgttggtttgattcatcgtgtcgtgccgtccggacatatgcagggctgttgcggtgcggaaagagctgcaggctgcggtggatcaactacctgagagccggcgtgaagcgggggaacatctccaatcaggaagaggacgtcatcatcaagctccacgctaccctcgggaacaggtacactgatcgatccatccctctccttcctttccttctctgcttttcttttccctttgtttctctcgatcctctccgacctgttctgcagcggcatgccaatatcagtgtggagtgcctgagaagcgtccgaccgagatcaagtaaaggcgatgtactattcctacactgatcatagtacacacgcactatactcctacagaaatcactcccacgtactttcaacgtaattaaaagaaatgggttccactgacagcataggctagctgtacgttacactaatagtgcaaactcaagcgtacgacgggctactattttagttgtcacgtacgtgtgccctctagagacatgagaccgcgcggtagctagttttaacaataacttccaacgaagacatcgcatttgacaagcctataaaagctttgtcgttaattaactatccttattttactcctatatgagcactttaagagttctgtctccgtcagtccttcggttgagagttgagacattactgtcaccacatataggcacatacagtaacagtattcagtagtgtgcatgtgttggctactctactgagcccctgtgtgcagagcagttgtatacagtagacaccagtagtagtagtaaaagatactggaaaaatatacatactccagctgcatatgcacgcgtgcatggtcccgaatcccttttagggcctgtttggcacaactccagctccagctccacccctcctggagctggagctcagccaaacagtttcagcttcaccagaaatgggagtagagctgggtggagctctctcacaaaatgaactagagttgtggagctgggtttatgcagcttcataactacactccagacccaactcctgtagttaaatttagaagttgaagctgtaccaaacagttcttaacttcgaggtagtctcagctatttttatactggtacctgcaatgcatgccttggcttacgtgtttatacgccatgaaagtgcacacagtttttgccggtcaattaattaatcaatttggtcactgtcacatgtgtcacccaagcgtgtggcggaagagcccggcgcgtctacagtttatgcatgcagttaatttctacgagcagtagctaggcaggatagcaacacgtcgagtgttacacacattccacgcttaaccctaagtagtgtggtcgtcttgtagagtttactagtaattaattacgagttctttcgtaaaacgatatacagttggtccaaaaatattttcatggcttatttatatttgcaccagtttgatataccctaagtattatttgtgttgtagtagcctctttaaatattagtagtgaaagcaagataattaagttttcactatatgattttcaaattaacttcactaatttttgagaaaatattataccatgacacttacaagaagcttaaggacctgtcctttctacagtactacttcgtacgtctataggttgtgtttagttcacactgaagtttgaaagtttggttgaaattggtacgatgtgatagaaaaattctgtgtatgaaagatttgatgtgatggaaagttagaagtttgaaaaaaaactttgaaactaaatagggccatagttatgtgacatgagttgttcaaataatggtgttttcgccagcaagtagtaataactaagtatatgttagaaaatgacctattttatacatgtatcaatttgcaacttgctataagagttcactattattcgggaccaacccaatcgcaagtgcatgtaggacaagttaaatccaaatcgacctaccttctaaagattcttagctaaatggctgtgcatcagatcatacaactataggattgcattatatatatgcccccacacagacgccagtagtagtctcctctattctctactcccataatataattcccatgaccagattgtccgctttatttttcttctatcaaaaggagatgaagcacgaggaaaatccttggtttggatgctttcccgtgataaaagatcgaagtactgctatccgtagaagtcgcgcgtacatctaatagtgaactagtgataagttgtcctttcttaataacatatatactacttcctctgtttcacaatataaaactttctaacattgtctatattcatttagatattaatgaatctaaacatgtatatatgtatgtctaaatttattaacatctatatgtatgtggataatattagaaagtcttatattgtgaatagtaaactagctaccgccttgattttgtcacgtcattcggagcgagctagtagctagttcctgcaggtaagctagcttattgctgtacagtactgaataaagaaaacaatacaggagtttctcatgacttgacaaacgaactatccaatttaattgcaacagtgaaatatggtacgtgtagtactaacatacttcctctatcccataaaaattaaatcctagactatgtctagattagatttgtttttttcaagtggggaagtactttatgtgtaacggattaactgctcattaacagtagacgattccacacatgtccgcaagttgatctgaacaagtctgccgcgagcgtcggtgcggggggtggagggatccaacgtacgacaaatgcaatcgataatccaaactcacatgtactgtagtactacgtatcgtgacaagtgtacgtttccccctcatgacgagacacgccctagctagctagcgagctaaccggccctttaatttactccctccgtcaaaaaaaaaattaaatcgtggatttccgtgtcaatgtttgaccgtctgtcttatttgaaaaaattataaaaaaaattaaaaagataagtcacgcataaagtattaatcatgttttatcatctaacaacaataaaaatactaattatgaaaaattttcatataagacggacagtcaaacgttagcacggaaacccacggtttgccttttttttgggacggaggttgtatgtagtaactagtacttcctccgttttatagtgtaagactttatagtattgctcacattcatttatatgttaatgaatatagacatatgtatgtgtttagatttattaatatttatatgtatgtggataatactagaaagtcttacgttgtgaaacggatggactacgtgtgtttgggcgcacgtgactactgcttccaacaaaacacacacgtacggtaaagccatgcataagagttttggtcttttggactatatatgtatatggcctgggccttccacgtctcgttgcgcacacacggccggccgtttgtgggacaaatattgttgtgcatgcgcgtgcttcgcgtggcttacgacgagcatgcggccgttgcctgccgctcgcgtacaggagctgtactatactactgtaaacatatgtaaagtttctaatagaatatataccaacacgtacatgagtagttgatccgagcatttatttgctgcacatactgtgcatgcggttgctagtataatcaattttccgtttgttttttgagggccggactcgcggcatgggtggggagtgtgcatgttgttggcgtctacctcggccatgtcacgttgtggctaaaacgaacgcagagatgcaatgcgtatgtgccgtgcatgcgtacttccgcggacagggcgtacgtacgtgtagcatcaaaaagctagctatcggagccatggctaagattaattagccccggttgatctgtcaagggtacacataaatggcaggaaaacgatcgctgggccgtcaggcttaactgctgacacatgacccgtctcggcagccatgtcacgctaccctcgcgaggtttttgcactttggacgcgcttttttttttccaagtgtatatttctccttcctctttaaagggggcatgtccctctcacgcagatcatcatcgcgctaatggcgccccctttttaattggctaatcatgtacatctggctcacctgccgctgtccgtgggcccctccaggattaattgcgggtcccacgtagacctcatgacttttaacttgacaaatcagaaatgcagattttgttgggagagccgagagcgaacgaaaccggccagcccgtgaggtcccccgggccggcctttgcacctgcctgcctgcgggcctcgcttaatttctctactgaactttccgttgctttccgcgctccgcaatcatacgaaccaggtcgccccacggcgtatcgcccgtcctggtgtccatgtacgggtcgctgcgcagttaagcggcgcgccactaccaacagtatccccacacaaactttattacgaagagcctagtagcaatggcatcgccgtcacgtgtagacgtgcagtaaatgcgaatactagtgtttctactcctatttgctgtgatgaatgatcatggatcgcgtgatacttagatcgaaacagctaaccgtgaaaaatctggtttgtctgcctgcttgcacaggtggtccctgatcgcgagccacctcccggggaggacggacaacgagatcaagaactactggaactcgcacctgagcaggcagatccacacgtaccggaggacgtacaccgcccccagcgaggccgccgtgaccatcgacgtgaccaagctccaggccgccgggaagcgccgcggcggccggaccgccgggcagtcgcggaagggcgacaagaagcgcgcggaggacgacccgcccaaggagaccgccgccgccgacacgccgttgccggagtcgagcccgcggcgcgcgcagagcgacgaggcgcggagcggcagcgtggtggtcgacccggaggagccgagcagccagcccaacaacggcagcagcggcggcggcggcggcacgccggacgggccgtgcagcgaggagacagccactgggccgacgtcgctggacccgatggagatgggcctctgggaggttgagagcgagttcgccgagatggaggcccttctgtgcggcggtgtggcgcccgacggccccgggataccggggctcgagccgctggacgtcgcggcccaggcggacgacctgctcgacatggactgggacggcttcgcggccgacctgtggggcgatccggcccagaggggcggccttgtccaagacgcgggcgagccaaacggctcgatgggctgcagctcggacgagctcgagtcgttcgcgagctggctcctctcggactcctgctgaattgaacctaaccgtgaccagcacagcagggttggcgtcgtggacttgtacaaattttgctagctttttagttctagtttgtttcgtagttgtgggctttcctctctcggtctctcgtgcaatggagagtcatttgcctcacacggcatgtaggctgtagtgaaaatcggcacttcggcaggtttcacgcgctgctgctgtggagtgtagagtggaggacacctttgaacttgtttgcaccgttttgtgaactgaactgaactttcgtgttgggctgttctagtttgtcgcacttggttctgtgatatctttgtgttttgtgtttgcttggttaagaggtagatgaagtcatagaaccgtggaaataacttgtaataaaccaatcatacaatccaattcacctatctacactatcctcacgctgcaagagaaatagagaacagaacacctgttgtgatactatatagtggtgtggtatttacccaatatatcagaatctacgactccatgtgatgtgacacaagtgtaggatcgaatcacaaaaactaagccaatcagaggggggtgaatggttggtatatccaaaaaccgaaaacttttagcggaaataaaagttaccctcgaattcgacggatcgcggtctgaccgaagtgtatgcgccggtctgaccgcctgatgaacgtcggtctgaccgatgtagatcgatcggtttgaccgtcgagatcagctgccgctcgctgtcgtcaccgccggtttgaccgccgtcagaccgcttgccgccggtcggactgccggtatatcgccggttggaccgccgaaactcggtgaaacacaaatcgaagaactcttaaagtggatgacaactttattgattctctctgtgtttacaaagtgcaccaacagcacttcttacaaaatttcgactaaactcgaaaccctaactcaaaactcaactcaattgctctgaaaagcgatatcgggaagcctcatgctcctcctctatttatacttgaggtaggcagcctaaagccacgaaccaaactcatatttatacttgaggtaggcacactacaaaaattcaccttgcttctacaaaaatccaaaaattttcacattacttctcctccttttgacaatgatttcatcaaacataggaattatgttcattaatatataagagcttagcatacatatagtatatcaggtcatgtgttgcaataaaaagaagataaacccatgtataatataacaagcatgcattaaagtataaccatgaaccaaagattttacaattaagcttgaatcaacaatcaaaattcatgatttcatacgatttataaagcaacatcttaacaagcatataggttgaaaataaacactaaacacatatacctattgcatttatcactctttctcaaataaactttagcacaaaataaccaagaaatttttttataacttttctttttctagagcctttttgctcatatttttctcttttattccgggtacgtccctgtcgtcaagactgtttccatgaattcggcacccattattttgctcatatcgaatacgtccttgtcgtcaagactgtttccaaggattcggtatttattttcttatattttttattctctttttcacaatgagcaattaaagctatttgaggaataacaattcaataaagcatatacatagagcatttacaaatcaaaccacatgctagcatcaacattgcatatttgcttaattcaagtatagaatttaagtgtcatgcatcatctcccttaaaagcaaaatctaaatatcatgaaaagactagaatacatacaaactatgctagagacaaataaaccttcaaagtattgctagcatgcacaagaaaataccatatgcataaacaaagctctcttttatcaatttttctcattgtcatattattgctcgataaaaccatgaggtacaaactccccctcaaaccatgccaaaaggatgaattatgcccaattcaccacgaagaaaagcaaagcgattagaatccaaaggtttagtgaaaatatcagcaattcgcaactttgtgtccaaaagctgcaattcaacatctcccttctcaacatgatcccttaaaaagtgaaaacgaatatcaatgtgctttgtgcgtgagtgttgaacatgattcttagcaatgttaatagcactagtattatcacaaaagagaggtactttctcaaaagtaagaccataatctttcaaagtagataaaagccaaagaatctgtgaacaacaactagcagcagcaacatattcagattcagaagttgattgagcaacactagattgtttcctagacgaccatgcaatcaatgatgtaccaagaaaatgacatgttccactagtacttttcatatcaattctacaacctccaaaatcagcattggaatatccacttaagcatacagaagatgaagtagaataccaaattccaaacccaagtgtatgattcaaataccttattattcgcttgaccacttgacgatgtgaagcacaaggagaagcttgaaaacgtgcacacaaacacacaacaaattgtatgtctggcctagaagcagttagatacaacaaagatccaatcatacttctatattccttttcatcaacagcttcaccatcttcatcaggatccaacacaactgtagaaccaattggtgttgaaattggcttgcaattctctatcttgaaccctctcaaaagatccttcgtatacttcgtttgatgcacaaaagtacctgaggtgtttgcttaatttgcaatcccaaaaagtacgataactcacccatcatgctcatctcaaattccttgcgcatagtctcagcaaaatctacaaccaaagcgtgagtc

SEQ ID NO: 26578 - DNA, 841 bp, Oryza sativa
acctttcccaatggaaaattttttgcaaccaaaaagtttttaaccctatcaaaccaagccataggagcttgtttcaaaccatacaaagctttaaacaatttaaaaacatggttggaaaaatcaggattttgaaaacctggtggttgtttgacataaacttcctcctatataaaaccatttagaaaagcacttttcacatccatttgatacaatttaaaaccttttgaagcagcaaaagccaacaaaaatctaattgcttcaattctagcaatatgagcaaaagtttcatcaaaatccaaccctcaacttgagtaaaaccttgagcaacaagtctagctttatttctcacaatcaaaccatcctcattttgtttatttttgaaaacccacttggttccaataatattatgtctagaaggtggttcaactaaagtccaaactttgtttctctcaaaattttcaagttcttcatgcatggcgttaatccacgattcatcagttaatgcatgtgacacatctttgggttcaaaagaagcaacaaatgcagaatttgcacaaacatcatgagtcgttaccttagaccttgtagtccgctcacctatattaccaataatttgttccggcggatgtcgtcgttgaatgtgcaaaggagcagcgacttctgaagttgatccacgttctgtatcagtactggtcgaagtagtaatctctggaggaccatctcgaacagcatcaacagaaccctcagccgacgaccctggccggtctgaccgcacctcctgtgccggtctgaccggaggtgtgccggcggtctgaccggccgagccgacctcatcgccgtc

SEQ ID NO: 26579 - DNA, 32097 bp, Oryza sativa
tttacagactgatcataagcagtccaggaattacgccaaagacggacgaagatgaacataggagttacaatgtcaaatgtatgtggttatacatcttgaagtaaaatatgtcaatctggtaaagaaaatattgagttttgaagctgccgcctaaggcaacataatcatcacttttttatatagattataaagatggtgagcaattagaatcttaatatcattataattatatatgcggtggcagcttacatctagaattataacattttctttcccaactctatcgaaattaaaagatatgagccaagagcagcctgccgcaaaggataaaaccaccacctttaagagatgatcgaataccacatcacaataaaaaatcatacaaatgagacaaatagggcaattcaattagaaaaaaaaatattcatgggcgaaagagcgtgtcaacagaatgaatggccttcctaaaacctgatttccccaatggcacaatctatacattctaagctatccaaattatcttggccgttgtgtgatcttttaggtcgcctttacgactgaacaaatggcagtaacagcagatataaatgcctagtctaaaacagaaaaactttacaaaagcatgccgtttatgtcatcgatcacattgctgacagataagcagcatgatgaacagctattttcaacaagaataattgcccggagaatgacagcaattgctaggaggacatgaagggatgacaaccagcgtccccttgtctcgatttccataagcctctcatcgatgggcacattttactcccctgaatatgtttgtgggtttcttctgaaacaagcaaggacatgttagagcctatgaaacaccagaaaaataaagtaaattcctaaacagtgtgaactatactttcacttcgctacattggcatgcgtagcaaaattcaccattctttttgtatagtgaagtataaagaaatgacttaactagcaatttacctagcaagtacttgtactctgcatacatatttgcttgacaagttgctgttgctctagacaccttcagttccttggaagttgtttccatctacaaaattactgtgagcctgagtaaaagaaaaaccattgctgcggtttggaatgccatcaagcagagtttgtggactgttggctactggcggagcatgaaagttcatgtggtttggttcaactcttggtacagaactaccatgctctgaggcattatggcacaagtccggtctaatagtcgggcttggtctagatagcaacatgaaaaaacgttcataaatttgacgtctttcagaaagagctgcatgccttccaaaggaagtctctgaagtgttggcttctgacataacatggaagttctggcttggttcactttgtggtacagacccagtgttgtgtaaagtgtcagattctaatggtgcgcaaaagttcatgtggtctggttcagtgcttggtacaaaaccactctgatgcacaccattatgatgcataactggcccaagtgttgtccttggtctagaaagcaaactgcgtatccagtcatgcatttgacgtcttctaaaattcgttgcgtttgtctgccttccagatggagttgatgctcctgcagtagaagcttgagactcaacagaatgatttcccctaggaatctctcttggagatacatttagatcaatcccttgcctttcaaaagtgccaattggtgaaattgcaccaaacatcccagaattgccattcacatgattatggtatgaatgtgcttcgccatcgagtctacaacctccacagtaccaatttccttcaggtacttctcttcccaaaccaacacagtaagtatgtgctgaggagtcacaaatatcgcatagtaacatgagactgtcatcaccaccttgattgcactctatgcacacaacattctcgtatggatctagccaacgtcttatttcctcttccgtaggctgataaacctgtgcaaaaatcaagagacagcatatgatgtccaagaacataatcaaaccagggaattaatgtggtttacattgaacactccaacaacgccaactgtgcaggatgttacatgttcagatgttccaagattataatattattgcactgtacataacaaactcttatataaaacactagatctctggcattttagaaatcaacaaacaaaaataaaccaaacatgaagtttgccctttccctccatttttggaacaaaagaaggcgttgtcaagagcctccccatcatctggccacaagttggacctcagatatcctatgccatctcatccatcaaatagctttctatacttgatcgtaagagcaataaagatttgtctttatattgacagcatagtatgatgatggaaaatctccaccagattagcaagaataacttttctctgcaaagaccattaagacggggaaggctttgcaaactgtatatagctgaagtaccaggaaagctaatgcaaaaaataacattgcctatgatttgtaaatggtaaatgaaaaatagttccgaaaattagttctccaaataacatttgtcccctaaggcaactagttctaacatggaaatgaacaaacgcagtaacagtgagaagtcacataaaaataatgaaaggataagagtatttataagaataaatgaaacgtgtacagcagaatgacagtaaacatattcatgaatattattttgaatagactgcccatataaatcagaaatgaagttaacaaatttagctgtcggatttgatattatatgacaaccgcagcaaggaaaggttacctgatcacgttcttcaaccctaattacagaatttgtcagttccaaaccagtatcctcctttgacgactttgtgattgttgtgaaccgccgtttacacaacggacaccttgactcaaccttagaccattgcatgatgcatgcaaagcaaaaatagtgtgaacagcaatccagcacaccctgcacagtcactctctgttcttcagaaaggcaaatcccgcacgttgcccttccagcctcctgtggttcctttttctccttccccttgtgctccccattacctgtaacagaaatcttcctgggtgatgaaggcagcactttcagagactctggaggctcagactccttcaaattccccaattccttatctgatacaacgaattcagaatctgaggatgaatctgacacaaatacccttttcttcctccccttcttaataaccctagtaggctcagcaatggctgcttcctcatcggatgttacaaattcgaagtctgtcgtgtctgaatcaatagtaggccatatctcagcctcaaaaactggtgtcggaggatcaacctccatctgcttcctaattctagcctttttccttggttgccaatcagccataacctcgtcctccacaatgaagtcgtcatcctcataacgatcaagcattgaacgttttttctgcctccgtcttatagacgcagcgttccttgccttgactgaacccaccttccgactggccaccttagagctgctcttcatcttccctcgtcgctgattcaaagtagactttcgccgccccatattcttaaccctcaccttagtcgcttccaattcatcatcttcctcatcctcaaaatcttcttcctcctcgtcctccacttcaggatcgaaatcaacatcctcctcctcttcctcctcatccatgtcagggtcaaagtccatgtcctcctcatacctccggcgatttgatcgctccagaggaagcttcccctccacgttgcggccaccacgtttcttcatgcgcttggatcgtggcgcctcatcgtcctcctcttcctcctcctcaagatcctcttcctcctcctcaagatcctcgccgtactcgtcgacccgatcgtcttcttcttccgagtagtcatcgtcatcctcgtacttacgtcgacgagatcgcgcaacgggtgggtctgccttccccttccgcccattctcgcggctcttgacaggctgcctcggccgcggggtctcatcctcctcttcgtcctcatcaccctcttcgtattcctcgtctgtgccctctcctccctcgccggcgctcgaggcagacagatcctcgtcgcactcttcctcctcatcctcctccaccacatactcctcgtcgtcgtcgtcgcctccgtcctcgcccggcctcctccgccgccgcccgccgctctcccccacgggaaccgccccttcccctcccttccccatccctacacaccaagaggaagaaaaaaaacaacgaatcagaaccagatcgccggatccctccgcccaaatcacacgccgaaacaagcacacacccacctctccgatcgcaccagccgcgcgagaaaaccagcaccgcccagcgacggcctcgcaccaccaccaccaccaccacccactaatccaataccagctccagagcttatctggtggtttccctttccagcgcctagtggttaccccgtgggtttgaatcggtttaatatatacgaccacgcgcaggtcagagaaggcggcggcgaggagctcggctcgaaaacggaaaggggggcgagcgtgcgcgcgccgggacggggacgggggaacgcggaggctacgaggggacggaggggggaagcatcggatcggagtacggcgaggtgcgggcgctttatcctcgcttgcaacctctctctcctcgcacgggacgcgttggtaggggtggctggctggcttggccgggctggtggcttcctcctggctccggctccctagctactagtggttggttggcccgttgctggagttggactagtcgcccccgccccgctcgccgcggtatcgatggcgaacgtacacacgctgcagcccggttttctcacgtgctgctatgcctgtgcagctgtgcggatgattggtgtttcgggcggggcgtgtttttccatcggttttttggtgggtttcggccgtgtgcccgcgcgcgcgctgggtgcgccagcggtggggggcagtgtcgtgccgtgccgtgccggtggtggtggagactgacgtgtacgtgactcgtcggggagccggaaaaggagacgcgcggattgcttcgtttcggagcgcatcggccggccctcgttttttctcccttcccttgctggaatctgacggcatcgccttgtgcccgacccgagtactcgcagagttgcagtagctttacctgctccatggacagggcaggactcgagcctgcaggctgcagcactagtaggaatcagatgattggtcgccttggcaggtattgctattaaaacagaaatctgttttcatgtcgtggtctgggtgcaaaagattaatgagagtttcttccatctaggttagagacaactatggcatttcgtgatttcagtgaaggggcacaccaaggggaatcacagcagctatgatttgccaaaatcatgccgtctcaaactgtcaaacagcgcccaaaaggcaattcatcacgacccagaataatttctttcctaccagtcaaattataagcaggcattagaaatcgagttttttcagcaggcattgaacaaatcaaattcgacagaaatagaagtaacttgctgcatcgaatcataggatacatttttatgtcaactgctaataggttaataataccatcctgctgtttcaatcctaatattaatagctatattgtggcttcttctcttttctttgagcaattgaagaaatgattaaatgaatttaaattacagcacctactcagcctgtcagccgttgctgaatgccagaacagcgagtaattaaactgacattactacaatcaaagtaaccagagttgtgttgccatatatgcaattttcttagctcgacaatcaattcttcatatgcagcctcttaatccaaaacgtggctgaaataccaatctaagatgcttaacgattgctcagacatttgagtgtcaatggtgcttaacagacacaaatatgttagtgcagaccagtgatctctgccctctggagatttcaactgcttacctcagtagagtgccggagccctccatcatcaccggttcaatagaagagtgaattttaagtgatcttcagtgctcacagaaagtacagtagaactttatacaccagggggccaatactgttggaaggaacataagaagcaactacctgaccgcctgtaagctctgcagggcaactcttggtagaatttggaagtaatgaactaaacaaagaaggttttcataaaaaggaaaatccgaaatggctcattcaaattgttgtggactacatactggaaaaaaaaaacagcaagtacaagcacaacacaataccagacaatcggtgcccttattatagtatattccacataagagttgcaacactctcaccaatcctgatgtgttcactatgtaactcagggaatctatgaatacatgccaattagatagtttggtacgttttatactagtaaaagatgcaggtggttaccaactatgcatagttgcatgttgagttaaactaatttagtagtaggtagcaatcaagcataatagcaaatgtatcaaatccatgttaggcaaagtttctagatcaagttaacaattccatgtactattgatttatgattctgcaaaacaaagaatcacagactgagggactggatactagaactgtattgaactataatcaggcttggatttcatcttattgtcaagttcattcatggtttcagcttgtattcatccacttcacataattatgctacagagttcagttccatggtgtatcaggctttaatcatgctgttcatagtttttgtttatgctgttcaactcggcaagttttccttggtctctttgatatgaacagagaggagaaaaaaggataaaacggtgacgatttaaatatccaatattttgaagtatctttctactaacatgtacattgtgcatgcaggccatattatagtgagttgctgaccaatcactaaattgatatacgaaaatatagtgctgcaaagtgcaaagtaattttcattggcatggctatgtatacaagacattgagaagaagtcaccgccagagtgtctttagcttttctcttttttaattctaactacaaattgtaccttttacataaacctaaacctatagttgaaagaacacaaactctttattacataaaggagaaaggtatatggaaacatattaatcggttttcggttttgatgagaaccattaccctttttaaggagaagcacaaataaaacattgaataacaaccatggtgataaagccacgcttttgatttataccccccaacatccataatccagggacaacttttgtttattgttttaattttgctccagtttgagctttattatttcatctcatcgtgttttacaacatatatatatacctttgggcttcagcacgaattccaattcttgtgagcgctgatcaacgcggacagtaagccggcggacgccatgagcgtcgagctgccgagcaaacccttcccgtcggtcacgtcccctagcgccatcacggcgtccgcaacgtcctgcacaacggacatccgcttgagcagcagcttcacccgtagcgtcctcaccacatcgctctcctccctgcaaccttccttcagccgcatcttgacggaagactccagtttgccgatctcttccagcttaatcgtgatggaaccaacgtatcccagcagctcggcccaggcgctgagtcgctggaggcgtgggaggaggtgcgcgggcaggaggccggccttggccagccacacgaactgttcgaggaagtagtagacgccctccccgccgtaggcgaggagcgcgacggccgggggcggatggggatgggcgcggagggcgttgacgttctggacgaacttgccgaggcggaaggccttgcggctgaggccgacgctggactcgaacgacttgaggcgggcggaggcggcggggggcagcgggcccgcggcgagggcgaggcgggcggcgtagcgggagatcttgaggagcttgtcgacgccgtcgcggcgggagaggtaggcctcgacgtggacgaggaagtcgcggggcggcgggtgagcggctggcttgcgggaatcggaggagcccgcggcggcggcggcggcggccatggcggccggttgctgcgtggaagagagaggcggagcggcggcgccgtcgttgggtgcgcgcgagttgggcggtggttgcgtgtgcggtgcgggctggtcgtggtaggggagtgggcgtttcgtacgggtttggaacttggacttgacgaagggtgacgtgtcattgggccgaaccgcaatatgggtcccatgcgtcagcctagcaaatgggccttaaactcttacattggaccttcttgggccgctttatcatctttctggacctttgcttttaagcccagtgtttcctgacccactttgttgggattttcttgttatgtatacatagaattctgtcacaacaaaatcatctgtgattttttctagaaacacagtacaaatatagacgctcacaacgcacctaccatttgtgattttggatgcatagtaaatatcacatgaaattaagtagcctatcatatcgataaatcatgtttatttatactggcactgaccggaaagcctggcttcggaattcagacttcagaggatgtggaggccactcttttctttgaagaatgcatgatggcatcgcccattgattcttactgcgttaatatctccttggattagtagcatgatcgtgtttaatttcgcattagcttgggatagcatacattgtttgatcacaagccgtgccaattaatgaagtaatctaaaaaatcaggggatactagtacatctaagaacactttccgttgcattttcattttccctctgctttaatttttgagacatactcctatatacttggtaagcagctccacgattatttacttttggttgcttatctaacgaaagatgcttttgaagttagtattacagcagccttacagtgtaaacagtttatatatcttaaaaaagtttatacaggctatagttccagaaagaaataaaaaattatgaggaaacatattaatcggctttgttgatatacacttgttaataaggagaagcatgagcaaaaaattgaatgatcaccatggcggagaaagcccagtttttgtatccgctcaaatgcaccagcaccaccttttgattaatttataccccgacatccagagtccaggagtaatttgatttactaattcaaactctcaccactttaagatttaattattgttcaattacatcatgttttataacatgtacctttggtgggctttcagttcagcacgaattccagttcttgtgaacgctgatcagcgcggacagcaagccggcggacgccattagcgtcgagctgccgagcaaacccttccggccggtcacgtcccctaccgtcatcgcggaatccaccatgtcctgcacaagggacatcagcttgagcagcagcttccggctcagcgttctcaccacctcgctctcctctccgcaaccttcctcgagccgcgcctcgacgccacactccagctctgccacctcctccagcttgatcgcgatggagccgacgtgcgccagcagctgcgcccagacgccgatgcgatggaggcggcgggggaggaggcgcgcgggcaggaggccggccttggccagccacgcgaactgctcgaggaagttgtagacgccctggccgccgtacgcgaggaggacgaggagcgggtgcacgtgggggtgggggtggtaggcggcggcgcggagggcgttgatggactggacgaacttgccgaggcggaaggccttgcggctgaggccgacgctggactcgaaggacctgaggcgggcggtggcggcgtggggcagcggcggctgcccggcggcgagggcgagggcgaggcgggcggcgtagagggagaccttgaggaggttgtcgacgccgtcgcggcgggagaggtaggcctcgatgtggacgaggatgtcgcggcatggcagccgcgggcgggaggctggcttgcgggctgaggaggaggagggggagcctgcggcggtgaccatggcgctggcgcgcgcgcgaatgtgttatgtgcggttgtttccgtgtgcgacgctggctatagcgtggtagaggaatgggcgtttcgctgggaaacccggcgatcactttgagtcgtcgtctcgtcgcagcctgtgtgccgcggagttcgtgagcgttttgtgtttttgtacgacacaaagcttagacttgacaatgtactaaccctgagttgatgtatcgctatctttgttcgttttcccctctttctcatcttctgttctgctctgtcggtaatgccacctcgaccaccgacaatggtgtcagactgctgccattgctgtgggtcgcaactcgcaaccatgtggatggcccacaatcccacatgcctcctcccagtatgaaaaaaagtacaccgaagatcctcaacttgtaattgagttacgtaatcgtcctcaaccataataccagatatagaatatctcttaacttataaaaccatctgacggttgagtcagcgtgggacccatgacgcgacgattgagtcagcgtgcgaccatatgagccctacatgtcagggtttccatgtcacaccccttgctcttcctcttcttctctcccttcctcctctctctcatctctttgcgcaggctagtcagtgtggggaggaggccgacgagagaggagggtgtcggcagccggcggccggcggcggtgacagcggtgacgacgtcgttcgcggccagccacggcggcgccgccttcgcctgcgccgagacggtgagcagcaggaggtcgatgaagacgacccgaggaggcgggtgagcacgcggcagccgatggaggggagtggagcggcagcgggcgagcgcgcgaccagtggagcagagcggcggcgagcgagcgggcagtggagtggagcggagcggcggcggcatccgcagctcgacgaagtaccatggcagcgtctagaacacgagacagcacggcgcgatatagtagagcgaggtgatgggggttcagcgacttgccattggaggtgaccagtatctggatgagcacgagccacgtggcctcggcggcgacggcggtgagctgtagcatgacgccgaacgcgtcgaaccgcgcctcgccgtaggcggcgacggcgacggcgacgcccgcggagatgccgagcatgttgagcatggaggcgcggcggaaggagtcggtgtggaaggagacgatgagggagtagacggcgacgggcatgaatgccttgagcatctagatgaaggagacagagaggtatatgtatgcagagttggagaaccagagcggcagcggcaggctagtgagcggccgcgagcgcgcagcgggcgagcgctacagtgggcgggcgggcaggcggcggagcagagcggcggcggcaggcgagcactcgggcggtggagcggagcggagtagcggcggcatccgcggcggcgccggcgcagctggaggaggaagaggaggtaaggaagaccgcatcggtgagctctacagccttgtccagcccgacggctcggcccgccgtcaccgcccccgctccgctctctcgaccacggcaatggcgccgcacggcacgcggaggaggaggagggaaggcagacgaccgccgcagtcgtccctcgccagccgccggccacgacaggcctcctgacctcctccccgctgcgtcgatgaagctgtcgccatccacaacgcccaggggaaaaaggagagaggaagggagacgaggggaaagagagagtgtgcgctgatgcggcatcctgacatatggatgctgactcagctgttacataggataaaaccgggttaaaatcatcgaagtacctattttaacctattttgattagttaagagacgccggatatttgttcttggttgggggacgattttgtgactggatgacaagttgagggaccttcgttgtactttttcctcccagtattgctatctgggccaagttctctcggtcctgagaaggccgtgaattgggccactgcgtgagtagaatttatctctccggttatgcgtgagtagaattttgccacgataaaaccatttggattagcacgcgtgattctctagaaatcatattgcaaggaagcagactatcatatcgagacgacccggcgagaacgagaccccgagaaatcatggccatatacttactgattggaaaccccgagtgagctggaagccattctctcaatcctgtgcaatgatggcatcgcccactgattcttacattaagatccccttagattaggtagcctggtcatgtttaattttgcattagcttatcgtagcgctgtttgatcataacccgtgccaatcagtgaagtaatctatacatccaagaacactttccattgcattttcatttcgtttcccctgccttttgagatacatatactcagcaagctgctcccgcaatgatttcctttggttgcttatcttatctaatgaaagatgctctcgggtctcgaagttaatattacaacattgctgcatgatcaatagtttatcttgaaatgttcatacaagaattgaaaaatttagaaaaaaaatctctaaaataaattggaaaggagaaactttagcagtcaatcatttgagctttctgaatatacgaaccgagctagtagattttagtctctgaaaacatcacatgcaagcacaggccatgattcccccagcagaatacgcaagggatccaaattccaacatagctctccacgatgagcaaagcttcaaatgtacaggcaggatcgcagtgtcggcagtgcataggcattttgatagtttcatgttgtatgttcaggggaaaaaaaagaacatgacacgtaagtgcaactcctacttagccgctgcaatttccctaaattagtagtcgtaacatctttctcggtgccaacacatcgttgagtctttggaggcagctttcgccgtgaaatgagttgtcaagaggctatgtgtgcatttggataatcgcattgccaagctgcctgccaccaatcgccctcctcctctcctttacggtgctgagacaatgatgcaccccaaagctcttcaaggcctacctggccatcttgattgctgcacagagatgtttccaatggctcaagcagaccgggcagagagagttgtacagtccttgctcatcagggtagagggggaaaaggcaatggaaggatattggcatatgtttcttttgagtgttgcttgagccctatgtcatgtgcatctcagagccagccagctccacacccagcgaaaaggagccacctttggaccatcttcttttccctttccattttactccactttttatatccatttttcagaagaaaattggaactgtcggtaagttctgttaactacccacttcatagcagttaaaattccctgcaaattaatcacccaaaacgaaacaaaattggggcagaaattgagaaactgtcactgaaatgtacttcagttttgtaggcttgggctgaagagaagaacgcaccgataggcgcaggaccatatgttttgttcctatttgctctccaagttggcgtacggggaaaagacgagagcaatcacaaaatggcaggattcctaaagtggttagcgagtgcatgattcagtagaaaatttctaatctggactgttgctaagtaagcatggaccattattcaatccagtgaaagcaaggacgatgattgcgtttaacttgagtacaggcaggcaggccattttcatggccgccggggcagacgcttttccccccatgattttccctctgcccgacactgcattgcaagtagctgcttaaagtggactaggctttggacgcttccagtgaggcattgatcctctctgtttcttgtgttacccatggaagaagaaccagcattttccattttgacctggcttgccataggttgtagacagatatagctgaagattctgaacccacatttcatcagagctcagaataccgtgttgtcaggcataaagcagattgttcttatgctggttccttttctgccatatctgtaccagatgaagctagctgcagtctgcagatgtaagcagatcgttcttagtcgttcttaggttgcacatatagcttgttccttttgtgctcgtatctctctttgccagatgaagctagctgcagatgtaagtaacacataacaggtagagtagctgttgttgatggcaagcaaggattcaagatggatcatgccatgatcacagggaactaccgatcacctctacgacctaacaacaaccttaccaataattttctttctggagcgagatctcttcctcgtcaagctttgatccatcgacactgaataaaaaggctttggcgttagaacggtggatttggagctaagggaattcctcgctttagctgtaaggccggtggttgttgctgcttactttgtgctacacaacgctcagcactactgagcttttcttcagtttagtgcaagagacgtgtctcgtacccgtggaattattattaagctaagtaatgtgttagcttctggataatccagggtcaatttaatttggcaatcaaaacagtcctagagtagtagagtgcagagtatttgttgctgtcagatagaagacttactcttaatgggtagtactaaccacagtactataattaacctgtcctattgcttacccctgaatgttgcaacaacgcattatattacagtgcaagctaagtgattggacagagagtatatcaatcatccggaaacggtggcgaaataattcctgcaaaattcttcaaatagtttgttaaactgttgacgaaaaatgcttttattattttccaaaaatgaggaagcattttagattttgtcgtgaccacgggatacaaaatggatttggtaaagtacaagcttgcgaaattaattgatatattatcttctgtgtcctacgtacattagcagatttgttcatagcgtgacagcaacccaggcgggacgtggtgacgcacggtccatatgacacgctccaagtttcggacgaaatggacccccataatctgcacctaacgccggaaattgagaacaaattaaaagggacggcgaccattgccagtagtgcacttttaggcacgatgctatgccaacaaatgattcataggaaacaacattatgggtataggcttgtagcacactattaattagtttgggggttgttacatctaaagaaaaatgaacagaaaaaaaaatcaaggagttgccctaggtttttacgttttcgctgtcctcggttcttcgcatatgaacagagtatgcgggttggacgattatcaaaagcagtttataattttttggttctactaggtggggaaaaaaaattccgccttcttccaagttccaactactaccaatcaggacctcatagtttttttcaagagcaatcttcttttacggtctgccgtgtcaaattcacctggttatgttgctactcattgttaaagtcatcggtggttcagtactaggactaaccaatcccagctttggacatgattagagaaatgcccatttccaggtcggacaccttgtttaccatgtcctttacatttttctttccttttctttgtatagatgcttttcattgctttctactggacgctcgattgctctcggccccttgacccactactgttgttgtttacccacacaagtccagaccaccattcaccagttcaccacgcgtcgcaagtcgctacaggaagaagaagatccgaagctcccaccatgcgctctgacacggcgggccccacgcccgccaccaccaccgccggtagctttcatgggacggcaaccacctcgcctcccattttttctccttacctccggctcacggaggccggcctccctcccaaagacgcgcgccggctggggccgatctctgtggtggggccatcgctttcgtcgcgcgggcccgcggcggaagcggagccaagccgagcgggcggcggagtgggagtgggagcgtgccgtgccgtgcgatgcgagccccggtttaaattgtgggcgaccgttggagaggagattagcggagcgagagcgtgcgtggggccgcaggcgatcaggtccgacggggattcgactactcccccgttttggagcttttgggttacaaatttgaccgagtgcaatctaaatacttctcctggtttttctttataaaaatattttcggggctgtttgattctctaccttaccaaaacactggtagtagcaaacttttgacatgttttggtactacaattttttttggtagggtagagatttattatacatatttggattactaccaatatgatgccaaatattgatgatatagagaagaaggttctaaattagtgacaaattaatcattgacattaccaataatttggcttcaatacaaacccatactattactattcaaggtaccaataaaattggtaaggcacattttggtaccaatccaaaatggcccttcattcctgccacttgcatgccttagcgcagtttcctacagtatacaacacaacatgtaaatatattgtaccgtgaaagttggtactaatgttttatattcagtaatagtagtaagtgtaaggcaataactcgtattgttatatattcacaaacatttgtcattttttacataactgatatttaccaacaaaacgggtattgtatttaccgacagaactaagaattttactcttattacaatgttcaagtaacaaaaacatccctagtgtctcccattgatggttttctcatcacaacatattgcaaacggcaaaaaatctgtttttctttggaacaaacaatagtactgattatttttttcaaagaagccctaagaagaaaatggaaaaaagttcggtaaaaaacatgctatatgtaacaattactattgcaacctatagtactccacttaatttgatcacatatactaggcattagctagtcctttattgggacaacgtcccatgatcccatcttataaatgcagtacttcacttcagatcatgcttgaaatttaaggcaaagtacatgagaagtccgtgacacactgacacttgacctatcggcgaagaaatgttgtgaaccgatacacttcgtttttaaagctgatgggtcaagacaaatttgcaatgtgtccgaagaaatttgcactccgttggttgttacatgaattaatcgaactccttgtactgaactgttaatgttgttagttgacaggacgaacgaaaattcaccaaaacatacaacatgcaggtactactactactactactactccagtatctaggaatattcattaccaaacaaaaagaaaaaaaagaagaaaaaccggtgttacagaaagagaagtggcaatatgcactactgtgtgggggtggcctggtggatcaaggcaaggtcaaacatggtgagttggtgatcccgagacaaattgtacaacaaagttagttagtgatgaccacgtaggtacggctgaatggaacatttcacctctcttctttttttccctccaaaccagtaatatcaatatggagtcactttacttgccaaaaacatcgttctgtgcataaccttcacgaccccttgtcatttgagacagtcgttttcagagaatgcatgaatgttggagttagcggaaatgacggagtagtttcacacataatagcagataaaaaggtaaaaaaaaaagaacttattataagtttgaagaaatgctgaaattgaatgcactcgatttttttttagaaaaaaacattcccacgctagtctctttaaaatccactagcaattctactttaatactaggctattttagttttacacctgcaagtatgtgaagtgagattagctaaattggatgggttacagtgggatctgctcacctgggttcaagtttacaactaattattcttttagtggcatgtaacgtacctatcgatagcgagacatctgtggtgactttgtcaatctcaagatatcctggcacaatattttagaagtgctcgtagagacagggtgtgagtgtacgcatgtttgagtgtttgtgtttataccgtataagtatgatttgctaggaggtgctcatagcgtaaatctcaaaatataacggtgcagtcttttgaaaagtgctcatagtggtagaatgtacatgtgtgcgtttatatgggtggtatacacctgtttgagcgcctacatttgtacgtataagtatgattcactacaagatgacatatatgttttcaggaactataataccttgcaaaatcctcttaggaggctatatgaacaaatgtaattggttaaattcaataaagcttccattgtctttagaaaatatgaacaatattgtaaagtttagagagttaaatggacatttttaaagtttatggtgattagattattaacttaaagctaaagtttagaagtggtatatggacattttccaatataaaatatactagtacagcaataatcaaacacatatgcgaagtgagcatagcttgactggttaggttccttgtggtggaaccagcccacctgggttcaaatcctagacgggtgccggccttgtgagtgcctgcgttttgtattgtgtttctaaaaaaataaaataatcaaacacatatacataacacatttcaccaaatggtgcattttttaagaaaaacttttcgtattaaaagattaaaacaactcaaaattttaactttgtactagctagcagttagttaatcgtatactaattgagtgtctttcctgataagctaagcggctaatcaccaaaatgccgaaacgaacgcggtttatctctaaaatatttttgcattgtttttagctacttcaccgattattttcacgtcttagttgctccacgtagtctaaaccaaaccttaagtttcatagtgatcaatgctatatttgaataaagcacataattgtattttaaaaaagaaaataccatgtgcagcgtggaccaatctttatcatttcgttatgaaaaaaaaattaacaacagaaaaaaaaacaagcggcccgtactgtagttagggagcaccggagcagagtacactttactcaaacaaaacgctctgttttgtattgtgtttctcaaaaaaataaaataatcaaacacatatacataacacatttcaccaaatggtgcattttttaagaaaaacttttcgtattaaaagattaaaacaactcaaaattttaactttgtactagctagcagttagttaatcgtatactaattgagtgtctttcctgataagctaagcggctaatcaccaaaatgccgaaacgaacacggtttatctctaaaatatttttgcattgtttttagctacttcaccgattattttcacgtcttagttgctccacgtagtctaaaccaagccttaagtttcatagtgatcaatgttatatttgaataaagcacataattgtattttaaaaaagaaaataccatgtgcagcgtggaccaatctttatcatttcgttatgaaaaaaaattaacaacagaaaaaaaaacaagcggccgccgtactgtagttagggagcaccggagcagagtacactttactcaaacaaaacgccagagcggcgaaaacaaagaaaaaagagcagaagatgagaagacaaaaaaggggaggaaatgaaaactgaaatccacttccactaaccacaatttttaagcccgaagcagccgaaagaaaagcgcgcatacacgcagcgcaggcattggcgcatcgcaaaatcgcaatgcattgcagctaaccacaaagctcccacctctccgtctcctcccccctccattataaccacccccacaaaaccaccacgcatcgccccattaatggactcgccacctccctaattccaccgtccatttcaaaccagacagaccagcggagcggagcggagcagctgcagcggcgaggcggcaccgcgcgcgagccacggatggcggaggcggcggcgctcttctcgctctccgcggccgccgtggtggaggacgtgctgcggcagcacgggtgccgcctcagcgaccgcgacctcgcctcccgcagggcggaggaagccggtgcgtgtgtcgtgtcgtgtcgtgtcgcttcgcgtgttctgcgtggaatcgtggtggtcttttgccaatttgccacccgctatcggctggcttcgctcgctcacgcgacattgtttggttccgtgcagcggcgaggcggaacgaggcggcggggtggctgcgccgcacggtgggggcggtggccgcgcgcgacctgccggaggagccgtcggaggaggagttccggctcggcctccgcaacggccagatcctctgcggcgcgctcaacagggtccacccgggcgccgtccccaaggcatgcgcacacgttgtgttcgttaatttgattcgctcccgctgcgctgtttgccactgtagcgtgatggttggttgctgtgatgttgcgcgcgcgcgcgccccgcaggtggtggtgaacacggcggcggactccgtgctgcagccggacggcgcggcgctgtcggcgttccagtacttcgagaacgtgcgcaacttcctcgtggcggcgcaggagatcggcctgccgtgtttcgaggcctccgatttggagcaggttcgtgtcggagcgcgccacccggcccccatgcgccgttgcttgcagctgcagcaaagcggccatcaccctcatcgtcgattgctttaggcacactctcttgtggagcctgtgattttgacgcgcgccttttttttgcctttctgggcgcagggagggaagagcgccagggtggtgaactgcgtactggcattgaagtcgtacggtgactggaaacaatgtggtggcaccgggccatggaaatacggggggaatttgaagccgtcggcttccggcaagtcgttcgtgaggaagaactccgagccattccggaggtgccaatcgatgaacgagggcgaggtgccttacgaggaggctggattcagcggtgattatcatcttgattccggtgacatggttagctccgtgcttcaattttgaagctgctttgtatttgtcttgttttgctagacgatatgcggctaaacggttaatgcttcgtgcagtcgacgtcacgccctttgaaaatgttggttagtgcagttttgtccgacaagaggcccgacgaagttccacaggtaggccaatcaggttccccattttttagtaagctgtttactggttcaatgggatacatgcaagcagctttccctttcatgtgatgctttaccggttccttggagtttttatgctattgtttgcctgcagctcttggagtccatgctgagtaaactcgtcgaggaattcgagaatcgattgactagccaacatgaattggtagatatcatctttgtacacttcttatctgttgtttttgaaatcgttttctgcgtgacatatggcaatatgtagactgggccgcctggaaatgatataaacaatcaaatttttaattcattggaacaggtgaaggcggctctgaaaaatggtacagatggcaccaaatccttctcgaaatcaaaggttctggttgaagccaccccaaattctaatgagaaaaaggcaagctataaatttgctcttatttagtatgttcaaaatatttgttttcaaccgctgtaggaatctctgttgcaatcacaaaaatagataggtgtaggttgctagcagctactatttttagtttccaaccaacatttcttttgcttcctctatagatggatacgatagaggtttactccaaacatagacaaaccaaaaaggaagcatatggagaagttacactgaagcaatattcaatgctacaactacagtcaaagcatgttgaggtattattttaattattcattttatttttcattgtcttggtggtgattaaatatttatattactgcttgtggttcttttctttaggaactcaaggctgatattagagctacaaaagctggcatggagtttatgcaaatgaagtactccgaggacatcaacatcttaggtaaaatgggcatgcccgaggtgcttaattaaactaactattttaatataacgctaataaacaaagtatgcatttgcaaattttattccaggaaggcatctgtttagccttgcacatgctgcctcaggttatcatatagttcttgaagaaaatcgcaagctgtacaaccaagtgcaagatcttaaaggtatgcttgttatatcgaatattcatgccaagtgtttctggaccaattaaggataaaaatgtgctgtgagaagcagaaagaaagcatgtattttgattattttccatgtttatagggagtatcagggtatattgtagagtacgaccctttttacctggacaagtaagttcttgtgctgtgggttcaattgatgagggcaatataaccatcatcactccttccaagtctggaaaggaaggtcgaaagacttttagcttcaacaaggtgtttggcccttcagcaacacaaggttttctacctgtccatttctcaattttttttcgagctcttgaatggaagaagatcgaatggttttttgtcgtgcagatgaggtgttcttagatacccagccccttattcgctcagtacttgatggatacaacgtttgcatctttgcttatggccagaccggttcagggaagacatatacaatggtgagtacagtaacaatatttggtcaatatatatgactgatatcaattaatagtgtttctaaagcatatactaccatggattcccttcatgtaccattaacatcttctctatttcttttatgtagagtgggcccaagaacatgactgagcaaacccagggtgtaaattatcgggcactaagtgatctatttaagcttgccgaacaaaggaaaggagcattcatttatgatattgctgtgcaaatgatagagatttataatgagcaagtcagggacctccttgtcaatgatggtctgaacaaaagatatcctcacaacagcatgtttctatcaaattgtgccactttatttgtgttataaattgctttcacaagtaaattattttgtactgctgaagtaaatagtcttccttaacaagtatatacattagagattcgaaataattctcagaatggacttaatgtgccggatgcaagccttgtctgtgtcgcatcaacaatggacgtgatggaattgatgaatgttgggcagaagaaccgtgcagtcggcgccactgcactaaatgaccggagcagtcgttcccacaggtaacccaaccttttctgtgtaaaaaaatcacatgaaataatttgaattgataaatgaacataatgaaatattctcttaatcttgcagttgcttaactgtacatgttcaaggaagagatttgacatcagggaccattcttcgtggctgcatgcacttagttgatctcgcaggcagtgagcgggttgataagtcagaggtcactggagaaaggttaaaagaagcacaacatataaacaaatcattgtcggctttaggggatgtgattgcttcacttgcccaaaagagtgcgcatgtaccttacaggaatagtaaattaacacaactcctgcaagattctcttggtaagatttaaccttcttgcaatttcttaatgtgctgtcactgactgctgagtataatttatatttcctcgaattttaacaatgcgtctacaggaggtcaggccaaaaccttgatgtttgttcatataagcccagaaagtgatgctttaggagaaagcataagcacattgaagtttgccgagcgtgtatccactgttgaacttggcgctgctcggttgaacaaagagtctggagaagttaaagaacttaaggagcaggtttgtttctgctactatgctttgtatcatattttctcactgcatttgttgtttaaggtatgcatatattctatctctatccagattgctcgactcaaatcatcattagcaatgaaagattcaggatcagagcaaaacattaaccgtgaccctgaggcatttaacatgaagatgccttcacctggcttttcaaataggcgacagggtagttgtgagttggtgtctagccaaactaacttcagacaaccaatggaggacgttggaaacatagaggtactaatgccttgcattatttcttctataaacctttctacgattcatatttgtttgacatttacaagttacacaagtgatattagcaaattatgataatacaactgtcctttcagcggccatgctgttgttaacgtttttgtcccatcatgtttgatctggtttttatacaggttagagccaatccaacattaagacagaagaaaccaagctttgatctccaggacttattagcgtcaaatgattccccatcatggccagatagcatttcaagggcaaattttcaaatgggagaagaaagagtgactattggtggggaatggatcgataaggttgtagtgaacaacaataactcagtaggtgattgggaaggcgacagtgcagctttacctgacttcttttaccaaaggtaccattcaggtacaagagataagcaatacctgagaaataactcaagaaaaaaggacggaaatgagtttgagcagcaaagaccaagattttattccacaaatactgatgattctgatgacattgacattgcaacaagtgattcctcagaatcagatgcactatggcagttcaatgtccaaagcatcaatagttcaattagcgagaatggttcaaagatcaagaaaccacaaacgaagctaagagagagctcagataccaggtaaccattttttttacattaacaacttttttttacaacaaacattattttttaagaataacagggctaataactcccttgtcccgtttttgttgaagtaaaatcatcctacactgttttagcacccacaatactcatggtataaagcagatataaataatttaactatgatgaactgaacttgaataaacagtcatatggacttggatattagcgtattacttgggactacactaattgtgaattgtgggttatgactaatagtgcatggatggaaaattatctttatgttgttatttaaagatatagttcacctcatgcataatagtgattgctgtgaatttcaagattgtggtctgctaaggctagtcacagagttgctaattctctgaaatttaattagtatgaaaaatgtgtactggaagtacatatctattaaatattaatcccattaacttttggttcttttatatttggttgatactaatatttatttaaaaagaaaaatatataatctaaactataacatactaaactattcgcataagatatatcattttactccatgaaaggctgattaagatattccatgcttccatgtatttactcatcaggacaccactccattctcaaataccatctgcttcgagaaaaacctccaatggaaatagatctggacggcaacctttaagtggtagcgatagcaaaaggctctcatcaaatggtagacatgctggtacaaagtagggactactacaatgatcatgtgcatttttttttcttggctttctttcagtgtttgtcatgagagattgcgaggtttttctcgagtacagcaatgagtgacaataaacccaattgattgtctcagtgtggtgagttgtgatctcaacaactggtgtgtgaggccattaacctttttttttatttggcctatcaggctatgttgagttcttgctaattctttgtgtattgttcataatatatataatgaagagaaaagaaagagaattggttgatcaaaagcgggtgcataatttctctctttgaacgcttttatcttttgataaaggttctttccaatgtccttcgtttattattctccagtattctaacaagtacagcttttgctttggttggaattctcttccacgggtccacgctccatgaagttcatgttcatgttcttgtacattgatattgatttatgtcagctatcgtgtcatacagtgacactgctagccaaacttgtgctgctgatcatcctggaaacctggaaacatgtttttgctgcagaggtgatggtcctgaagtcttgccttttgcttaagttctggaagtgctcgttggattgtacataccacttcattcattcctgtaagtgaccatgcagaatcatgtctgttgtagctgtggtgcataccatctaatacattgcagtgacatgttttacaattttactgtccaacatatatctgagctttagacagaatgactacagtatagtagctttactttttcttttttttttgaagggagttgagcttacctttagtgcaataaatgttactccctccatttcatattactataatttataagtcgtttgacttttttcctaatcaaacttatttgaccaagtttatagaaaaatataatagtattttcaacacaaaacaaacatattatcaagtatattcaatgctagatttaataaaactaatttgatattctggatgttgctaaatttttctataaacttaatcaaacttaacaaattttgattaggaaatagtcaaacgacttataatatgaaacggagggagcaacacatttgttggaggagaagagcattgcttggaggaaattcattatgcagtcttggagttccatggaaaaaagaccttagccgagccccacaagaccaaaatcccaactatggcatgaaatgagagaagggaaagacgaggaggaagaagataaacatggtcttttacatataggtctcatggcattatttatttatgagtaaatttcagaaaactgcaactttagtgacaaaattatcagtttgttgtaacaatagcgtgggaaattatcacaaaactgtaacttttacgttatatgctgctacagtacatataggtgacaactgtagcagcatataatataaaagttgcagttttgtaataatttctcacgctattgttacagtaaactaaaacatgtcgctaatgttgcaacaaactgatagttttgtcactaaagttgtagttttctaaaatttactatttatttatttattttattgattgtaatgcaacccaagtgccacgtaggtgccagatgataccagtgtgaactgcataggaaggtaaaatgaagaattggtattgataattgagggaggttgtatacatgatttttcgattgcgaggaaactcagattgtaatatagactttctttttctaatactcaccaggaatctttggcccagttagtctagctacaaagcactgcctagtagttcaaggccagagactggtccactaagcgttgtgcccagctacataatcatggttcaatgcccaatgaggccttttcggaaacttagagcataatctagcaattttcggcgactatgcaacacgctgtgcatgcatgaagaaggatcgagttcagttaagattcaagagcaccgatcttacaagaaaaccatccgcgtattcaacgggcaagtagacaacaactacgcaaagtctaattaagcagcggcgacccaaagcccatgtttgccagccgaggccaactcaccgcagggaaaaggtgagctgtcctaccaccaacaaagccacgccgcgcgaccgtagaaagaaaagcctacgcggctacgccgtttcaccgacgactggacctctccttcacggcctcgtctcacccaaccctagttccttttaggacgaaaacggaatgaatacggaagtataatgctcatatcatatttgtttttatatttctttaaatacgaatacggacaactcaaaatagaaacaaatacagattacttcgaatacgaataaaaatcgaatatgatcggacacgaatacggaaacaattttttctcggaacacgaaaaatcaaatcaatttctaatataaacaaatatcaacatatataattagttcattttatttaaaatgtagtataatttataaatatttatttaaaaaattaaataatattaatagtgtggactagtattaagagatgaacttctattaaaatctaaaaatgtatattgaaagtcatagagttataaagatttggggtatgtctcatggcttctgcggatatccgaatagcattgttagtcggatatccgagttattatccgtatccggcggaaaccctgataccatatctgtattcgtatccgggaggaaatatccgtattcgtatctgtatccgagctatctgaaaattatccaaaccgaaagatatttgtattcgcttttctctgaagcagcgaaaactattcgctctgtttctaatagggttgtgattttgttctctcttgttcaccttaagttgagtaatcaccgccacaaaatgtttcaggcgattttgtttgcatgatcgtttggacttggggaatgttgtaaagtgaagatttgtttcgctactctctctattttttagcgtaccttttaaactgctagacgatatgttttatgttaaaactttttataaaaaatcgttttaaaaaataaaataaattataattcataatttaattttgaaaaatactcaattaattaggtttttcattttacatgccactaattagccattttcaacctgtggttgttagaacagcccttaggttaatggataaaagcatgctagttgtgtttttacagcccgttgtgtcaaaaactcggaggtcatgagcaaatttgcattttttgggatttgaattttagaattaatttgttaattttttcattgctttcattacctagacttccttttggacaactaagaattaaaatgtaaaaatataaccttaattatttttgctactttgataatctattttcgatttatagactgtagcaaaaagaaaaaagcttttcaagcagtgatctgggttcaccagctgtactcaccactaaggctatgttcttctcctagttttccctcttttattttccgcgcgcacactttgttttttttaccagggcgcacacgctttgtagaaaaattctatatgaaagttgtttttaaaaaatcatattaatttattttttaggaaaaaatagttattaattaattaattatgtaataatatatatttcgttttgcgtgtcgggaggagggcagcacctaactcatgctcctactagtttttgttatatttcttgttcattgaattttctcatagaaagggacattatgcttgatctggtggtgtttggatcagggacttaactttagtctctatatttagacactaatttagagtattaaatatagactacttacaaaactaattatataaatgaaagctaatttgtgagacaaattttttaagcctaattaatccataattagagaatgtttactgtagcatcacataggctaatcctggattaattaggctcaaacaccacctagcatgcataggacgaggcatttaattttacttataacgagacgtgccaaaaaatgatatccacataacggcataaaactaaacagctgcatatgaatgtaaagactaaataaaataattgcaccaaatcttaagtttttaaatgcatttttggaaaagcttactactggtactactattcttgtactcatatgtggagttgtggacttgcaagcaatagcacatgggtccataacacctgacaccaaaaccacctgtggtcagtcaaacatatccattttagcagctggcaaccatacattcaaacatgcttaaaaaatcttaaaaacattactagtagtcctcagaaccggacaacctgcggctaaatccacaatatgaacacacttttctttaatccaactcagatttcttaatccaaaagttgctaaccactatcgaccagctggcctcgctgctgctgcaagcttgcagaaatgcaggcatttggcaagcacatttgcaccgaggccccctatttcacctacgaattacaaaaagatcccacctcttctactatcgtcagctaattaaatcgttgttcctcagttcggtacttcttcttccttcactctccccaccaaattcccccaaatcgcagctgttcgccacccgcattgcgccgccattgcctccaaatccgagtactccttgagtaatctcagatccatctcgggttcctcccgccgttggcagcagccggagcttttttccgcggaagaaatggcgccgtttcggtgagttcttggcagtttgggatgatgcttggtgggtaggaggactaggagtgcggcggctcggggagaggctgcgatggagagcgccgccggggaggaggggaaggctgccccgtcgcttcccctggcgaccctgatcggccgcgagctccgcggcggcggctccgagcggccgctcgtccggtacggccacttcggcttcgccaagcgcggcgaggactacttcctcgtcaagcccgactgcctccgcgtcccgggcgacccttcctccgccttctccgtcttcgccgtacgtgccctccccccgtgtcgcgtttctggtctcgtctcgggattccgtgatgctgatggcgtgtcgggttttgttcttgttcttggatctgcggtttggcaggtgttcgacggacacaatggcgtgtcggcggcggtgttcagcaaggagcacctgctggagcacgtgatgagcgccgtgccgcagggcatcggccgcgacgactggctgcaggcgctgccgcgcgcgctggtcgcgggcttcgtgaagacggacatcgacttccaacgcaagggtgagagagatcctcgcaatgccgttgaaacttgaaagcctggaccatcgccgctgtgaagatgttaactttgggggatgttgtgtgagtgtgattgcaggggaggcatcagggacgacagcgacgctggtcgtcgtcgatgggttcacggtcacggtggcgtctgttggggactccaggtgcatattggacacgcagggcggtgtgatctcgctgctaaccgtggaccatcgtctcgaggagaatgtagaggagcgggagcgcgtcaccgcgagtggaggggaggtcagccggctcaacctgtgtggtggacaggaggtaagctgctagtaaatattcttggaaagaacttcaaggatacattcaatgctgtcaaagcatttctcattatgggttttgatgtgaaatcttgctgttgttttaggtgggacctctcagatgctggccaggtggattgtgcctttcaagatcgattggggatactgacgttggggagttcattgtgccaattccacatgtcaagcaagtgaaggtgaaattttaagagtttgatcaaatgcaaggagtagcttatcgcaatgaacttaactgtgtatgcttttcattctgggaaattgtagctatcaaatgctggagggaggctaataattgcatcagatggaatttgggatgcactgtcctcagaagctgctgctcaggcatgccgaggattgcctgcagagctggctgcaaagcttgtcgtgaaggtagtttcacgtgtggtttcagtttcttgtttatatcttactttatatggaatgcttcactatcttgatcatccaactgagatccattcatattgtacagcaagcactgaagacaagtgggctgaaagatgacaccacctgtgtggttgttgatatcatcccatctgatcattcttcaacacctccatcactatctccaaagaaaaaccagaacaagttgagatctcttctttttggtaggaggtcacatagttctgttgg

SEQ ID NO: 26580 - DNA, 15992 bp, Oryza sativa
tttgctgctttcagtttctacttctgcgtgttgttttttatgctacttgtgcagcatagatgtacatacatacgtatacttctagcacctgcatgtttttttcccctttttgtggtccaaataatgggagcagcagcaagaggagatgaaactgaaactggaagctgtggcaaccatcccaggctgcgcgaccaatggtccattggtccccttcctcctccaaagctcaagctggagggactgtctggtcccaacggcaagtgcttcaattccaaataatgcatggcctgcatgatgcttcgccgatctgttgttgccctttcaatgctattcttgcattaggtgtgtttcttcaatgcgcgctattaagccttggtttaaggttttgattgttctcctggcctgtgatgcctgtccgcgttcaatccccaagcttgaacaatgtcctgcgctacagtgctggaggagtagctcatggtgaaacggcgagtccgggggtcaaacctactctacacatgtgcaaccctgaaacccggcgtggtctacgtgtgctacagcgcctgccttttgtcctggatggatagcagcatcttgctgaggctgagctgtggactgtggtagtagtacgctggtatgacccgtcatgtagcagtacactagtactgtagcagtagtcgttttcctgtgaaagtttcacacaggatgggcaactgtttccatgcctcgagttgattcttggtgattggcactttggcagtgcggcccgctatttttctcagttctggcagttaagtttgaccgagaattcgtcaaagtatttttccgatcttgtctgaaatttatgcgattgctgtgttctaaatacatgcttaactgccagaaggtagaagaagagaacggagaagaaggcattttccgatctcgtcaaagaaggtagaaaaagagaacgggaatagggcataacagagcggagagcacacatgcaaacaacgtgtgatgaaattctaggaatacaaactggccaagccagatcaccggcacaaggtttgcacatgggacaggaggaagatgcctctgtccttgatcggcagcgccattaaatcaactcctaattgagcttaccgatgactccagtcagtggattacgactaactaatgatcgccgattatgccccagtcagagtgagaacccgcggaacttgcatttgttctggcggtatctgcttatcaattatcatcaatcaacttatgatgaacatgtggaggtgtagttgcactacgcaacttgccatgctcctctcttcattttgcagttgatttaaactctaacccaccttaataaaagctgtttttggctcaagttgaaaaaaaaaacaagatcagccatgacattcaggtattactgcgaaaaaggagggcttgaaatttggtcgattagccgctcaactgaacagtagtagcttctttaaaagaaaaactgaatagttgccagctgtacgtcattcgtcactgtatgccagacatacgcaaagctacagaattggtcaaagacaaggcccatctagaagagcgaaaagaatagggaaaaaatacttttatatattgcccaagaaaatgccatacatctgaaaacacgatgattccttcacaaatatgccgagaaaagtattcctggaccaatatgaccgcatcgctgcagcttgcaatgcaggacaatgttaattgtggcgtgcaaaagcaagtgatgcaggacgggcggcgctaattgacgtagaatggttgtttgatgtacttaaattgatactagtactagcatctaatgcagtcattagccttaaaagatgcagttttcagttgattgattgcttgatagaggctaggcgacggcgattgtttccagcactaatcacacattcacaccctcgctcttcgccgtaaagcaaatcacatcctccgcaaaagggtaagaaaagaaaaggtgaaacaaataacaaaatcgcaacgatcgacgatgccattttacccggtgaccgtggcgtgctttagactggatattttggctcaatttgctcggtaataatatacgtagtagaaaaggaattcctagttgtgcctcctattgcagcactcgtggtaccaattgtgtagttgacctctacaagtcacccggcccgctggtgtgaagaaaattactttttagtccttcctacgaaggagagagagagagagagagagagagagagagagagagacccacttgtcttttacaagtccggctagctttataaacctttgatacgtatttgaataaaaggtattttaaaaaaatatgataacctccctttattagtggattatggatttaaggttacacggcaaattatcaatgaaaatcttattccagaaatctggttgatatattcatgatagtttaatgaggatgaatggagaactttgtgccccttttgtttttttaaataatggaatagaatccatttgttcaaagagttacaaccaattattacaccaattcaaacaaaccaaaaacacatggcaaaaaagtcataaaaatacaggcctaaaaggacagaaacacacgctaagtactaaaaacaaaaacaagaaaagactacaaaattattgaattctatttgtgaatctccatccgaagttggcaaaaagttgtatcacatatttgcagttgtgcccaggaccagagccagtgtgttgccctgaaaagaacctgcatataagatatagacagtgatttatcaaaaaccatatcatctctactcaaccatagagcccaacatatagcggaagctcctaccagaataagtttactggttttttttatcaatccccagaagccaattctcaaaaatatgagatatactatgtggaatatttaaactagaagaaaattaaaatgctctccaaacaaattttgcataatgacattccataaataaatgttggatagttttattttttatacggaagcaacatttcagactaccataccaatttcttttaaccaatttatcctttactaagacaacccctttaaacaggtgccccttttgtaactgtcttagagattgtttgtatctttgttggcttcttttaggctttataaagaggaatattttatctactttttcatgtctaggatatcactattaacaaagtatttttgtttataggaagggatatttattcaacttttttcccctgatattcatgcaacatggtggagactgagtagtcaacctcatacctttctaacctgatctttcacctttgctgaagaggaagaataaatattctgaccttttctaggctgtgttcttccccattttctcaacccacctctctcgtttttcacgcgcacgtttttcaaactgttaaacggtgtgatttatgcaaaaactttctataataaagttgtttaaaaaattcatattaatccacttttcaaaacaaaaatagtaaatacttaattaatcatgcaataaaacgaactttgttttgcgtgcagggaaggaggggttcccaatcccctcctctgaacacagccttaagaagtgtaagctgagtgctactgtgaatcatatatacatttttaggttttgtgagatatttagagcatcgaacaaatatgtagtgtgcaatatatggtaaaaacacaaatttgtagggccacatttattagtttgtggtaattaggacttatgagcagtttgtcatatagacagcgtcatgataaaaacaccctttaaaggaaatttgatgatttattattatcattaagatgatggatttgatgatctgtccaactggcccgcacgttattgatacaaacgattcgatatgttattgtcatatgatgataagcagcaatctacagagtgataaatcatcaaatttgaccctttaaaaatgagattttacttattcgctacgatagttgaattatcttcgtgaaattgacgtaaaattaaggataaaaaagattgtacatactccaattaaactaaggctgaaactagtcccttttttatttatctacatgcgtcctgtctctactctagaccggtcaataccaaaccttggagatcagttgtcatgataactcgattaacccgtgtattaaacatttggaggttgacaattacaaaaggatgacaaaaatgatggtacactgcaagactggagtccacccggcaaagacacatgatgcgaatccgcgtacaaccttccacaaaccgagcatcgcgtgtgctactcctgatttttttttacttttaaaacattttttattttttattttaaaagtaaaccattttaaaacatatttataaaatttgaaccttggatgctagctcgtctagcatgctaaaataatattgtcatgccacttctaacgagcgggacggtttaattctaccataacaacctagcaggacaatgctatcacgcgattcaaatagcgtgggagtgtacttttgccactccaactcgttttgcgtgaccaataattcagatactaaaaataagtcttacaaaactttatttttaaaatttaaaaataaaaaattactactcccctccagcctactccctcagtaaaaaaactcaacctaacaaatagaacggatcgaaaagaaattatttagattcatgttattacgaggagtcacattctagtctagttttttttttcgaatggagtagtctatatctagcaaacagacgaacaaataaatccatttttattttcgactcggagcatggtgctttttttatttttggctgtgtacaccctccagcctactctcttctttggctgtgtacaccctgtacatacataggccgggtttaatataaaggaaaaagtacgaattaccccctgaacaattgcgacagtatgaattaccccccaaaccacaaaaccattcataccagacatataaccccccctcacactgttttgaccggttttgatttcaacttgtacacgtggcgccaacgtggcaatccagtcagaaaaaaagtaaccgttggggcccacctgtcataacccttcatcaacccaatccccccctctctctctctttctcgttgtctcgcacacgtgctcggacggctggcagcggaggaggggcacactctcagacgaccgacggcggaggcgaagctcgtccggaactccgtctgtggaggcggagatcgcccgcgtggtcggcggcggaggcggagcttgcctcagttgcctgggagtccggcggcggaggcaaagattgcccaagcggcacttgtacgaggagcacttgtacgacagggacaccggcaactgcaccgccggcgtcgacttccacaagtgcggccacttcgtcttcatggtttgactcaacttcaccaggatcggctgcgcccgcgccgagtgcttcaacggcggcgtcttcatcacctgcaactactacaaagacgaggagcagccggctgcccgtcctacctactcctagttgcatgatatgctcttcttcttctctcttatcaacaccttacttgctgcctgcctgcctgcctcatgtacatatagctacccgaaccaccgccgccgccgccgccatcttcttcgctcggaccgccgtcgccgccttctcagcccgaccaccgtcgctacactggaaaggagagggaatcggaagagaaggagaggggaaagggatgagtggcggccgtggccctcctgtgcagctccatctcgtgcgtcgccgtcatggacgcggccaccgacaccgccctccgctcccgccaggacgccctccgcctcgagtgcgactccctccgccgcgacgccgcgctcctaccacgcccgcccccgccacgcccatcgctcgctctcagccatgcctaccgcccacctcgcccatcgccggctacctagtcgccgctcccggcgacatctgagagagagagagagattgagaggaagggaaaagggaaagagagaggtgggtcccaccatgttttatttgtttttggctgacaagcgggtcccatatcttttttatttgttttgctgactagagtgccatgtatgcatccacgtaggatcaaaactgccctggatcgacataggggggtaattcatccgatttgtaaagtttagggttaaaaataactggtattagagttgaggaggtaactcgaacgaccgcgattgttcataggtaatacgtactttttttttctaatataaatccattatctaaaaaattttcgactcggaaacccgcagggcgaaaaaaaattctaagagggcagccgctgggaatttctcccacctcccctcccccacacgaagcgaagcgcaactcggcagcggaagccgcgcgcgacgacgatggccgccgccgccgccgactacgagtaccgcgcctacggggcccccgccgaccacgaccgcccctaccacggccgcgaggtggtgccgtacggggaccgccgcatcgacgtcgtcgtcaagcccccgggcaccaccaccaccaccaccacgaggtcgcctccgccgccgctgccggtgaccaaggttgggggcgggggaggaggcatgggatccgcctggtgcttcagcgacccggagatgaagaggcggcggcgggtggcgagctacaaggcgtactcggtggaggggaaggtcaagtcctccctccgcaggggtttccgctggatcaaggccaagtgctccgagttgatccatggctggtatggatcacttcttctccccctatccttttccttggatgattttatcatcacctcgaagcaagcgctctcttgattgctgtgacggccatggctggtttggggcctgatcacggtggagacccatccttcctctgtgcaatggatttttgtccaagaaccaaattattccattagccttttcttcggtttgtttgcgtttcatctttagaagtttcagcatattgaaggacagccacaggaattcagcaactcacaaactggtcactagttttggtctatcaatatactgttctacttggaagtagtagtagcttgcaagaagaagcgaagatattcatttgttcctgcaaaatttctctcatctgatctgtattccgttctgttgttttcttcagagccgtgggatcttggtggagttcagtttgggttggaacacgatacaagcctgcaaccatgtgcaaggagtgtactcgctactactaattttctgccaaaaatgcggaaggatttgtccaagagaccgaggggaactgttcttgggtggtcaggttataggaaaggaaaagaaaacttgttaggagctttctgatgagattgcttctcttgccgatgctgttgttactgtctgctaattctagcctaattttttcaacaattttcctaagaggagttgaatcttcgcaaaggaatcgatccatttgcatgagacatcgatcgctatcttgtttgtccgtgatcttgtggaggcctatactttgatttcgtacgaagaccttgcaaataaccaggtcgtcgtcttcttcttcttctttttcgttagtgttttggattgggacagattaccatttgtatagcctacgtgatgaaggcatgatcaagcgaatagttagaggagaggaaggaaaatcatttgaattgtatttccaaatgagagcaccttcagcaaccctgtttaggtgaaatcagcaaatccacgatataaatgcaatgctactacgtgcatagttgttgtagtttaccctgtttctcatgttcctacaggtagtacaggactacagagaacctcaaacctggcaactgttgttgcttgtgccatcttattacaagcctgacaaatatttgccctgcttattatagtatatatatggcatttgtcatacactaggtgtcaattttgttatattcctgatttaaggcagactaatcaagcacaatgacctgtacaggacgatatccaaagtttaattaggaaactaattactcaggagacagagttcaacgaacgctgatcattcctactactactagcagacgagtattactttcctttgatgaaaagcagacgtcaagacccatacgcactagcatcagcgtcaatcagaccatcgactaccattaccatcaactgcagctggagacgatggctgtcactgcagctggagagggtggccctgcctttgccggaaattaggccggttggagaggtttgcgaatacgagacgtacgtactgtatgccgtgacaggcccagcacaacgagaacagcagcaggtgccactacggatggaagggagcaggttgacgggaagcgattaatttcctgtaccaaccgccacagttttgttttcccggtaggtagaattgatctgcaacgccagtgccatctttaatccgactgggccgtttcgttgttgcactgacacgatagctgtgtgacattgtgcctttacatggacgggtcgacgtgtcgtgtaatcgtgttgcttgctggatgaaacaacgaattttttttattaaaagttttacaaaaataattttccattttgaaaattgacggaagtagtcgcctaccgccctctgggaaggcgatttttaaaaatcgccctcccagagggcggcgaaaatgacgtggcagacggccgttcgctctcgggcgacggccgtcaacgaaatttgcaggcggcccccttgccgccctccgcgagggcgattttgtactgtgcggggggccgcctgcaaatgggcggcgagggggggcatggaattttgcaggcggcccccttgccgccctccgcgagggcgattttgtactgtgcggggggccgcctgcaaatgggcggcgagggggcatggaattttgcaggcggcccccttgccgccctccgcaagggcgattttgtactgtgctctatatttttgtataaatatcaatagttatcaaatctttttatattgaaaactatacaagattaaaatttttcttcacgaccaaatatttggtaaggtaaaattgcatttgatcatatttggtttgctgccaaaatgtaaaattgtagtgaagaatgttctacataatctcaaatctagattacgtattaccaatgaataggcttccattttcgtgtgttgtgtgctagtgggaaagaagatatgaagagattgccttcagattgtcaattatatagcgtcgttttcactggaatatatgtgaactcaatgagatacattattcattagatgtgacaagacgatcacgcgtgggcgtgattcactttatgtaaacaggcagcgccgaaagttgatagtgataactcgagctgccgcttttcatgtgtgctgttgtggattgtgcgcgctactggatctgacactaccgtgcagcgccgaaagtgtgttgtcgtgagcataagttgttctagcaccatatgaatgaaaagaactatgtagacgagacaaacacaagtagtactgcagtagtaatagcaaaagtagtactgctttacaagtttgtaagccaaaagaaacggtcacataaggactgaagaggtagaacactactgacgaggcctcttacccctgtccctcctaccctgcgccctaatgtgcccgtgggagtacgtgagtcggtccgggggtacggcacggccaacccgtcctgcctgtacaggtgtgacctctggctgctcctgagtgtgcgcctctggagctcctccaagctgagaggagcctagtacgtcgtggtggtctgcaccgtgcaagtcgtcgtcgtagaactggctagtaggaccagtcctaccggcgtgagacgaagaggccccagtaccgaagatcccggctgcaaatcctgctggacaaggaccatcagtttcgtacaggtatttaacagtattaataaaaagtaaagtaccgtgtgggcgagggatcgacgctccgtgagaggaagagctggcgaacgcgcccgaagaggtggcgaacgcccctgcggagctcgtggaagcgccggtcgtgcctgcgaacgcgctcgaaggcagacgaggtcctgcgatgaggaaacgtgcagttaaaacatggtgacataatcgtgcaaaagctgaaacaaaaatgaactaatatctgggctgaactgtaccgtgcgaaaccggtgctgtaggtcgcactgatccgaagctaggggcgctcgaaggcaaacgaggtcctgcgaggatggatcatcaagttacgacggggtgatgttttcgtacaaaaacagaaacaaaacttaagaaacctctgggctgagcagtaccgtgcgaaataggtgccgtaggtcgaggtcctgctccgacggtaggcgcgcgaggccgtggttgtaccggaccagctggaggtacgacgtccacggcgctgcgacaggagaagacgcgcatgaccgcacgcatcttctcctgcatccggtcgaaggtcaccctctgctcaacgtcagtcaagtgcaaacctctgttcaacctcacttggactgcggtgatatcggcactgatatcccgtgcggcatcagcctatgcaagatggaaataacaaattcagtagttgtcctatattatgcaagataaatgaaataagtgtaagaagtaatacaaattggatgtaccgccacgaagtagtctcggtcacggtgcgtgggatacgcgtccgtgacagcggcaacgtgcggctctggggcgtctggagtgaaggtcacacgcgcacgagtgcgaggaaggtaccaacgaaggtagtcacggtagttctcctccgtgtgtgggaagagctcgttgatcacctcctctgtagctaacacccagtcgtcaacgtactgctgtacacgtggagcccaaagtgcgcctgctagctgtccccgtcgagtcaacctgtgaagagaggtaaattatatggctcgatgaagtaattatcataaaaatttagaaatgaacaatccgaactcacgagtggtcggcagggaggacggtcggctgcacgttgcccggaaacacctgcctaagtccgaactgtctcatcacacgctgcgggcagtgaggctcaacgaaaatgtcgaacaccatcggcaggacggtgagccagtaagcctggtcgcgtgtgcacaaggacgaaagtcctagcggtgctctcgcagcgacggcctcttctgtgtacggctcccagatgacgtcgctcggctggagacggtcaaacttgaacacgaagtccgggtaaccacgtctcacctggacgtgagcgtaacgacgctgcaataaacatgatcggaattagacatgttatgtgaagaaaaaaaaagacgactgataaacttataacgcagcgaagttgcactaaccccacgtcgacaccagtaagtccccatcgtgggaccgtcctctggccactgcgcgctgcgaccaaccccgtagggtgcgctgtccaccactggtcgacctatggcaaacctctcggctgcccaaagctgaagcaacatagggcagccagcgatgatcgctcccgcgtcagtcttcgtgcacgcctcacagagggcacggtacgtggctgctagcacggcagaaccccagctccactgcggcacgtcctgtggctgagcatccgcgatggaccgtgcgtagtggaccagccggaagtccacagcgtgcccgtgggtgctagtgaacatcacccacccgaacaaccacaacaggtacgcctcaagggagcgtcggaccgagtaatcatcagcgtcagggtgcagaaggtccgcctacaattaagaatgaaatattagtacaaaacaatcattcggtcgcaaataagcacgtatgataataacaacttatttacttacagtgaactggagcaaccaagccttgctaggcccgactgtagagtacggaggaagggtggtggtcggtcctaggtgtggaaggcgcatcacctgctcgaagcgcgcagtgatatcctccttccacccaaaaacaccgtccacgggaccaactgctgctcccgccagcggtagcccgagcaggtacgacacgtcctgcagtgtcggagccatctccccacagggaaggtggaacgtgtgcgtctcaggtctccagcggtctacaagagcggcaaggagtgaccgatctgcatcccaccgcttcgctgggtcacggtcgtccgccgccgcctcaacaagcctacaaagtggtagaaggcctgccgcacgcaacctgtatagagcaaacttcaaacataagtacaacacaaagcaaagttgagttgaaatgtgaacatacgcgtaccaaggaacgtgacgggggtcgacacgcaaccactcgcgcgacgtgcgtggacggaaggtgccgagctgtgcaccctcgactgctgacaggaacgagcggtggttcctgtcaatcccacggttcaacagcgccggtgtgtcgtacgccatacctgcatcaaataggttgatcagaaacatataaataattagttcaacataagtaataaatgttgaactaagcgaattactaacacatattaaacaagagtacaaacaaacaaaagtgtttagtccgaacactcatcacgataacattatgatacaacaccgaataattcgcaatactactagtacaacaatagtcggaggtactcattacaacaacattgaattgaaattacacgatagaagtatttagtccgaacactcattacatcacaacagcattttatttcctaaatcgaaagcattgttacaccatggaatcgcctgctgcgcgacgacgccttggccttgcgcgcctgcttgttgttccttcaccaggtggtcgcctaccatcacttgcctgtccagatggactagcatctgcgccgcttggaacttctgcattcttcgggcatttcttgtaagtatggccgcgcagatcacacttgctgcagcgtaaagtcctcccacctgcttctgactcatccatatcatttctgatgcgtctagtttggcgtcgaccctttttcacccttaacttagatggatctggaatataaaaaacttgggcactcagcgttgtgtaagatcctgagatcccgaacccatatatctcctcactccatgtatgaaagattgcttctttcctgaaataatttgagacgtacacattgggagatatgccacaatcaccggcagcagcaagaacgtgtgagcaaggaaggtgatgaagcttcggcttcatacaactgcaggtacatccaccatccgccttcaagacacattcctgcacggcttgcttgcgatagataccacgcctgctcctatcaacacatattatttcataccgatgcacttgtgtgccttgagcaacaactcgatgtctccgtgcctttttgattttatcttccatgtactttgtcactacgttgccaaacactatgttgtcatcggccatggacggaccaattttcttgtatcgatccctaaagtacgcttgcgtgccgtgaaggatgaattcaacaatagcaaccaatggaagtacccgaactcctcgcattacccagttgtacacctctgccaaattggttgtcattatgccataccgagatccatcggtgtcgaacaatagagaccacttctccttaggctcattctcaatccactgagtgaaatttctgatggacgaccctgacctccttctcattgttggtgggtcatcatataatgcaccaagaggtatgggaggctcgtcaccttcaactagtggtctgcgagattgctcatctgtttgcttcgttgtcaactcatccaacttgtcccacaactcattaaatttcttctcttggttctgtgcacagagcctcttaaagagctccataagatgcttgttcttgaattgcttgtagaaatttgcacccatgtgacgcatgcaccaccgactccgaacatcaggccacttagctggaagtcccttctcatcccaaccgttctgcaagtagtcaatagcccgcaacatacccgcatgacgatcatgtataaggcaaacgttgggcctcatacgcaccactgcaatgtgcactctctctaggaaccagtaccagctttcagtgttctcactctctacaaatgcaaaagccataggtagaacctggttgttcccatcacacccaattgctgtcaatatctgacctcggtatttacctgtcataaaagttccatctatgcatagaacaggtcgacaatgcacaaaagcattgatgcaagcacccaatgagaaaaaggctctttgcagcacactctttgttcgatcatcaaccgatgtaaatgtatgtaggtcatagtacgtattattattcctctgggcaatggtggctaacaaacgaggcaaattatcataagaagcttcaaatgtgccatacctcatctcaatgatcttttgtttggctctccaggcctttgcatagcttatggtgtacttgaatttgttctcgatgtgcctaataattgattttggttcaaagccaatgttaccaacaacactgctgtacatctcacttgccacaaaagctgaagtgatgtttcggtgatacttctccaccccttgtaagtagcacttgtgctcggacacaatgctaacttttcaataatcattccatttacccttatatgcatggacacgccacggacaatcttccttcatgcacctcacttcatacacataatttgttgacttgaccaccctaaactctctctgcaaggaaactgcccaatgcttcaccgcctccttcatctcatccttatgagcatatcttgcaccctcaattacctcgttctccttatactcccagggtacatgatcaccctctgatataacaagtccagagaagtcctcatttgcccaatcagtggccattacatcaccttcctcatcggatgatgcgtcgtcgtccacttcctcattatccgaatcttccctctccatttcatcaacaattataccgactctctccccctcatccgccatgcccatagcctgcttctcccttggttgattttcctcattttgcatcgatggtccaacaacatcccctgcattgataggaccctctacatcttcggtttgcattgaaacatttatatctttctcttgtaccgacacaaatataacgaggggccatgaccgttcaaaagccatttccacataccgtctccaagcatcagtgctgtccatcggcattagttcccaaaaataaccttctgttgcacgactcactacaactgacactgacattgtgtagacttcttggtctattctaaatcctctcaacaaccaactataaattgactgaaatgttctctccgcaggcctatcgatgcccttagatgtcattacaaaatctgacagatcaacaccatctggaccaaatctaatatttccttcaccgtgaactatctgaaatgtgaccttacttgacattgtgcctgatgaaaacaataactgcgttaacctcgcatttctgtactacgccctaagttacattctctacaatattgttctctaaatttctaaaattacgttacattctccagatcaaactaaactacatcttacaattaacactactgtctatgtctcaattcatactattatattctatgctttggatctacacatatgtgctgtgtgctacagatgtgctaaaatatatggaactaaaactaaaacgcaacatatatactcaaacataacatattagtacaaatgcaaaagatgtatgggagcatacctgtgatgaattgagcgaaccagtagggcttcgccgctccccttctgctgccctcccctctctctcttttgttttttttggatttttagtgaatataatgaaatttcacagaggagggactgggctttatagggggagaggcaaaaatcgccctcccccagggcggcaaggggg

SEQ ID NO: 26581 - DNA, 30317 bp, Oryza sativa
  unsure (1)..(30317): unsure at all n locations
cggcaagggggccgcctgcaaattctttgacggccgtcgcccggaagcaaacggccgtctgccacgtcattttcgccgccctctgagagggcgatttttaaaaatcgccctcccagagggcggtaggcgactccttccgtcaattttcaaaatggaaaattatttttgtaaaacttttaataaaaaaaattataaataaaaaaaattcatgaaacaacacacaggcgtaactaacatcagtgatatttgggccgaaagagcccatgtaagggttagaggcccggtccatccaaacttgcggccgcatcgcggcatccaccaacgaggccgtcatctcggcccgcgcgcgggcattgggccacggtggcatctcgggcattccggcccacgtatcggtgtaacggcgaaatcactagccgcacacgcgagcggagccggaggaggagacggagccggcaggatccaccactgctccagctctctccactctcactccccgattcgccggcgagcaggcggcggcggcggagctcaaggcttcctctccgctccgcaggtaaacaccaggcaccatcccctcggctgtggctcccccgttcctcttgtcccactctctcttggccccgaccctcgggagtccggcgctaccgaatccgtcttccccccggagctgtcgaaggagcgccgcgtgcggccgtgctactcccaccgacgccgcgtcacctcgaaggcgaaggggctcttctcccctcccctccaatggactgaggcgtatcccgtctaggccgatttcttctgttgagacggaagccctaacatagctagattgctttttccaatgatttgtcgcttgctaccagcaatcaaatccttgtgttattttttgcttgtctgtggccactccaatccacacatatagtcgcatatttgatttgattttattactcgaatggcagcttgctttgcaaaattttcagaagcgcaactgaaccctcgcgcctgatatctaaatagctgctcacgaatccacctcccttattgtgtaccaggtaccaagatgaaggtcaagattcttcagtggcattcggtggcttcttggacatgggacgcccaggatgaaacctgtggtatatgcaggatggcattcgacggctgctgccctgattgtaagttccccggcgacgattgcccgctcatctggggctcctgcaaccacgctttccatctccactgcatactcaagtgggtcaattctcaaacatccacaccactttgcccaatgtgccgtagggagtggcaattcaagggctaatggcatctgaaattatatcactagtatctagtttgcatgtttccttgtagagaactgcaggaaaacttttctggaacttagaaatgttgtcttcaagtactatgtactaatattttctgcaaatgctgatggtcacaatctgctaagtgaaactgtgagccagtttcatatctgtagtgtccttttgggagtctgatcgagcaaatgaattgttacatttgaaaggctgaataatctgaggttatcacaaattttctcttactgtttattttcagaaagattatatatttgtatttaccaaccaaagatgattaattgtgttcgtgtagactagtacaaaagcaatcatgtaacatctagcaggttgtgtatattttttccctgtaattcctaacttcatcaaagcatctctccctttgaggagcaactgatagaccctaacctaaaaatgcagtatgattcagaacgagttataccagtgtttgtttatatggtgagacccattgtacagtcactcacagaaagttttatcttaataaattcatgacatgcttacataacttaaatcactaagtgctgattaggtattgttctttgttttgcactcagagttgcacgtgcattttggattttatatattgaaagctaaattttgatataggctcgtgttagcttagaattgccataactcaaatgtaaggatctgttccaagtatccccttccacctataaaattgcatcttgtacatgttaatattaatactgtaccgctgtatatcagtatatgaccaacaaagaactgcagaaccttttatatttatgacctagcaagtgacaggatgaatcaatttgaatgaatgaaaaaaaaacattaatgatgaatgttactttgttgtattgtggtaaatgatgttatccattccctgcaaaatatttgctctctagtttacttaggaaaaagtacgaattaccccccccccccactattgtggtcgtccaaattaccccctgaaccacaaaaccagacattcttcacctccaactatgtaaaccggacgaattacccccctcgacctaatctgcggtggttttggtctacgtggcgtacacgtggcagtccagtcaacattctatttattaaaaaacatgggacccacctgtcatatcctcttccattgttcctctctctcttctctctctctctctcactctcactctcactcttcccctctctctctctctctctctctctctcacgcgcacggcagcaggcggcggcggcggcgcacacgcaccggaagcggcggcgaggacagccgcaatagttcgagggggtaattcgtactttttccttttacttatctagaaaatgcaaacaataaaatctgaaagctgtgtaattggggattgaacacctttgcataacttcttataaacatctcacttttctcatatctgcgtctattcagggcagatttatttgcatgttgctgaatggtgactatgtggctgggtgcatttcactttactcattgtctaccagtgatcagagcagaccttttttgcctgttgagtaaattgtggcctttgtggcagggcgtatacatttatgtgtctcataatttgttgtcttgtactcttgtagaatattgcaattatactcttgtagattaaatttgtgcaagtaagtaatctattgttgttggcggctcggctggtacgctttcgagaatttaatctctttctttcttttgcaaaatgagtagaatttcagccttcttggagaggtttgttctctttgcctggttactagatagcctagaagagcattttttaaatttatttagtcaaaagtgatttttagtgatatttccagaaactgtgctaaaaattaccatgtttctatatccaggttccagctcattcttttcattttgataagcaaactaggtgtccttttttcataagcaggaagggaaatcttaggataaattagtacccttcctgtttttaaaatttattataagatacgttgaagtattcttttgaaataaaattggaatttaaagcaatcttccaggccgttaattggggccatacagactgggtcttcacttttctaatgcctttcggtctgaattatgtttcgtatagctgctccttttcttttcagggcaggaagctgcacctcgtccatgttgtgctgtccagggtccaggctccaggctcgcttgcaactgtgggcaaatctcgtggtatttcgtggccgctactccaccatttcatgctaagcagctaatgcctgtcgggctaatggcatcacgcatttcattagctactgacaaaaaatgatattctctcctcctgatgatggttgccagcagtgagcgttacagttaagcttgttctccaaaaatatcatattgttctactacttgcagatctcccattctacatggcaccaaatttcaggtgaactgctcctttccaatggagccttggcacgaaagcgacctggatttttcgaggctgccactacgtgacaacaattgtgataggcagtttggtggtggccgcatgcagctgcttgccttgactgaaaattgattttccagcttgtgaccactgtttctggctgtcagcttgctccggagatacataccatgtgaccccatggatcagtggcatggaattcctttggtgttttcaggttgcttgaatttctgggaagcttcctgttaggctacaacgttaacagtgtttgagccagttcgtttttagtactccgtacatttcaatccgtggtaagacctgaaaaaatttcacgtgtgtagccatgctctgatttaagcctgttcggtcgctttgtacagcagtacaggccaggtcatctgcattggttgctgggtgtccgtatacgattttacctgtgcctggtcacctggccttgctgccttgcatatgataagctgtatcccagtgaggcttgactcggagtaaactagtgccattctgaaacgggcgcagccgcggaaattacgctgttatggtggttgcagacttgcagctcatggcagagcgctacgcggttcacatcttaatcaatcgaggaagccatgttccccactgacgagcagcagccagctaccgagcatggtgcgctgttacccttggacattggatactttggggtatcattacgaaattgttactgacgcagcaacgttgtagggctagccgggcagcggcatctgtttcccgattgcagtaaatgcaagtgacgagatcgaggcaaacatgagccggaactcttatcttttcgtctatgcttatactccctccgtacttagagagtcgtttagaacaatgtttaagtcaaatcttaagaatataaatcatgaataactcttaagttgttgagtttgaaaatataaaaattatatgtatagatttgtcttgaaaaatactctcataaaagtatacatatatcacttttcaataaatacttttatagaaataagaaatcaaagttgtgttttggagactgtgtcgctgtcctaaacgacttcctttacgagtatggagggagtacttatcaaccaaaatttaaattttcaaccttaaatttaaagatgtttttaaagtttttttattgaagtttattttttcagcctttgcttttagatcgctaagaatacatatataaaagttctatttacaaattactactttctccatttcacagcatcaatatggatgtgagaaatgttagaatgacttacatcattttacaaatatagcgtttggtggggccgctggattctggaagtaaccgagaatgatcaaggaaaactcgtcaagttctggcacttgtcagagtgaaatttcggaatactatcctcctgataattcgattactagattcctgataattacccggacgggcaaaccgtgtcagggaattcggtttgtgcatccaaggcacgaaacgggtgaagtgaacagagcggcacgtcggggcgacaagggccccaccgttcagtttcagtggcacgaagcgacgcgacgcgtgttcgcatgacccgccgcattccgcggccgtgccgaaagtgtgaacggtgaacctctcccctggcccgcgggccccaccccccaatcatcttctcctggccttcagcctccagctgatgccaactgccatgtcagcaactaacgcgctcgcttccttcccgcctcgcctcaacgcaaagcgagatccccccctatacctattaatacctcatcttgtcgtctcgtatcatctcatctcatcacatcagcacacatcacacgcgccgattccgaagaaatcaatcaaccaactactaggcgaaagcaagagcggatcgggtgctgcatttcgcggtcgttttcttcctctgaattctggtgtttgcggttgcggcaatggcgttggtggcggcagcggcggcgaatccgaagcagaaacagaagcagcagaaggcgtcgatcgggaggcgggcgtggcggctgctgcgcctggcggtgctctgggcgaggaagggcagcgcggtgcacagcctccgcctgctcagcaacctgcggcgcgccggcgtgggcctcggcgtcgtcggccgaggcgaccgcctggggtacggcgagcgggagtactcgatcgaggagacgccggcgttccggttccgcacgccgtcggcgcgggtgctccgcctaatcccctgcatcgcccccgccgtcccggacacgcccgggctctacggcgacgaggaccgctacttcttcgcccgccgcgacacggagcccgagtgcggcggcggcgtcgggtattacgactacaatggcgagccgggcgagtgcggcggcgtggacgacgagagcttccgcgacggcgcgatggaggagcagctcctcgagctgtccatgctggaggcgagcgccgccgccgtgacggaggacgccggcgtggacgccaaggcggaggagttcatcgccaaattccacgcgcagatgaagctacagaggcaaatctcatggctgcagtacaacgagatgatggagaggagcctccgctagatgattattcctacccaataagatccattttttgcgttttgtttcaccgattcaaattcatacaccagctaaaaatacagagatattgaggagtagcttcgtatacgtacagtacagatcaatacatttttaaatttatttttcttccttgagcattgatattggtttggttcattggttgcgaattgatatctgtacattttgtgcattgagaataaacgagcagagcagaaatttcagattcaggaggaggcttcttcttggacgcgcagaagaacatgcagttgctttggctcaatgtaagctgtactgctgtgtatccgcatggtacacttgcttgattcaattgtggtattactctttacctaatttgttcgttgggttacataattagatgtacgtacacctggatcttgaatctaatgatgacagcatttgacgatattaatgaaaacccgtaccaaggctatgtttagtttctaaaatcgaagagaagtttggagaaaattggtagtttagaaaaaaagttgggagtttatgtgagtagaaaaattttcgatgtgatgtgatgtgatggaaaattgagagttcgggggaagtttggtttgaactaaacagaaaatttgtttatggatgattatagtgaattcgtgtcacaaatgagtatgttcacgtcaaccattgctgcctttctagtttgatttcacgccaaaattaaaggtttggttaaaattagaacaatataacagaaaagttaaaattttatgtgtgtagaaaaattttgatacatgaaaaagatagaagtttgaagaaaaagtttagaactaaacagggccttaaccaatcagttcggctcgactgatctagacatcacagtttatgcactagtacgaccgatctgcctgtccttgtttgcgtcgtgccgaccgaccgccacgccgtggctgggtctagcggaaaccagcgacctgccctgacgccgtcaagcggcgaggattcagaatcctctgctgcaaggctggaatggaaaaaggctgctaacacaaaccgagtctggcgatcgaatcatttctgtacctgttattactggtactataaatcagctttaaaattttttatatatattattaaaatatgttatattttgggagtgtttgggaattagggactaaatttagtccctctcacaaaagtataagttcctaccataggaacttataggaacttatgcttttgtgagagggactaaagtttagccccactttagtccctccaaccaaacaccacctttgtatttggtttattttgaagtgggaacagtaatgagtgatgtatagagtaatccacgtttcaccgagctgctgttggctcgtagtttttttttcactgtttaaccactcgtctaattcaaaaaaatttaaaattattatttattttttacttactttattattcaaagtattttagacataacgttttgttttttatatttacataaattttttaaataagacaagtgatcaaacaatataagaaaaactaaaaatccttataataagacggagggagtaatttttgggcagatcgtctctcggaagtcgagagcaagaacgtgagaggttattattccttgaccgaaccgagctgatccctgtaaagaacgtggtgcgtggaagatgggccggacgatcttcggaactccatgtgaagttgcaaaagtcttgacggctatagtccttgcacgtttgattgggcttttcagccatgaacaacgcaaaaccacaactagaagtggtctcggggactgaattttcccttttgtctttttctttcaaaaaaaatattttataagtagatcagtgataaaacttatttcgagaatggaactttttcaacgtcattatcattgatgtcgtgattcaacatactaacgctagcgtcatctctctagcctcgtcgtgaaagctaggtcacttatgttaagagcgaggggccaatgacattagcactgataacctatttatattttttaaaaaatgatttatctgtaattaaaaaaactatttacaaatagttccttagagctagtgtcattgacattgaggctatatttagttaatattttttattattacaaatagatcatttttacttttttataaatagatccttggcgtcaatggcattagcaccgacccccttcatacaagtgacttagttttcacggggaggctagtgggacgtcactaatgtcattgatgtcgaaaaagagtctattctcgaaagaaattttttagggtgcctatttataaaataagttcttaaaattctaaaatatatataaaaaatccatatcttagggatagaaaatatgccatataggatgagactaagattaatgttagcggtactacctttcccatgtacagtagcttcaagtataacacattcattatttttattgcccattttaattttggctcctccattttacattcaagttcttatataattttacaacacaaactcctagataacaaaatacactcacatattaaaccaatagtcacagccgttcctcccttcaccatcatcgatgaccgctccaccatccttctcccactccggccaccgcaacatctcccgcttcttgctccggccaccaagctgctcccctttcactcaaatcttaaaagtgtggagttcatcttcatcgggtcgccgtcgcttctcctctcttaagcggcgccatgaccccccctcctcgtcgtcgtaggctacatatggataagatgggggtggctgactggcagtcgaggaggcgaggtgatgtctggcaatgaggtgagcctaggtgagacgtcggctcgtctctttcaaggccaataccggtgaatccccaagctcgacgccaaatccttatgcatagtgtcttcctgctcattgtgggcttcatctccactgtccagtcttgtcgttcacctagaacatgccatagttgcaggccaataaatgccaacatggtgtagatcaacatcaaaacaatgagttccccaatacaactgctatctctatgttcttcgaccatcatttttccctatctcctctccaattgcccttcccctttgcggccgccttctaccaagaaatcaagcgaggcagaggggaccacactggtcgcttgggaggtacgccgtcttgacacaacgttgcttttggccatgtctacaccaccatgtggcttcagggctgcaaggcactaatgttgtctacaagccacagttggctctaatgggcctatgcacaactaacaatggcaaacggtataaaatttgtcaaaaataaattatttttaaattttatttgagtctaatagggttaccgcggttttacatttaccgtatctgacggtaagcgcaattactgtgtggttaccgcctttttgtaaaccatggctatgagtggtgcttatgcaaatttgttcaggggtaagcttgcaaagttgcactgagtggtgcacatacaagttcgtcctgcctagggtgtgtttagttcacgccaaaaataaaagtttgattgaaattggaacgatgtgatgaaaaagttggaagtttgtgttcgtaggaagtttgatgaaataaaaaaaactagcatggtggcccgtgcagattgcgtgcctctgcgcgcctagcatcattatattttctttcatataatatcatatatgttttctcattatattattcaaatatattaaaataacaacataattttaaattttgcaataactttacaaaactactaatgtgtaatattcatattatattttatatacgtgttagttattaattatttttaatatcaaattttagttatttgtaaattatatatattcctatatggactctagactcatcttttaatatttctttttttaatttcgaattttctgtaaattatatttctatatagactctatgctcttcttcccatattatttatttttatttctgaatttttattatttctaattgtatttctatgtggactctaaactcatctttcaatactatttaatttttaatttcgaatttcagttacttctaaattgtattcctatattgactttaaactcttattccaatgtttttcttaattttaaattttagttatttgtaaattgtatttttatacggactctaaactctacttttaattttattatgtttatttcaaattttagttattttaaattcctatatggactctatactctacttctaatattccttattttttaattccgaatttctatttttttcttaattgtatttctatatggactctatactctacttctaatattccttatttttaattttaaaattctattatttcctaattgtatttatatatagactctatactctacttctaatcttccttatttgtaattccgaattttggttatttcctaattatatttcaatacggactctatactctacttctaatattccttatttttaattccgaatttcaattatttcctaattgtatttctatatggactctagtctcattttctaatattccttattttttaattccgaatttcaactatttctaaattgtatttctatatggactctagtctcctcttcgaatattccttattttttaattccgaatttcagctatttctaaattgtatttctatatggactctgctttttctttctatatggactctagtctcctcttctaatattccttagtttttaattccgaatttcagctatttctaaattgtatttctatatggactctgctttttcttttttctccgattaacatgggaatttctagcccatgaaagtgaacgtgatgcctcttttttctattcctttaataatataatagattaaaaatttgaagaaaaagttaaagaactaaaccaggccttactctagtcaatggctgggataacgcacctgatctagcatgtactcccagacggcaagattgcacgcccaggattacgattctatgcatcggctacaaaaaaaaaagttgtggacgatactgatcgccggatcccaagattcaaatcgatctggtggcatcggctggtgctgacctgctgatgcaatcgccggccctgccaccgaaccagtaccaacggctcaatccaatccgggcccacctgtcatacaaatatccacgacaactctcccaacaaaatcatttttttcaaaccgcccctggcccaccacccagatgtgtttgacccggggctccaagcctccaaactctcgatccgaacagcgcccacccaataggaccacgccacgtcaccgcctacggtgttcgctgctcgatcggacatccctgccgtccgtcacgcgcatcaagattcgcgcgtggttcgccgcacgcttcagccacacccctcctcgtgatgggattccccttccgcaccgagaagaatttgaaatcctggtcgcttgaaaaagagccgttgcctcctctttcatcgttttccccaccacgcacacaccacctgctcccgtccacgccacggcgcggggactctcaccgacacgtgggacccacccgcgcgtggggcccacgcgtcagcctcgctcaccaccaacggtagtgcggggcccacctccccccaccccccgaattcgaaaaaaaacccaccaccattcgtgctgccgcttgcgtgttgttattactccttggatcgactcggccagcataaatgccccgcctttaatggcttccccgatctgatgcttccgccctccgcttctcgcctcgccgccgccgctgccgagaataccgccgctgcggcgctccacgtcgtcgccgtcgccgcgaggccacgtcggtaggcaggtactcccccgtgttcttctccccgctctctgttgttaggctcgtgttgcgtcgcgatcgatttgatgaggtgtttgtggctccgatccgttggtttctgtacgggtgaggtgaggtggatttttatgattgattttgtggtaggtgttgtattggtgattttttgttgcgggggatcgagcggatcggatgctgaagaacgggggagaaaagtgttggttttaagtagagattgtttgggatttgaagggagttgctacgagcgatggggacggagaaaggtggagcaaagattggtggcggcggcggaggaggaggaggaggaggaggtgggggtgggctgttcaacctgtttgactggaagcgcaagtcccggaagaagctgttctccaactcacccggtaggtgttcgctggaatgcctcgctagttttgttcttcctctgttgccgtgctttcttagccttttttcgcgtcatctttgttacagagggtgctaagctcgtgaagagaggcgaagaaaccttgccgtctgggcgcctccacttggtgagtgatctctgatcttgtcgttgcccttgctctgcgctgtgatttgcattgtgccgtggaacttgtgttcatgggtgtttgcggtattgtatctgcagattgatgatgatgaggggattggtgtgtcaagcttcaaagggagcagcgactacagctgtgcttcctcggttactgacgaggaagggcgtgagatgaaggcgccaggagtggtggccaggctcatgggcttggatgccatgccctctaccggggtcccggagccgtactgcacaccattccgtgacacacggtcgtttagggacagccagagcctaaagagaagcccagagtactccgggagtgaccagttcagttatgtgccacgaagagttgatggctacatgaggaagccattggatctgagagctcagaagatgccgagcagcccgattgagaggttccagatagaaacattgccgccaaggtcagccaaacccttaccaatgtcccatcacagattgttatctccaatcaagaatccgggatttagttcagcaagaaatgcggctcaaatcatggaggcagcagccaagattcttgagccaaggccacaggtcagttctagggagaaaatctgctcatacagtcctgcgcggattcctttgaggatttctgagacacgggagaatatcccagcttctcagagggcagtgtctcggcagctgcagtcatctcggaccaatcttgagctgcctgatgtgagattttccagggggcagcaaatgaacaggagctggaatagcgaagatgacatagtgatctttaggacttcatctgattcttatgagattaataaccctggcttttcaaagaacaacaaggggaagtccatttcattggcactgcaggcaaaggtgaatgtgcaaaagagagaaggattgggttcttctgggaagaattcaggaggacagaaagatcgtgatgagtgcagaacaagccaaccttttaggagtcagtccaatgcccagaagaataagcagcagaagaagccgtcatcatcaggtacttcctcccctgtccttaggcaaaacaaccagaaacaaaattctatggtaagcagaggaaagtcagcaccaaacaaatcagtctcaagccagcaaggtagaaagatggctggagattcctcaactgggaagctgaagaatgcaagcaaaatatctaaaggtggcagcagaaaggatattgtagaaagcataagttgtgataaggaaggttcatcgtcaaacaacaaggactttccacaaaagaagcgtttgatagagaggaactccaccaatgagaagggtatgttcgtgcctgaaaaatcagcagctagacttcagaagcaagttcaacctaatgttgtcatggatgagcacattaagtggaacaacgatagtaaagattctacagatgtagtatcatttacctttacctcaccattggttaaaccatcagcaggaccctccagactgtcagggaagtgggatacaagaagcaattttaatttggatgccataaatgagaaggatgattcagacaaaaagtccgaagggctctcatcagtaggattgaactttgtaaatggtgatgctttgagccttctcctagaaaagaaactaaaggagctaacatcaaagattgagccatccatcaactttactaggggcgacacatttgtgcccgcaaacttttccttggaagagcccgtggtctcctcttccagcaattgggatatggaaagcggagtatttgactgcagcccttctgaaggaaaaccttctcaatatgttgattattgccaatcagcgcagtcatcaaccaaaggccaaattttccgtggaagtaaattacaggtaaacaatagcacagagccacacactacccctgttagaacaaaagtatacttccatgctggcaggaataatcattttttcagtctatattcatcatttatctttgacaaaacattttttgaagaacttcctctttatgttaaaatagaaaatttggtcagcatatccattacatatttaaatagcatttttagggcctaatgtttttacttgaaatctttattttcaatgattgaacactcatttgctgcatactggggaccaccctaatgtttatgaagaaacatcaagcttccctccataaatctgtaaattccgtcattgtgttattgaagaaaaagatgatacagttccaaccttctgcaggctgacatttttttactgttttttgaagtttgaactctctgttgtgttgaacataaacattataagtgtgtatttatgatttaagtgattccattaccagctctcgtcatttgttcattatgcttgtcttctccaccttgatcctcgaatattttgcttctcgggtagttaggtgttggtgctgagccatgtacatgtccagtagatttctctgtgttatggcacatagattattctattatactagtgttattgattttggtatgtctgtttgtgtggcatctcctagctagtgttattttatttctgagaaaattcacatctgggtgtagtatttgttatgctatgtctgtttatgtgggcatcacctagcttgagttattttagttctgaagaaattccatttcatcttaggtggaggaaccagaagaatgcagcagcataagcaacgcaaggaaagaacaggagcatgaagatttaagtcccctctctgttcttgaaccaacctttctaaatgagagttgctggtcttctgattgctgctcaggcagtagcgatggtaattcaacttattgaaattctataatttgtaatttctaactgtaccatttaccttttcctgagtctaagtcatgcttagtctttacaggaagcaaaggatattcatcatcttctgaagttaaaaacatgccaaagaatttcctaagcaatccaccatcagtggatgctgaggccaagacaacagattcagtgtcttcttcatcgattgatgcatcagacacctcagcatcaatagatgcgtcggacatctcagatatcacccaatgttcaaagaaatctagaaactcagagctggagtacattggggatgttctaggcaatgtcaacctgacaaagggtggattggggtcattattcatcagtcaagatgatgtatcggtgatggacccccacctctttaacaaattggagagcatgaacttgtatacacaagggaaaaaaaatttggaccggcgagggtacagaaagctcctgttcgactgcgtaagtgaatgcctggagacgagacgtctcacatacttcagggcaggatatgcagcatggagcaaagggatggcagcgatgagcaggggcatagaaactgaagtctgcaatgagataggtggttggaggagcatgggcgaatgggtggaggatgaacttgtcgacaaggacatgagcagtgggctgggcacatgggttgattttcgggtggaggagttcgagacaggagaagagttggagagggaaatactgagctcactggtcgacgaggtgatcggcgacgtctttgtgagacgacgggacggcaggagtgtaaatttgtaatctgatctcgagtgttgttgtttttgttctgtaattttgttttgttaagttatatccatccctatttgatttgtcgaccagacttgatcaaatcagttatatatatgtgttgatttgagactgcatagtaatctcaatcaattcaaatactgaatgtgctccccttggccgagatgatttcaaggactgcaagttcaagtgacaatgttatactgggtaatactagtgcatttgaacgttcttatacctgccaatgtaatgcaaaggttatctctacaagctgaagccaccagttattactagtaataaactgggaattgatttgcgcctcacaagttgctggaatgctcttggtgatggacataaaacccctcaggttcagcatgatgtgttgatgtggtcttcataaataagaaggttaggatcatattcatgggcgtgccgacaggtcacgctgtcctggcctagcattctcgctagaagccagatgccagcattatttgtccaatgccatcgagatcctatcctatacatttgatgtgtgatgttatttggttctgatccagttctgcagttcctgtgttttaacattggttgatgcagttcctgtatttttctgcaactgcaatctgttagtttgtgacatcatgctatactgtactactccatccctcctaaaatataatcattctagctttagtattagtttaagtaagtttatctaacacgtcaaataagtttaaaatttttagttgaaaccaagtattcactatcgtaaatataattcagttgatctaataaggatgttcactatcataaatatataagcttaggatggtttgatttagaacaaaactatacaagtgattatattttttagagcgatgaagtagctttttgcatgtggggcgcgatcgaaacacgtgatatatggtttctccagcgaagtttgatggcggcggcaacgggataaaatagaggactcgactctgtcaccgtgaaaatgggcgacctacaaaactgagagactggcctacatatggtgttgggcttgtggagggatcggactaactgttcggtgtgattgcaccataccttctcttaatttcaaaatatgggaattctacaactaagatttttttttaaaaaaaatacgtactagaccgatatatcttttcagtgcgattgcactgtaccttctcttaatttcaaaatatgggaaattctacaactaagattttttttttgaaaactatgtactagaccgatatatcttgagattgatgaagtcatcacatgcatacagctgtcgacagttatgccatctgccattgaaatatccgtaaatagtagaacatgtgtcaagtctataactaagggcttgttcactttatagccattttgaaccattccaaaatttggcatttccaaaattttggcaaaatgacaacattatcaaattttagtagcatatattaaatgtgatattgttaaatatattgtattattaagatagttttgaaatgaggcaccacattcgctgtgggggttagaaattctcatattaatcggagaaaaagaaaagcagagtccaaatagaaatacaatttagaaataactgaaattcagaattaaaaataagtaatattgaaataacagtccatataagaacccaatataagattaatagaaatttagaataaaaaataaaaatcgaaattagaaaaaagaaagaaagaagagttaagtagaaatacaattttaaaataactgaaattcagattgaaaaataagcaatattaaaagaatagtccatataagaatgcaatacgagtttaattaaaatccagaataaaaaataaaatccaaaactagaaaaaaaatcaagtaagaatacaattttgaaacaactgaaattgaaaataaaaaataaaataaattcgaaaactagaaaaaaggaaataagagttcaactacaaatacaatttataaataactaaaattgataataaaaataaatactattgaaagaagagaccgtctagaactcgagtaatcttggatatggtcttttctcggtcgatgcattcccttctagggtcgaagtaaaaaccgctcctcactagtttaccgaaattcaacaaaaaccgataaaaaccgatgagtttcgatcaacgccgtataaaaaccggctgatactgactggttttcataaaccgagaccttgcagtttcacgaaatccgattgattttcgtgaaattccatcggttttgtgaaccccgttgtacacctaggacggtagatagtctataactattcttgcactatttgaaaatttgatgtacggtaaaagaataacggttttgaattttttaaaagaactggtttatgtttcttaggatagtgagtctatatgcaagataagttcgttacgattttaggtcattttgtaaatccgaagacatcatttactacttactgtagaacagtacaacaagaaaaaaatatcttcaaaacataaaaatattatggaaccggaagggcgctacgcatcagatgtcctgagatttgcattatatgttaaaaaatgttgcaatgtttcattgctcgaaaaaaatgtttcaacatgaattgttttatgatgtttcatctttcactgaagaatgtttcaccgctttaacgaaaatgtttcaatcaaatgtaacactcaagaacggtaacaacaacaacaaaaacacattatgtgcaacatccaatattgatttaaaaaacatttagaaaagacatattgcaacatcgcaaaaacactgtatgcaacaatgctcgctagctcgacctcgtccgagcgccgccaccggagcctaggcacagtggaggcgtgcttcgcccctacctcccctcgggccgccgcaccgccgcgcttctctgctccggcaccgccaccgcctcgtcgctccgcgtccgcccgcttcttgtcgttgctagcacacacatggggagataagagagaaaaatgaatggttggaaataaagattagattgactgccggagaaagaagatagagagagtagttaggtgggacccactaggttagcgtccgattttttatcatatgccggacgtacgagttaaagcattttcggaagaataccagtactaccgctctagacatgtactccctccgtttcaggtcataagatgttttaactttggtcaaagtcaaaccgcttcaagtttgcccaagtttatataaaaaaatagtaatatttttgacttgagatattataaaattatatgtaattattaattaaaaaaactaatttagtaatgtaaatattattatatttatctataaacgtagataaatttaaagcagtttgtgttggactattcttatagcttgaaacggagctgagtatcttaccactgttgtaaatttgttgtgaaccttgtgatgccctcgctggactgttccttggatcaaagacgtggcggcagtaggcacaccgcccaagttggattagttggagcagtaaatactatacaccccatccaaggaggcgtagcggctgacccacccccccnnntnnnnannatnccatacatttcaccgcccctgccttctcctcttctctctctctctccnntcataacccctcccatcccatctccctccaccttcccaaatcccaaccctcnttccattccatcccacccccccgccactccatccaaaggcgcgccnaggcgccatggacgactacattcgacagcatctgctccaccccattctccagcgcgccgtccagccccggcaggtcgcctgccaccggcggcggctacttcttcagcgcgccggccagccccatccaccacctgctcctctcctcctcctcggttgcctccggtgtggtgtcgggggcggggtatggcggcgtgggcgatgcggagttcgagttcggcggccccggcgggcccatgatctccgccgacgagctcttccacaacggccagatccggccgctcaccctgcccccgctcccggatctcgaccccggcagcgacgacgacgacggcggcggcggcgacttccgccccgggccggtgcgaggccgcgagctgacgctgcggagcgggtccgtgcaccgccgcacgcggtccatgtcgccgctccgcggcgcgtccccgcggctcaagctgctcaatgcgctcgtccccgccccggatcttggctccgagccaactccatcgcactcggctgggtcggaggaggccacgccaccggtcaccgcctcgtcacgctcgtcctcctcctcctcgacgtcctcgtcctcgtcctcctcgtcgtccgcccgcgggtcacggcggtgggtgttcctcaaggacatgctcctccaccgcagcaagagcgagccaggcggagcccacgcgcacgacgcccccgccaagcccgagaaggcgtggcagttctcgccctcgtgggcatcatcgagagacaggatcgccgcaaagctccgcgcggcgaggtcaccactaccaccacagccacaatcggaagcgtcgtcggacgccggcggcggcgaagaggcgcaggcgacgcgggggcgcgcgaggggcggcaagggcaggcggcgctcgagcacggtcgcggcggcgcacgagcgtctctacgcggcgcggaaccgggcgcaggcggaggagatgcggcggcgcacgttcctcccctaccggcagggcctcctcggctgcctcggcttcagctcccgcggttacggcgcgctccacggcttcacaaaaaccctcaaccccgtcttctcccggtaaaaaccaaaggcaaacgcctcatcggccaaaaaaactccaaaatagagagcaaatgggaagagcttaaccaagttcttcgctgttgcccgttaattaattaatattattatttcctgtgtaagcgaagcttgtactactttgtttttttttcttttcctttttctgccttcgatttgtgcttgggttttgtataggcaggcagcgtgagagggataacaggattcctcccttcgttcggaggcgttggtggtagtagtagttgtcacaggtcagtcacatcaactggaaacatcagcggttggtaaatgtggcgcgaagcagaatgcctggtgatttttttccccttcccctacccattcttgtgtgcatggaactatcatctcaaccctgtactactcgtagtaagtggagtatatacacgttctactaagtgtcatcttcacatgagattcttgtcactgcattgtgtgtgtcaaagcacacatgagtatactagcagtattacgtacacgagcttttgcctactccaatgcgttagatttgcttttggtgaagagccgtacggccgcagcaaagcaccacctttcctttcccgagccacggtacgaaacaaaaagatcgcccacgcctccacgcgcaccggttccaatttccaaggttcgtccgacttccgctgctcgccacgagccccgggagttggcgtcaccagtcaccaccaccaccaagcatatcgtgtccgtgtcacggtggagccccgcgcgcgggccagccgcgtgagtgatgaatgaatactagtacaacaagcaggcaagcggagggggcgcacgatccacatggggggcgggggcctcacgccgggcacgtgccgtgtcggggtggtggtggtggtggtgcccgagtcgtcgtcctcctcggctcgacggctcgccctcccctcctccagtccagctgccgccgcataattggggtgtttttcgagatccgcagcgcgcgtgcggacggggaaaaaaatgggggaaaaaaatggggttccaccccgcgctgactgacgtgcgggcgccgcgggagggtgttcatccatgatcgcgcggtttatccggtcaatctcgagttcgcgacgtgtactgtgtacatgagttgctgctaataaatatattgtcccttgaacaaaccgatcgataagtatatgatcgcgaaaaggtacaacttgattaatcttatgtgctcggatgaaggtgcggttcttattaggggaaaaaaagatgatctgttttaagtgtttgttaggagacgacgtggtaggcattttgagctgacaagtacactcctttaaaaggcttttgatctagtttagtcctgtacatgcatggatgaagctagcgttaattagttatcacaacattaaccactcttccagatcagtactagtactcgtcatcacaggaacgggcttcatcttgcacgtgttaatctagctgtcgatcgagcttaattatctttcttctcttttttgcgaacggtacattcagcaatacagttgttgtcttaatcttcagggtgctgctggactgcggccatgacagatgcttagtccgcatgggtcatggctacggtctacgtagcgcgacgtgttaaccgattgtatcagtgggcacagcaatcggccaaaagatgaataatggaggaacaagctgatttgtttttcctgaaaagtttgggggacccaacaaataaacgtatcactgttgccgttagtaaatttctcttccagaagatccaaccagctagctgagatgtgtaaaagaaaacggagcaactgatctccatacaagatgctttacttcgactctgcagagtgcagatcgatactatatactgctactagtatacaacagtgtccgaacacttaatttctgttgtgcctcctgacgtctacgactcgcatacaatgcaccacagcggcagcatgattagcgacgctccaacgccaattaaaacagaccgagcaagagaactcaaaacagctcgccgatgagatcgctgtgcgatgaacgccaccggacaaacctgcatcatgccgccgcacagtcccggccggtgagcaatccaattcgcgcccaccggcagagattatatacatatgggccctgaaatccccgattatattctcgattagcatgaacaaacacgtattagcggcccaaagctcgtacgcagcgcgacccttgttcgatcgatcggccgccgcgacatcaatacaactgcatgcgaccatgatccatccacgcataggaggtttgatggtgagacgtcgccatggatgaggaatttctcggagagttcagagactttcagttaagttccagacgcgaggctgggtttagccaggtcatgtgagcgcatgtgatcggccatcaatctccttgccacaagctgacagtcgcgcagtggctggccggctgctacaatggattggtcccgcggctctcgtacgcacgctgcggcgcagacacgcacaattatttgaggggtgtacccgcgtacatagaggctaaaaagactcacaatgagtgaccccggtttgacgtagctagtagatcgatcgatcgcaaaataattgctgaaaaggagacacgtgaatttgtacacatagtgggaggaaaaagctgaaccagttcagtcctaccttagtgcaaatgatatccccttcctgtagagatcaaaagtcagttcacggcttatggcagatccacaattaatacaggtaggagtaggagtttagctacaggctagtagaaacaatacactgtaattagctaggactagggtagtataagtacactgtgattacactgtataagtctaggtaacgagggagcaaagtcagccctaatcttgtgcaccaaaaatctgactgtaatcaaagtaaaattatgtcgtcataaatatagcaataccgctggaagaaagcaccgaattgacagcatcctaaatatctttgatcatgatttagcacgctagagtaacgccatcgacgaacgggcgtacccgtacatgggcagcatcgactgatcgatctcgcacccccatttattcagaagatcttaagaatctgacgcgagtgcctgattcagactgcgacaccgaaattgaatcgatagttgggaatgctagctagccaagccacacacgtccgagcgctgccctgttcaccgatggatgagctggtacggctgtgccgatagatcgctttacctgccgtactggactaccggtagcgatcgccgacgctacagtcgccggacgctgacctcgcagcgagcgctcgccacggcgtttgtcccccgcgagacctgacggagcgagacctcacggagcggacgagcatgccccgccagaggcgcgtactagctccagatgcgcgcctgattcgatcgggacggcttgtttggctccccgtctccggcgccggtccgggctggccagtggccactcgtggctcgttgattgctgccgcgcgtgtgctcatcagctcgcgtaggatctaaacgtgttaacgttgatggcgtccttgttggccacgggtcacgggtgttctgaatttctggagtagtcgatgtccaccatgctttgtttacatcgcgaccgctgtactggtaacttgcagagttttgcgtctttgttgcgccaggtttggctctgaaattatcactgtcaatgtcttgaaggtgtcgtccggtccatcgatgattcgatggagtgatctcatcttacgacaataagaagtcgatgatttggtggcggcacaagtggacaatttctctggactatcaatagtacgtacgatagcattgtacgtagcgtgcgtagtttcattcaatagagtgaggaaaaatttcaaggctagcacccaggtaagacagtagcaaggaacgaaaaaagaaagccccagcatgcactggtagcgcctacacacaactcacaagaaggctagcaccggaccgactgtcactagaccaacaacgaagctacagtcggaccgctcaaaaccaaaacctaatagacgagcaccacactcaactctatccccgcctttgggattgaaaggagagagagtgagagagaagaatgaaaccgctcttccccacaaggcccaccaacatagccaacttataaagctaaggcaccgctacaagaggataaacatctagagagagcatgcacaaattgttggagagacgttttggtaggggtctcctagacgacatctccaagaagaagagcgacgatgagtactaacgccgtcatccgtcgaggtctcaagaaaaccaggagtccaggacatggttttcacccagcagccccactaaagggagaggaacgactcattaatgcccccaagaggaagaacaacgcccgaagcaccattgtttctcctatcgatctgaagctatcgctccatttctccaccaccggtcattctctgtcagtgtatggacatcgtcgtgccaacgcctcctgccggcaaacctctacatgcctttgtggaatacccgctgtcatcagcctccctatcgtcgccacaccggccgtcttaccatcgccgtcgcccacactgacctcccgacgccacccacgccggtcttccacaaccatcatcgtctctgacaagccccctgccaccactgtctatgtaccgtgccgctcgaccagatccgtcgtaggggctcccgtgggctccaccatcgtcatcgtccatgcacaaatgtgcccgtcagcaccatcgccgtcttctccaatgccgatgctccctgtcgtcactgtcgctgtcgctgaggttcgccacatggggaagggggactacctcccttgttggagaggccaagtcttgacggaggggcgctgaaattggccagaggggcatcagatctagcggctccgttcatggtgcgctccctctaccctatcacctttcctcctcgtgccgcctccacgctctcagcctcgctgcttgcatctcgtcctccacccttgcagtctcgccctcctcggaggcaccatgcctcctccgcgcgagcacaccgcaggactcctctgtcatcgacgacatcctcctcctactccccatcgccacaacctcctcctcctgcccggtgatgcgtggtcagtgccgccccctcccaatctggccacgagggggcaaattccgtctctggtcggatatgccgcaaccggccccgacagcgtcggacctagccgctgttgcttgccgcccctccactcgaaccttgtcagcgccccagccaccaagtcttgcgtgaagggagaacgtcctgccaccgccatccttgccgccgcccagctttgcctacggttgctcgggcagcggagagaaggaaggtggggcagtggcgggactgcgacgtcacctcccgtgtcattttggagcagagcgacacgagagtcaagttagcaacatagtactagtagtataataacacttgtagtatcgccttcagtttactaaggttgtgtttagttcacaccaaaattgaaagtttggttgaaattgaaaatgatgtgacggaaacgttagaagtttgtgtgtaggaaagttttgatgtgatggaaaagttgaaagtttgaagaattattttggaactaaacacggcgtaaagacgacacgaaacctcgtgatgggctgatgtctcgtcactgcagaaacgctgtaatatgcccatgtcgaccacgaaatctatatgccattgcttgttgctgggtgctactcttctcgctggaacagttgcatcccatacggaatgtgactgaactgacgagaatgactgtaccaaacttattcttacacactgggtgggtttaattcacatcaaaactggaagtttgattgaaattggaacgatgtgacggaaaagttgaaagtttatgtgtgcaaaaatgttttaatgtgatgaaaaagttggaagtttgaagaaaaagttaggaactaaaccaggccactgtcctggagaaacagacaatacagaactggtgaaaaactctattagggttcaggaacatctttcagacttgttttattggtgagaaacaaacaatagtctcctcttctccatctaaaatgcaattagctcaatcttgttgtaaaatcaaaggtgtttttgattattattctgtgatgaacaattgggcattggagattattggttttgttatttagaatttattcacgaggtggttttggagatgattggatttcacaggtgatcacaggattcgtcattttatgtgaccggtcagaccggactctggtagctggtcagaccggcgtgtattgcacggtcagatcggcgtagcccgcggtctgaccggccgtactgtgtcggtttcggtttcgggttgtttacttggatattcgtgattatttcataattatggcttctagatggatactatacgtatgtattactgttgtttgctactaatgagtcaagttggagattgcttggtctcggaatatggtttctttgtttatttgatgtgtatgtgacttgatgcctcgggagagtatttgcggtgatggaccggaagtcggcttgaggataagacgacgtccgtggtggtcagagatcatgcaggatacttaggctagaattgatgcacatggttgatggagattccatatggcatacgatgaaggtattgtgtgcgtatgggatgcggagtcgaatttagaaggagtccaaatttggtacgattggttatgtaaagtttctttcttgtactagtgggtttcctaaggtgtttaggactcctagtatgagtttggttcgtggttttaggctgcctacctcatgtataaatacagggggagcgtgaggcttcccggtatcactttacagagcaattgagttgagttttgagttagggtttcgagtttagtcgaaattttgtaaggagtgctgttggtgcactttgtaaacaaagagagaatcaataaagttgtcatccactttaagagttcttcgatttgtgtttcaccgagtttcggcggtccaaccagcgatataccggtggtccgactagcggcaagcggcggtcagaccggcggcggcgacagtgagcggcagctgatctcgacggtcagaccgatcgatctacatcggttagaccgacgttcatcaggcggtcagaccggtgcatacactttggtcagaccgcgatccgtcgaattcgagggtaacttttatttccgctaaaagttttcggtttttgggtataccaaccattcaccccccctctggttggcttagttcttgtgattcgatcctacaagtggtatcagatccttgttttcttctttggatttttatcaatctagagtttttgccatggttactcccgctatgttttcaactaagcctcatgttttcgatggaacggatttttgtcattggtgtagtagaatacaatcttacattatggctgaagattatgatatttggacaaaaagtttctcatccttatgttattcctgaagagattaatactgctgctttaaaaactgagtttgaacaaaattacaaagctcgcaatattcttttgagtgggatttctcgttcggattatgatcgtgttgctcatcttcgaactgctcatgaaatttggaatgccttgagtaattttcatcaaggaacaaataatattaaagaacttcgtcgtgatcttttcaaaaaggaatatattaaatttgagatgaaacctggagaagctttggatgactatctttctcggtttaataaaattttgattgatcttagatctgttgattcttcttatgatactaattatccacaacctgagatttctcgtcactttttgaatggtcttgacatgtctatttgggagatgaaagttacatctattcaggagtctgttaacatgtctactttgctttgaattcgctttacactaaattgaaaacacatgagatgaatcttctttctcgaaaagttgattgtaagtcgagtgctttggtttcttcttcttcttctttggatgttgatgcttcttcatctaagcctttttttcttgctgtttttaatgccacatccgatgatcaactcgaacaaatcgaggaggaggatttggctttggttgctaacagaattgctcgagctatgaataatgccaggaacaggaaatgaggtggtccaaatcgttgctttgaatgcggttcaattgatcatcttcgttcgcattgtcctaagcttggaagaggcaaaagagaagacaaagatggtgataagaccaacaacaacaagccgaagggttcataccaaaggaggaagatggagaatcttaggaaggcttttcaacaagtttgcgccgccttcgagccactaagtgatgtagatggtgaaagtagagatgatgataagggaaagaacatctctgatgtttgcttcatggcgtgtggtgaatctgacacagagtatgaagataatgaggctttggtggcaaggaaggagaacgtgtggatcgtggattccggttgttcgcggcacatgaccggtgataaaaattggttctcctccctcaagaaggcatctaagactgaatctattatcttcggtgatgcttctacaagtgtcgttctcgctacaggtttggttaagataaataaaaattttgaattgaagaatgtagctttggttgaggacttaaagtacaatttgctttcggtttcacaaattgttgatgaaaattttgaggttcactttaagaaaactggaagtaaagtttttgattcttgtggtgattctgtgttgaatatttctcgctatgaaagaatgtttaaagctgattttaaaaatcctgtttcacctgtgataacatgtttggttgctaagtttgataaagatgtgatgttttggcatcgtagacttggacatgttggttttgattatttcactaggttaagtggtttggatcttgttcgtggttg

SEQ ID NO: 26582 - DNA, 5886 bp, Oryza sativa
aagttctgctgattgtggaaatatttttgctacattatcaactatgccgcttctttctagcttgcttctttctgcaagagatgagaatgaaccactttgctttgaggctctccagcccatgtccaaagaactccacaggtcaattatcagagggcaatgggccaagggcacattggactacccgatatttcttagccacactacacatctcaagtacttagctctaagttggtgtaatcttggggaagatccactggggatgctcgcatcacacttgtcaaacctcacttatctaagactgaacaacatgcacagttcgaaaactttggttcttgatgcagaggcgttcccccacctgaagactcttgtgttaatgcacatgcctgatgtcaaccagataaacatcacggatggcgcccttccatgcattgaaggtttatacattgtatcattgtggaagctggataaagtccctcaaggcattgaatcccttgcctccctgaagaagctctggttgaaggacctgcacaaagacttcaagactcaatggaaaggtgacgggatgcaccagaagatgctgcatgttgcagaggtccgtatatagatgttgcagattggctctttctacattagtattctttcttaaagtctgtctgcgtgcaagtacatcacacatttagttctttccagtaatttgtcagatttgcatatgtatggtcggtattgttttctttggtaacatgtcatgcttgattttttttcctaaaggaggcccccataatttatgtgttgtttcaattgccttcagatttatttcatgtaagaatcatgtcccatttttatcaacggcatcttcctgtggtgttatcaacgttggaacctccttgttctcgtctgataacagggcttcgcggctgttttaatcgagctccatgcctagtgtggtctgtactggggttggctttggtgcagacatgcagtgcaccggcgtgagcccatatcgcattctcagttgtagtgtggtaattaataatgctgcatgttgtctccattttatttcttggaaaaatacaggttccaatgtattgattttgctaaagatctctagatgtgtaacaaactagagtcattcaaattcaggattttgattagagtaaaatacaccagcggtccttaaacttgtcaggaggtcttacttagatccacgaacttgcaaatgtgatggccatccactttctcttgttagtgtggccaattttttgagaagggttaacagtctgacggaaagcagcgacgacatttgccaccgattaggttctcaggttgagaaggcacctgcattccaagaattgcgggaagttcttatgagtaactatggcaatctgtctgatcatcttgtcaagacatgcctgctatacatgagtgtattcccaaagggttttgagatcaggagaaacagtctagccaggagatgggtagctgaaggatatgcacagtctgtgggtaaattcacagacgaaacggtggcacatcaaaacttcaagaaactgcttgaccagaatatcatcgagccgatgggtgcatgcgacaatgcaagagtgaagacatgcagaactaatgctgtcatgcgcgagttcatgctgcacagatccttctgtgatcacttcatcgggtctcttgatacaatgtcagagtcagatgacccaagtacctttcgtcatctcttcatccagaattgcacaaatatcaacatcctcaggttggccaagaagaaacttcgtgcccgttctctgacaatctttgggagtggaggaggaggagctgtttcttgtatgagagatgctccggtgctttctactcgtagtattatactaccagtagaactaatctgaaccgtttatttttttagggtagattagtataagacagatttggggtagatttgacacttaatttatttctccgtgtgggtctcgtggttagcgtcgctcggaatcctcatctatctcaatcgagcggaggtggagagcgtgactccttccgccggcgcctcgactccttctgccggcggcgcttgtgcattccgttcccttccgccaacggcggaactctccggcgcccctctccttccgttccccttctctgctggcgtctagccgcttccccaccggcctgcgcgcaggagcttctgctgtgggatgtttttctgttcatgattttgtatgggttgcgttttgcctgaattctggtgtgaactgaacagagaagggaaaacgttagttggaaatttatctgaaatgctgtagttcgtttcatagatatatggactaatccatgttagtactgaagaccaactgatcatcaattgtttggtttagttttcaacagtaactgatccttctgtttgtctctgtctgtttggttaattgaccctactccctgcatccctgcatgtatctgaattcttctggatatgaagcaactcgtttcaaatatggatgtggatttaataccctagtatgtcacaatgtgttgaattcttctgcatctgtggcattccgtttcagagatgaatgggcttatctgaagaatcatgcttttaacttgcagggctagttgaactgttggatcgcttgcataaagtaaatattttgcccccaagctgccactcttatacttcctccgtttctaaatatttgacatcgttgactttttaatacatgtttgaccgttcgtcttattgaaaaacttttgtgaaatatgtaaaactatatgtatacatataagtatatttaacaatgaatcaaatgataggaaaagaattaatcattacttaaattttttgaataagacaaacggtcaaacatattaaaaaagtcaacggcgttaaatatttagaaattgagggagtatatttaagtgaaatcccaagctgctaagttgccattcttatatatttaattgaaatcccactcctatgtactcttatgtagcaaaaccgttttactgtagacttgttcgatggtcgcaaaatgcattgacagtgatatgctatcaaccataaactctggacagaaagttaattagggttgatcaaagaatagtttgtcaggttttgctgctatcatgcttcttcagcaagctctcccttggtctgttcaatggtatatgcaaccaacttcgtatgtgtcagaaaagatgcaaagcaaaatgctcaattcagtagattgtcgacaagatttttgacgacatcgagcaatggagcagctgcgggcaaatgtgctggtgcatttctctcagagagctagataaacgttggaggcggcggaggcgagtgcgtcgggaggcggcagacgagggcgagggtggcggagcaggcgaggtcggctgaggcggcggaagggaggagtcgcgagggaggttctctcggcatgggctccagatgcaggcgtcagttccagaacgaaagaagatagggtagctattgttataaagtgaaagtgacgattatacccctccgtaaataattttatgtagacaaaagtacccctccataattctactaccattaagtgaggtggtagtagagatagatctgaacccttcgatcaaataagatcaacggttcagatttttttctactataagtagaaagcaccggagtgagacttttcttgtattgccgagtgtgaactgttgcaggccttagatctaaaagaatgcaatgattttgatgataatcgtgtcaagggcatcatgaaggacaatctcagtcgtctaaaatatctgagcctcggaagcgctactacgaaacttccaaaggcgattgagaacctacagtgtttacatacactcgaattaagaaagacaaatgtagtggcactgcctatagtagtcataaagctgccccatctagttcacctgtttgggaaggtcaagctcaggaaaaagaggagtattcatgcggtgcaggtaatagatgatatcatctcaaacaaaaaaagtatcggacaaaagagtaagctgcagactctatcaggatttatcatagacaaagactctataattccgcaactgatggttcatatgaggggactgagaaaggtcaagatatggtgtgattattccactggtgaaggtaacactatccacctcaaggaggctattgaaaatatggttatgtacgaaatggacacaggtgttggcgttcgttctctgtcactgtacctcggaaatgccttggagaatcttcttggtcttctaggtgaaacaaatggttttcttaccactctgaaactgcacggcagactgagccaatttcccaagtttgttacgtcgcttacaggcatcaaagagttgtgcctttcatcaactaatctaactgggagtgatttatcaggatcaggcctgggtgatctaccctgcttgctttatctcaaactggtagaatacaaccttgtgggcttcgtcattaaaaaaggggattacccagtcctgcagcgcctatgtctagtggtggagagtcctaatcctatcctacctaaaatcgaagaggaagctttgccagaacttgtttcacttcacctgctttgtgtgcgccttggtgatcttgctggcattaatattagaaaccacacaaatctccaggaagttgctcttgattcagctatcagtatggaaaccataattacttgggaaaatgaagctcggaagcacccaaaaagacccaaggttttgttcttcaaaagggttggcacacccaacactgggtgtacggtaaagtatactgcgaccgagaggcctaaaacacctgagagcacggggcccggtgaatcgatggaaatagataattaaggtcctctccgtctctgactgatcgagctgctaaatgctcgccatgttcttcaaggtcagtattattactcttatcatcgagtattattatcctgattattagtgcgctctacatacatcgagtaaattgttatctacatgctaggaacatgtagagcgcaatttactttgcaaatgaaaaatgtcagggtttttttatcctgcaccttttgtattgtacctttattttatattacaagtctctttgactttttctttagttaaactttttaaatctgaccaaattatagagaaatataacaatattttcaacactaaacaaatatgttatcaaaatatactcaatattaaatttaatgaaatttatttggtgttgtaaatgttgctaaattttcctatatttctagttaaacctaaaaaggttttactaagaaaaaaatcaaaacgatatataatataaaacggatagagtatttgggcctgtttgggggagctttagattctgagaagcagctgattgatagccagcttctgagaatctggaaaagctctgaaacccagcttctccagcttctagcttcttagttcatatttcagaatctgtaactacagattctcagaagctgtggcctgtttggaacagcttctagtagaaacagcttttgggaaaagctgcagctgggacaaactcccccaaacagggcctttgtcttggcaccgtcgctggttgcaacttgcaaggttgtattcttctcgtagaattttaacatgacgttcatttccattttacagcatgtcgatcgtaaagctgttgttccgcaggagctgtaagatcggcgcccgaccaccgtctgttgaatttccatatttactacagtgaaccatgtcgtgtgtgatgtgtcaagtttccttacagaatgagtaactttcgtattcatattatcatgtcggcctgctacaaaaataaaatcagaacaaatgatgatttgtggtgtgtctatcaactatagccgagtagaaaacgctggtttg

SEQ ID NO: 26583 - DNA, 16357 bp, Oryza sativa
tcaatgttagtaatgtggtaattaattggactcctggtttggaatggttaattcctggtttggaggtttagtttgttcaactggggttggttgttcaaatatggttgggcctatgcaacatgggtgtgttgtatggtgttatttaatattgattaattattcaactgttttcactattctcttaaatatttattaaatgttgtttctgcaaatgagctatgttatgccatcctttgttatcctgtgcacttgcatatttgctgtgtgacttgttgagtatgtcatatgctcattcttgcaatattcattcatcagaagaggagtatctcagtgaaggtgatgatctggaggattaggcttgttcttggttaagatgcctgtggagtggagtcaccatagctgttccgtagtttgttatagtttttctttccgctgcgtagaatgttattctttgagaggaactatctacctctgtaataatttttatttgcgaatattaaatagtcatttatttgtactctattattaatttgtcattgtgtgcctcggttgattcctggacgagggtttaacacacatgtaagcgtttggaattttggatagaaattccgggcgtgacaagttggtatcagagccaccttgaccttaggataagccaaatggtaaaccttaagtagccttcaaaatattttgaaaaaaatagaactgctcttctctattctcttacaaattaattaagttggcagcacatgcaaggttatgcacaaaatttatttaactcaatttcttttcctttaaaagcaaaagttgctcttctcaaaacgtttcattttctttttaccaaatcttattgattagtcggcactgtacatctattatggtatcgatttaatcatgctggcactagtactactcatcccctttaatggtgacattgtaccgtgcttatagtaggtcttaagtattctggttttattttattcacttgtccaaactgatttgtctatgttcaaaagttaaaattctaaaaacatatttatataatagcttggtatgtgtcttttcttttattgtcttcctttttggtcaaaatcagttaagtctagatggtgcagctaacttaaaatatgcattaattcttctcttctatgtttctttagatgccgccccattcaccgagaaatttgttcaaggtgttaggattcgttagggagctgaggttgatggtttttgaggtaggctatgaagttgctcccgagtaccgccaaatttcccatgaccccgacgaggagaagtgtcgtgttcgtgtgacgttggctagtgatcgtgaagaccttccgtccattaagttcgaagctggaggaagatcgtacagccatgcttgtcaagaagcagctttggtggccattggagagttgcgtcaacgctttgaagaggagttggattcatcagctttccagtatcatcctcacaagcctcatggacaagactatggaacctatacctgtcctgatggtgaagagagtgccactctgatgcatgcggtgcatatgcttagtgctatggatgcagtaagtgtggagcgagacaaagcagctcatgacagggaaaactggaatcgaggcaagatttacaagttgaagagcaaggtgtaccgtctacagaaggaattagctgaacttaaaggagaaacgccgccgccaacacccaagcttcgcctcaccgcaagaaagagaacctgtccgccacctcgtctccagttagctttgaagattcgcgtgatgggtgaagctgtgcccgatcgtgctgaacctgtcattgacatcataagtgatgaggaagaggaggaagaccctgaagaaagagagccagctactccagaggaagaagatccatcgcttcgttccgacgcaaggcggaattagtcgcttagttagatcgttgccgtagttcgctgtgttagattgcttgtttaagtttgcttgtgagtgtgtgggttttagttgttgcttacatcattggtgggatgtaacagcatgagtctagttctttgcttgtcagagtgtaagatagttggtgagatagtgttaatgcaacttaaatgtaatcatacacagttaagagcaatatagaatttaaattaattaaataactccgttctaagggtgtctctctgtcgttctttcctgttgtccctgcttatcgtcagatggtcaacacgcgcaccggaactggaagtggaagtggaagtggaagtggagctactaacaatggaggagatcccacgttagctcagattctggcccaacaaacgcaactgatcaatctgttagtgcagcaggcacagaatcagcaggcaaacaatcagaaccagaatccacccccacctccccaaaacaagctggcagatttcttacgtgtgagaccccctaccttttcaagcaccaccaatccagttgaagcaggagattggctgcatgcggtggagaagaagttggacttgatccagtgcactgagcaggagaaagtttcttttgcttcgcatcaactgcatggacctgctgctgaatggtgggatcattttcgccaaggcagggctgaaggagagcctattacgtggcaggaattcacggccgctttcaagaagacacatataccagcgggtgttgtagctctaaagaagagagaatttagagaactcaaccagggatctcgttcggtcaccaaatacctccatgatttcaaccgtttagctcgttatgctccggaagatgttcgcaccgatgaagagcgtcaggagaagttcttggagggactgaatgatgagttgtcttatgctttgatgtctacggatttccgggatttccagcagttggtagacaaggcgattcgtcaagaagacaagtataaccggatggagcagaagaagcgcagggctgcccaattcaagacacaacagggcagtaaccagaggccgcgtctcgttactggacctcaagttccatcgtatcctcaaggaggatcttcatcagttgtccgcccccaacgccagttctacaacaacaatactggtaatcgtggcaatgacaaccgcaacgtggttgctcgtcctgcagcaactccagctcagaaccagcccgtcaggaaggaacagggaagcaagccaggggtgtgtttcaattgtggtgatccaggacattatgctgataagtgtcctaagcctcggcgcgtgaagaacgctccagccccgaacaactccaatgctccagcaccaaaggcacgtgttaatcatgttgcagcagcagaagctcagagtgcaccagatgtgattttgggtacgtttcctgttaactctatacccgcaactgtgctttttgattccggtgctacacattcctttttgtctaaaagttttgcgagcaatcatgggatggaagttattagtcttgggagacctttactagttaataccctaggcaatcaagtattttcgacacaatattgtccttccgctactatagaaatagaagaagttcctttcccatcctcgcttatcttgctagaatccaaagatctagatgttatcttagggatggactggttatctcgtcacagaggagttatagattgtgccagtcgtaaggtgactttaaccaatagcattggggaaaccgtttctttccttgcgtcctctcctaaatctcatggtgtgatcttaaaccaagttgctctacaagagatccccatagtacaagactacccagacgtgtttcccgaggatttgctaggtatgccacctaagagagacatagagtttcggatagacttggtacctggaaccaaccctatccataagagaccgtacagaatggcagctaatgagttagctgaggtgaagagacaggtggatgatttgcttcagaaaggatacatcagacccagtacttcgccatggggagcaccagtcatctttgtggagaagaaagatcatactcagagaatgtgtgtggattatcgagcgttgaatgaggttactatcaagaataagtatcctctacccagaattgatgacctgtttgatcaactggaaggtgctacagttttctccaagatagatctccgttctggatatcatcaacttcgaatccgtgaggaagatataccaaagaccgccttcacaactcggtatggtttgttcgaatgtaccgttatgtcatttggactcactaatgccccagcctttttcatgaatctgatgaacaaggtgtttatggaatatctggataagtttgtcgtggtgtttattgacgacattcttatttactccaagacgaaggaagaacatgaagagcatcttcgtctagctttagagaaactacgtgagcatcagctttatgccaagttcagtaaatgtgaattttggttgtccgaagtgaagtttcttggtcatgtcatctcgtctggaggagtagcagtagatccaagcaatgtggagtcagtgttaagttggaagcaacccaagacggtttcagaaattcgtagtttccttggacttgcagggtattaccgcaggtttattgagaacttttcaaagatcgccagaccaatgactcgtctgcttcagaaggaagtgaagtacaagtggacggaggattgtgaacgaagtttccaagaactgaagaaaaggctagtgactgcgcctgtattaattttgcctgattcgaggaaaggtttccaagtgtattgtgatgcatcccgactcggtttgggttgtgtgttgatgcaagaaggaaaggtggttgcttatgcatctaggcaattacgtcctcatgagaataactacccaacgcatgacctagagttggcagctgtggtgcatgcattgaagatttggcgtcattatcttttcggtaaccgtacagagatatatacggatcataaaagtttgaagtacattttcactcaacctgatttgaacatgcgtcagcgaagatggttagagttgattaaagattatgatatggagatccactatcacccggggaaagcaaatgttgtagccgatgctcttagcaggaaaagctactgtaatatgtcagaaggtcgacgtttaccttgggagttatgccaagaatttgaaaaattgaacttgggaatagtcagcaatggttttgtggccgctttagaagctaaacctactctgtttgatcaagtcagagaagctcaagtgaatgatcctgatatccaagaaataaagaagaacatgagaagaggtaaagccatcggttatgtagaagatgagcaaggaactgtgtggttaggagaaagaatttgcgtcccagaaaataaggggttgaaggatactatcatgaaagaagctcatgaaactttgtattccattcaccctggaagcactaagatgtaccaagacttaaagcaacaattctggtgggccagtatgcgacgtgagatagcagaatatgtggctctatgtgatgtatgtcagcgggtcaaggcagaacatcagaagccagccggtctgttacaaccgttgaagattccagagtggaagtgggaagaaataggaatggattttataaccggtctacccagaacgtcggcaggacatgattctatttgggtagtggttgataggttgacaaaagtcgctcatttcataccggtcaaaaccacctacacggggaataagcttgcagagttatacatggccagagtggtatgtttgcatggtgttcctaagaagatagtgtcagatagaggtagccagtttacttcgaagttttggcagaagttacagttagagatgggtacccgtttgaatttcagtaccgcttatcatcctcaaacagatggacagacggaaagaataaaccaaattttagaagatatgttgagagcttgtgttctagattttggtggaagttgggataagaatttgccgtacgcggaattctcatataacaatagttatcaagctagtttgcaaatggctccgtatgaagcattatatggtcgaaagtgccgtacgccgctcctttgggatcaaaccggtgaacgtcaagtttttgggacagacattttgcgagaggcagaagaaaaagtgaagattatccaagaaaggttgcgcgttgctcagtcacgtcagaagagctatgccgacaatcgtcgcagagatttggctttcgaagaaggagattatgtataccttcgggttacgccgttacgaggtgttcatcgtttccagaccaaagggaaattggcaccgcgtttcgtgggaccttttaagattgtgagtcgaaggggtgaagtagcttatcagttagagttgcctccgtcaatggcgggaatacatgacgtgttccacgtatctcagttgaagaagtgtttacgtgtacctacggaggaagcagatcctgatcgtatagagcttcaagaagatttaacttatgttgagaagccagtcagaatcttggaagtaaccgagaggaataccaggaattgtgttatacggttctgcaaggttcagtggagcaatcattcagaagaagaagccacttgggagcgagaagatgaattgaagtcagctcatcctcatctgttcgccagttcttctgaatctcgaggacgagattccgtttaaggggggtaggtttgtcacgccctaaaaattgcctaaattaaaaatgcatattttaaattatttttagaaattattttaaaagcctacaaactaaagtctaattttctaggaaaattttcaacataaaaatgagctacataaaattttattaaatactatacttgctcctctattttctagatttttctgggaattatttgagcaagggaagtatttttaacaattgaaacaacatttcacaaattgttttatttgaaaaagttcaaaaaaacccctccctaagccgttgggccgaattcggcccaacatcctttccctcccgcgcggcccaagccggcccagttgccgccgccgcccctctctcatgtgagacaccgacatgtggggtccacatgtcgggcctttcttcaagctccagccggccggccgaccaagccgagccgccccaccgcgtcccctttctcctctcaaatccgctccaatccgaccccgattcctccgggtttttgagggattttgatcctctcgttctcctctatctttcccctcaagaaacggagcaatccgttgagtattctctccgaatcgagttcgtttcgagtttatccctaaaaaccgagtttggatttttcccgagtcgattcctctcgtttggagtccgatctcttcaatccaaggctataaatagcatcccctcgtcgccctctttcgtttgccccctctcccgtggtctcccgtgcctcctagtcgccgcgccgccgccgtttagtacgccgccgccgccggccgtcttcggctgcgccgcgccaccgtctccgccgtcgccgccgcttgccgtcgccgccgttaggtgcgcacggaggtgaggaagcctggccgcacctcctctttcgccgccgaccgccgtagttcgccgtcgccgaccgaccgagccgccgccgtcgtccctctcgtcgccggccatcatcggtcgtcgtttgtcgttgtggtgagtaccgttgggttcgtctcgtcgtcctctacatgtacatgccctccaaaaccccggccgactgccctagctccggcgaggtcgccaatccgagccgggccggccatggatgacgtcatgctgacgtcatcatctcctctttttccaatttcttttaatagattaaaacttcggaaaatcataactaaataaccgtagatccgtttcaggtggttcaagttgctaaatttttctaaaatcaagatctacatgttaaaaatatccacatgtactgtttatgcttgtttttgtactgttttgttgattttgtttaattgctttagtttccgacgttccggaggagagcgtttcctttgaggaaggttccaaagcgtttgcggaagcccaaggcaagtcacacagatcccaaacaaccctttgagcatgttgaacccgtttaaagctattattttatttcaactatgcattgttttcgaatgtcatcgggtggtgaacctttcccaattaattaatggccgaagatgactttattttcctatgggttataatttgattagcatgaaccttatatattggattggttcagctaaacgctatatgtaagtttgcttagccatgcttagaaacattagctaactaaagggattaattataaactatgttatattattattttaattatggttacattaaatggtagctcacgatggttgatcgtgtgatgataattaattgataattaaaacctggttaaggtgggttgtgagcatatggttttgatggttgtgctcatgacaattaaggaccggttcgcgagctactgttgtgaaacatttatcgtgccaaccacaagccagcgtgggcaacggctttatcttttgtgtaacgtgattcattatagtgcgccagactgagaagtggcgagaagtccacgggggtcgctggggagtccatgccttgtttataaagggggtgattatgatccagaaaaggtgcgctgtaatgggttatgttgtgcaaggggtattgtcacaactcctttccgaggtaccgtggtggtattgaggcacatggtgacatgatgtggggttgtgtcttgtgggtacagtggtacacctctgatcagagtttaaactattcgaatagccgtacccgcggttatgggtgagttgagcaatgtttttcgtgattagtctcacactgttcatcaatgttagtaatgtggtaattaatttgactcctggtttggaatggttaattcctggtttggaggtttagtttgttcaactggggttggttgttcaaatatggttgggcccatgcaacatgggtgtgttgtatggtgttatttaatattgattaattattcaactgttttcactattctcttaaatatttattaaatgttgtttctgcaaatgagctatgttatgccatcctttgttatcctgtgcacttgcatatttgctgtgtgacttgttgagtatgtcatatgctcattcttgcaatattcattcatcagaagaggagtatctcagtgaaggtgatgatctggaggattaggcttgttcttggttaagatgcctgtggagtggagtcgccatagctgttccgtagttatagtttttctttccgctgcgtagaatgttattctttgagaggaactatctacctctgtaataatttttatttacgaatattaaatagtcatttatttgtactctattattaatttgtcattgtgtgcctcggttgattcctggacgagggtttaacacacatataagcgtttggaattttggatagaaattccgggcgtgacactattcacctaaaatttgtcttttttattactcctaaatgaatttgagtttgaacttgagatttggtgagaatgtatttgagtttgaacttgaaatttgattttcgatgttcctaccattcactccctcttgtatgcttgactcttgtatggtggcaaactattgataggatgcatgtggtgtgcaacttgttggccttgggtgatgcacccactcactgatgctcatgtcacaaggaaactcagcatgaggtattgtgccatccggcatcatatataatcaaaatcctgaatttgaatgactctagtttgttacacatctagagatctttagcaaaatcaatacattggaacctgtatttttccaagaaataaaatggagacaacatgcagcattattaattagtacactacaattgagaatgcgatatggtatattgtgggcgcactgcatgtctgcaccaaagccaaccacagtacagaccgaactaggcatggagatcgattaaaacagccgcgaagccctgttattaatatgagaacaaggaggttccaacattgataacatcacaggaagatgccgttgataaaaatgggacatgtttcttacatgaaataaatctgaaggcaattgaaacaacacataaattatggggccttctttaggaaaaaaaaaatcaagcatgacatgttaccaaagaaaacaataccgaccatacatatacaaatccgacaaattactggaaagaactgaatgtgtgatgtacttgcacgcaggcatactttaagaaagaatactaatgtagagagaaccaatctgcaacatctatatacggacagtggcgaagccaccgtaggggccagggagggccaacacccccctaacccctatgtgacctcccctcccctctcttctcccaaggataattagcccttataatctagccattaattacatcattagttgcggatgagactaactatataggacaactgcctagctatatatataggacttatgaaatgacttagttaactgatttatcattttaaaaatgattgcaagactccaattaaaatcatggaacaaactgtttaaattggcaaattatgatctataggttctcattctctcttctagctaatcgctataacatgtatgatgtcgagttagcaatcatacatcaacgctacaatgtcactgttcaccgaaccttaagtgagttaccacgtctcgtagatggcaccccccgtctctaaatcctggcttcaccaccctacatggatctctgcaatatgcagcatcttctggtgcatcacgtcaccattccattgagtcttgaagtctttgtgcaggtccatcaaacagagcttctttagggaggcaagggattcaatgccttgagggactttatccagcttccgcaatgatacaatgtataaaccttcgatgcatggaagggcgccatccgtgatgtttatctggttgacatcaggcatgtgcattaacacaagagtcttcaggtgggggaacgcctctgcatcaagaaccaaagttttcgaactgtgcatgttgttcagtcttagataagtgaggtttgacaagtgtgatgcgagcatccccagtggatcttcaccaagatgacaccaacttagagctaaatatttcagatatgtaccatggctatgaaatatcgggtagtctagtgtgcccttagcccattgccctctgataattaacctgtggagttcattggaaatgggctggagagcctcaaaacaaagtggctcattttcatcctttgccgaaagaagcaagctggaaagaagcggcatatttgatagtgtagcaaaaatatttccacaatcagcagaacttatgttgtcaatccaaatacttcttatctgcattagttccttcagctgctcggccaagtccttgctggcttccacagtctcaagagtctgaagttcttccaacttagacagatatttgggtgcttgcactccaataaaataccggaactctgacttattttcatcctcatatctgtcagctagaaggtgcctcagcttcttgatcttagtgattccacgtggtagcttctctattttagtttgcttgatgtccagagtttgcaggtttgagagcttgtcaatagactctggtagtgagcagagtcttgtccgccttaagccaatgtaacgtaaattaaacaatttgcctatgcatgctggtacttcggtgatatctgagtcttgtagctctaggacagtgaggtatttggattcagacaaaattgaggataacaatccaggagggtgtgtagttgtttcaagtagtgtgcgaagatgtggaaatttcactgttgatgcacaaccttttccattgttcaagaataatgacagacgacggacttcccaatcaaccttttccacagctccataatcatttgcgtaaccgaacctctcctgtccagcaattgagagagccaggttgcgcacaatgtcatgcatcttacaagagatcaccttgccaagctcatcatactcgtcaacttcaagcatgttccggtggatcagttccatgagatttatttcggccacatcttctggtctattgtgttcgattctcaccgcaaaaccttctgcaacccagtaccgcacaaggctctcacgagatatgcgaaaatcttcagggaacaggctgcagtacaagaagcagttcttttggtcagctggtaatgcatggtagcttactttcagaattgccttgacatcatcatttttggccagctcactccgaagctggttgtacatttgttgccaggcatgctcagtttgtagctttgtggacatcaggccacccatggtaacaagtgctaggggcagccccttacacttacttactatggaggcagccacattctcaaggtccagcgggcacctatggtcctttgtgttgtaaaatgcccttctgcagaaaaggttgaatgcatcaatttcacccaaagcctgtatcttgagatggcattcagagggagcaagaactgccacatgttccatccgtgtcgtgatgataatgcgacttgcttggggattcttaagcatgccctgtatttcgaagtacacgttctggtcccagacatcatctagcacaatcaaacatgatgtacagttttcagtccttctgtttaattcttttgtcaattcatgaacgcccattttgttgattagatcttccttggattctgatgattcttgttccatgggtatgagcggactgactaactgtcttagaagactaaggatcgtgcaagtctgtgacacagtgatccaggcatgaactgggaacttgatcttttcacgttcaaatacgtctaaggccagggtggtttttcccagtccacccataccagacactgttatcactttgtggcctggttcttcagggtacagtaattcaagcaaccttttcctgttgtattcaatccccacaggatcgccacattcaagcaactttcttcttccttgagatcgcggtgtttcgatgtcagtgggtgttcttgaaatgagctgaactgtaggtaaccattccatttgctgtcttttaacctgttcaacatcaccctttatcttcattacctcactagcaacttcactgaaaacacctgcataatgtgctcctcttacgcatctcatcactgatccttcttgctgccgttgacaagcatagtatgagtacttgtccattatgtcttcaacacggtaagccagcttccgcagttcgtcgatccaacccttgacaacattcatgttggtatttgtggaatctaaatcttgtattacatctttcatgagacgcaattcccttctgatatactcaactttgtcaggaagttccctcaagttagatacttttccggagagtttggctatgacagccctggtggcttcatctcccaaagctgtactgatctttgagatggcaagcagcacagcttctgccattgccttagtgctgcagaatagaatcatgaatcatggagctttgtcacataacgaatttaaaagataaaaagggtacttgttactgttgtagaacaattacagctaagattgtttttacgacccttgtgggaatttgcaagccatatatgtattcaagtattcaccatgatgtaccaatagatataggtgaaggagctgtgtcaagacataccatcctcctagtgaatgagtgagaaagtaaagctaatcttaatctatactttctataaaattatagcccactaaatctaaagctcaacatataaccataccacatcatcaccactagcaataattactccctccatctctaaatacaagggattttggttggatgtgatacatcatatgtccagatttagtactacttggttattctggtttgtaaaaaggaaaaaaaataacacaatgatgatcacacatcagacatatttgatcacttttggtggatatagctgatacttgagaactgttttgtttgaagcgcctgcaacactcgtaatttcatcaggtaaatatttttggaccatttatggtgttatatgtcactgaaggtaagcatttttgtgcccgtaaagttcataattttcattttattcattagctggagagacctacttcttattgatttaaatcccactgctatgatttcttctactaatggaatgaattatgtgttaattgtcttgttggaaagcatctatgttttcttcaagaggtgatgttaccatgtttacccaatgatttctgctatttcatctttcttaacaaactgctttcttgttcgtaacaagatcgttattcttatgcattatcaggtggacctacttatcaaaaggtatatatatatatatcctttatccaaagtaggaaattaactttcttagaagtgcaaagcaaaggatgataatgttgcctaaattccaatataatatttcctttcatatctaaggttatagatgaatttcttaaccaagcggccataacctaagtgtcttttgtggtgtggaattatatagtatccaagttcatcatgaaccaatcctgaagggtccttactggaggaacggcatttgcggtcatttcctgtgctgtttaatccagaaatagtgctggagatgaggaagtctattgcaagatggtgatcctaatccattttcatttctaagcctgtggcaaactgttgctccttaaaaattgttatgttcattgaaagactctggttctattggacgaggtattgcgtggtgcagtcttattttatagcttatagctgtctcttacccttagggagttagtaaaaccaatcctttctgaatgtcatggaaattagtcattgtttcccaccaatctgaacttctcaagtggttggatcttaccctctgtcttgccaaaaagctttttaaagttcaaagcagtttcatatctaaagacatgaccattggatgtacttgtgggttcagaacttcaaatttctttataccaagatgtagaatggttattttggttgaatcctttactggtgcaatgctctatttgtagaaatgctttctttacaacagaacttcactgaagctctgaggatggtgtttgtgtgagagttcaactgaaaataaactgatgtttttcggacaatcagttaatgtggccgctgctaaatgcatgagcatcagcagtttagccaaggacctaggaaccaagttggcatgtttctgtctctttatgtcgccaaactaatttatcctgtaacttttattttattctctaagtttgtgctttcacccaagtacagggtgatgtcaaactacattgcagggaaattattgggattgttactaatgagaattctttatctaaactgaagcagatggccgtagcaactcaatataacatcagccaaagagataaatatatgagaggatgcaaacatttgagactgattaccttctggggcttgacttgagcttgtagttctagcctctaggtattattgcagcagttggcgaaataatgtgatgaaaaccctgcactaaagttaaaaaagaattattctttcaataaaacatcagaacaaaacaatgtgatgttgaaattgatatagttgtactgccagtatatacagagatctccaaaatgcagaactaaaccagaaaaaagctgttcactgctgttctatgtgattgtcgctcaaattcataactaatccccaagattttcaagcaaaaaagaactaataatctcttctcccaggaggaaaattctcgccagaaactgtataacttccaagcagacaaaaaaacaggaaaactattccagatctgagagtctgtaaggcaccaaaaatacgagaagattcagtacagatcttcgagctagagctgcaagcagcaagagatagaatctcacctcaaatcagaacaagggtcttctttcgtcagctaatccatcgaagagcagagctagtcagatgatgatttttggaggtcgagaggctactcccctctctctccctcgccttgatctttagcctgcgaggctgcgacgacttgagatcaagtcccacgcgcttagcagcatcctctgaagtctgaactagcagaagaaaccgctgcgaaagttcgtcaaaatttccaggaagaagccaagagaagagatacccactactgcagtcaatctgagccgtcggttggacggctcaatggccagattttgtcaagttcatctgggccgggtcaacgctcaacagcgaggtcaacgtcgtcaattattttcttttccttttccttttttttactagataaaatgcccgtgcgttgcaacggggagaacagat

SEQ ID NO: 26584 - DNA, 9767 bp, Oryza sativa
aaaatttgtcgacaaatatataacaaaatcgttaggtatatataggtatagatttgtcaaaatactcggttactataatgggcttagcgtgggccggaattcacttgtgggccgcactgtagcagccgaagcccaacaagcgctcgcatcgacggcatttttcacggcgagcgttttctggggtgtccggtggccgccgctggcgaatcagatccgccacctcgccctggcgctccggcggccggcgaggtgggctgcgctgcgccgccgcttctggccagattcgcctggtaactcaccgattcaatctaccggattatttgctaggatagctagcctaattcgttggttgcgtttcagatgtttgagttaggcggtatattgatgtcgtaacgagttcagttttgtctacctcaaaaaaaaaaaaattcagttctgtagatgctgttcttccttccatgttcatgtggggatttatgccctaaaatacatatggcactttcaacacaaagagagttcatacagtactagagcaatgcattagtgccttagtggtagcatgccatgtcatattgagggctgctcactgttcatactgtttcagtataaaacttcacatctgctttatcaacaagtttgtttattattgccttgagtgtttcaccgaatttttgtttgtcaaagtatatatctttgaaatgctaggaggctagatctgtttttatctctgaaatttgatgttgcaatcctgctttcctacagaggagtgtattgctgctatcgtccaacaaacaatatataaaaggatgctatgagatcattatgtaataaatccatgtcaaaatgggaataaaggatcattattcatattaaacattgcgctgcctgaaacggatttaagaactggaagtgaaacacaaggcaaagacccaaggaacttcaggtcgtgactcctgatggcaaagagactaagagagtcgatatttcatgacttgttgaagaaaaatatgaaccagatgtacagataccaagtacaccagagccaatgtctttttagagaggattgggtgaatgcagatgcacttttcaagttattcatcgaaggaagatgtagcacaccactcctaaacacgcagatctggaacatgctgcattttccggtgcatttctctatggatccaatctgctttgaagtcttgatgcagattgaggagccagagtttcttcagggagaaaagattttcaatgcccacagggactctctccagccctggcagtgaatcgttgtataaaccttcaatgactggaagtgcatcatctgcgatcttcagccggttgacatttggcatgagcttcaagacaattgtcttcaacttgggaaaggatcctgcagtaatgatcaacctgtttgcactaatcatgctgttaagtctcaggtatgtgaggtttggaacatgtagcccgagcactcgaagtggatcctctccaagttgacaccaacttagagctaggtacctgagatttttcccatgttcctgaaatatcggcaattccaatgtcccagtggcccactgccctctgacaattagcctatggaacttcttggatattggattgagattttggaatcagagtacctccttctcatcacatgcagagagaagcaggcttgaaagaagtggcatcttggacagagcagtaaaaatctttgcacaattagtagcactgatattatcaatccacaagttttgcagtttcgtcagcttctctagctgttctgctaattccttgctggcttgaacagtttcaagagtctggagttcttccaaacctgataaccctttaggagcttccactccaatgaagtatcggaactctgtccgtttctcatcagcatatctgtcagctataagatgccgcaacttcttgaccttaacaattcctcgtggtaatttcactattttggtttgcttgatatctaaagtttgcagattagagagattctcaatgcattctgggagcttacatacgttggtgcgtcttaagccaatgtaccgcagattaaacagattacctatggatgtcggcacttcactgatttcagagtcttgcagctcgagaacactaaggtagtttgatcgagaaaaaattgagttcagcatgctggtggaggatgaaacagcttgaagggacaatagagttcggaggtgcggaaatgacacccttggtgcgctatcatctttccatccacatgttgagaagcgacgaacttctgtatccagctgcgtcattgtgccattatcacttgctgagccaaacatctcctctttagcaacatcaagagccaggttgcgcacaatgtcatgcatcttacaggtactcaccctgctgagctcatcattctcaacaacttccaacatattacggtgaatgagttccatgagatttccttcagctacatcctctggtttgttaccatcttttctcactacaaagccttgtgcaacccataatcgcacaaggctctcccttgacatggagtaatcctcagggaacatgctgcaatacaagaagcagtttcttaggtctcctggcatatcgtggtagctcagatttaggatcgcccggacatgatcattttttatcatctcatttctaagttggctatatgtttgattccaggcatattctgtttgtttccttgaggacaacaggcttcccatagatacaatcgctagcggtagaccttgacacctcttaactatagaagtagccacctccataaggtctttggggcagcctgttctaccatggaaagcccttctacagaagagattgaatgagtcagtgttgcctaaaggttggagatcaaggcgatattttgaggatgcaagagctgccacttcttccttccttgtcgtgatgacaatccgactttcctggagattctggaatgcattgcgcatcatagtgtatgcttcatggtcccatacatcatccagtacaatcaagcacttgctatcttctaactttttctttattttatctgttaactcataaacatccattttattcatgtttgcagctggtgattgctctcggtatgcaaccttcataagtagagtgcatagcaattcttccacatcgtaggtctttgatacaacaatccaagcatgagcagggaagtttcccttttcccggtcgtacacattttttaccaatgtagtttttcccagtccacccatgccggacactgttatcactgtaccatgcggctcattggaatacagccatccagtcaattttctcctattttcttcaacccccacaaggtcttcatctttaataaattctggcaggcagcctccagatatttgtctctcaatatcagaaggtgtttttggactcatgagctctgccgaaagagaccatttcattagatctttaacattccttggcagatttttcaagtttgttactttttcagacagtttcgctagaacagccttggtggcttcttctcctaaagtggtaccgatctttgagatggcaaggattactgcctccgccatcagtgctgaagaacagaaacatggagtcagtcttttatgtgatatgctaacaattaagaatatcaggcaagaacatcatctgattgaatagatctgatccatgtattatgtgctttacggattatggaaataatgaacacataagccaaacaacatttaatccaatgcatgtaaaaaaaaatgaaacaaaatccaaaagcagtaacagtcaaatacagtttccagcgagatgcaagcacaatgaatatataaattcattttgaaattaaattggagctatctcttctgtatactgaaattagtatatgtgagtattaaaaaattatttaccgtaggtttgtgctatataagttccgtaggttattttacattaggtcagtattatgcaaggttacacattgtaacgaaattcaggtttagttttgaaactccaatgtattatatagaaatcaataacaaactagaaattaaatggactgctctaggcaagaccatttcattctagagtcattgtccatgctagtttcataaaaaaaagtaccgacacgattaaaaaaatacataataatctgaatttctctggaacatctaaaactccagcaaattaaacatacccatgttaattggtaccagcaagagctggccatgtggttttctatttgtacaaacgggcccatctatttccattgaaattgttagcgtagattcttgtaaaggtttgagagttgatgcatatttgttattacataactggttcataataatgagatcgggtatttcaaatcatttacttgggaggtattttttttgttttccttttttacatatgccgtacatgcatacagaaatatctaattatgagactccctgatggtagactttcagaaatattttaataaactaaattactttctggaccttgattcacttgctccctagtgtttgagctgctgcctgctggtgcttttcacatagttattgaatttgatcatattggttacaattgctcattaaaaaagtgaactgatgtgaccttgattcacatgtgatgcgatcttttatttcttcattagctgaactgcctaaacaattttatttcttaatgactataggtattttttgtctctgcttcagcaattcgatatttttgtctggattactttcttgtcattagtagtatggaccttgtcagtcaaagatatgtctggtgataatattattcaaacaggaggattatgagttaagaatcatgttgtgctagctaagattttagatagtttttctaatgacgtggattcaaaatccactgaagtatgcatcttatcatttttcttttttatgcaaaattagtgacaagccggtgtgctttcagattattttctcacatttatcttgtcttgctgaaggcacctggacactggtttctgttggagtaatgtttcaaattggctttcctcaataatatcaggacttaatccatttgtttttgacgctttaaaacagctatgttctctgtgatttactatcttcagtttgaagttttttaatgagatgtggacataaatatgaggtcaagaacaccagaagaatgcacacacactttagcaggaatagcttcattcacagtaagttgtttgtctctactctttgacgatattgaaaatggctcactttaccctctactttttgacgatatttgtctttaatgtttttctttctacaagatgtattttaagttgaaatttcggagatgaaatcaagaggtatcctctactgcatccgtctaaacggttgaaaccgtggctggattttgttgttgtgttcatccggtgaggtttaaactaggcaagtagatgccactgaggggaaaaccacgtcaaatcttcgatttttgcaagcattaaaacccacaagccccacaatgccaagaattttccatcaaacatagacataaaagcaccaaaccaaaagatacaaagcaagattcagtacaaatcaatctaacctgagctgcagatcaagagcccgtctgtaacagcagatgagctggtgatactacgccttgccctgacgatgaaggatgagaggttcagagaggcagcaaggcaggtataatgcctctcggtcttgaaatctcaatcagatcctgtcagtttggtcgcaatttctgagaatcagtcaccgacgacttgacgcgcagtctacacggctaagcggttgcagtgccattgtcgtccagtggccaagttggcgcgtataaagacatgagtccactgtggatgtttccttccatgaaatttctggtttttatgatttatatgtgcagcgtccgagcttttctaagcacatcctgtgcgttataacgggtcaaacctatataattaaagatgggcatgctttaacgtatgatactcatatagtgtactccctccgtttcacaatgtaagtcattttagcattttctactctcataatgaatatgaattcattaacatcaatataaacgtgaaaaatgctagaatgacttacattgtgaaacggaggaagtatatgctacgaaaaagaagagaggatggaagatgattgaagaaggagatggaaagaagaggattccacttttacagtagtatagttagaggcacgtaaaagttgaaagaattattgtgcagtaagagagaagatatggaaacacttaaaaagggcgtcaataattcatatcgaaatgaaaataagctaatggagaggacggtaagtaggtcatgacatatttttttctatagtccactacgcaaattaggatatcaaaatttctataattgtgtcggcacatttttgtctcagtcaattttttacccgtcggattgaagttgatgtccctgtgcaccatgcttggctgtttcatattgtaaaatcaaggagaatagcccacttgatccctaaagtttcgctttaaggttaatattgtctttgatattttattttgttcaatcagatccttgaactttatcatatggtccaatatgaaccataggtctactagaaacgccatgtagatatgccatgtcatcatcttattaaaaatggatggtgaaatgtataatttctccattatgtgtgatacgaaatattataactaattttacatgattatataatttaatctaatcctaggaattgatatatacacaaaattgattatgttgcatgtattggtagacaaatcgatatatttgagtatttgcaaatgtaagtgtgtgtgaatttttcctttttccctcttatgttgtatgtaagggtatattaagtatttcatgatagatttgtataagatgatgagatgagatgacatgcctacgtggtctttctgatgggtccaaggaccatagtagactcaaagataagactccgagaactaattcgagcaaaataaaaaatcaagaactatattgaccacgaaagtttaaggaccaaataggctatactccctaaaatcaaccaaataaggagccattagttgtcggtttctcgattacacgtcgtcagtttctttttcctttcttatttggcaaaatacgcggttgctaatttgtatcgactctagactggcctgagcagtgggccggatttcacttggggccgcaccgtagaaggcccaggcccagcaagcgctcgccggcgacgagcacggacgatcattgacgccgctctccaagggcggcgagcggcgagcgttttctaggggtctccgcctctccgccgcccgccgccggccgccggcgcatcagatccgccgccttggtaactcccgaggtcgccggcggcccgtgaggtcggccgtccaccgcttctttccagattcggcagggttatttgaggtaactcctggattcaattgcccccgcgatttagttggtgtttgcttcaatcggattgattgcttgcttggatttaatgataacatcagaatttgtttacaattttgtgaatggcattcttcttcgcatgttcatgtggttagaaactttaggatttatgccctaaaagtattgcagtacaaaagagagttcacagttcggatggtgtactgcagcactgaatttgtggtaccatgccatgtcacactgaggaagtgaggattgctcactgcttaggctgtttcagttaaattctgctacatatgatttatcaaaggatttacttattgcctttaggatttcatctaaattttatttgtcaaagcacatttttgcccgcaccgttttttattttgtgtgtttagctcatttagaccagtgtatgtttgaaatgctacgaggataaacctattttctctctctctatgatttgaaattacaatcttactttcatagagaggagtttattgtcgctactttgcaacaaacaatatataaagaaatgctactagatcactgtgtaatatacatccttatcaaaaagagaagaaaggatcattctacataattaaacaccacactacccaaagtggagaacacattgacttcactgttcacaaatgcagttcaatagcataatagttcttacaagaaagccaatatctgaaacagccaaacaacagacctaactcctgggcctcctagccaaagagagccaacatttcaggacttactgacaaacatatcaggcatgatgaaaatgtaaatatgctgttactgataacaacaaaacgaaagacttgttggaaaggactggacgaaatgcagatgcatcaaacaagtcttgactgaaggaacatgtaagttgtaacatcccactcctagacacgcaggtccggaacatgctgcatcttctggtgcatttctccatcagtccagtgagatttgaagtatttgtgcagattgagaagccagagtttcttcagagagcaaagggtctcaatgccctgaggaactctctctagctctggcagcgacacgatatataaaccttcaatgactggaagtgcaccaccagcgaccaccagctggttcacatctggcatgtgcttcaagaccattgtcttcaggttgggaaaagaccctgcagaaagggttaaagtttttgcactattcatgttattaagtctcaggtacgtgaggcttggaacatgtggcgcgagtacccccagtggatcttctctaagttggcaccagcttaggatcttcacctctcatcttggcagaaaatctttaacttgaaggaagctggagtccaactacatctcagtagtgcatatcatcctcaatcagatggtcaatctgagcgtgtgaatcagtggctgaaaacctatttgcgatgtctaacagttacaaaaccaaagaaatagcattctctaccttgatcaggttgagtgctggtataatactacttttcatacatctttgaacatatctacttatcaagctctttatggtcaaaaaccaccaatggtgggtgaagcactcataccagccaattttgttggaaggcttcagaaacagagcgcaagcaagagctgcattaattgattcagtaaaggccggtctagataaagctcaagcttttacgaagtattttgcagatgtcaaacgaagtgaaagaacattacaagttggggacatggcctatctcaaagtgcagccttatagacacaatgcattaggcctgcacagctcatttaaacttcattctcgttactatggtccatttatagtgattgacaaaattagctcgcaggctcataagttacttcttgctgaacactctcaaatccatcccgtcttccatgtgagccatctgaagtgccataccggagcaaaagctataccagaaccagggttgcccttgattgatacaaatggcaatatcctcacagtgcctattgctctgctaagagaggcgtctgatacctcgaaacaacacccctgtcattcaatggaagattcaatgggaaaatcttccaccagaggcggatacataggaggatgctttgttcatcaccaaggtttttcatgctttcaaaccatgaagacatgatacttaagggtgggtattgtcagaagtctgaaactctgaactgctgaagaagcataggaattcagacatgaataggaaagagcggaagatggacggctcagatgcaacgatccgattcactaatgatcatcggagggtgtgcgtagcttttgaggtctgaaa

SEQ ID NO: 26585 - DNA, 8496 bp, Oryza sativa
tatagtaagcaactattgcatgaattagctacttcctccgtttcccaatttaagtcattctagcatttcccacattcatatcaactatttcacctagcttgtctggcgacctcataggtcgctcgcccccgccggcggcctctccgggctccgacggccccccccagctttagcctctccacaccgccgcccctcctctcccctagttggcccaaatgccagactcctcagcccggacacccaccctcgtcaccgccattatcgcccctcccattcatcaccgtccttctccacctccccgcccctttctcctccagatctgccgccctccctagcctcccctaccctagaatgcttcccttcagctggcccttcccatcaatcccctccacagttactcctccacgccaaacccccccaagatttgcaagatccagttgaagatccggctcccgtcagcacttgcagcttgcttcccgggacggtctctggcggccacccctcctccagctcggctgctacagcattcatggcgccgcgttccccaattgatcgttctttggctggtttggtacatccaagtacaaggcgtctttactcctctgtgctgatggatctccccatatccgctgctcagtctgagctcgatcctcatcggccagctgcaccacgaccttcttccccgtcggtatcagtgctgaaggatatcaagactctcaagagtggccgacgtctcgtcctgtcttcttagaatcctcctccttcagcgcaaaatcctccggtctcgtctctggtctctgctagtcatcaattcgccgaaagcaactgggaagaagtcagaaagaagcattggtggcgaaagtctccttcattcaatcgagccaacaaccaagagtgttctcaatccagaagagaaaatttcctgaagcacatggatggaaaatgtttccgttgtctgagcacccagcatcaagtgtctgtctgcacagagcctattcgatgttggttctgtctgaaatctggacacttagcctcctcctgcctcaagcgttcgggctataagagctcgcccactccacccgttctatccacaaaaaaattcccagctcttggtcctctacgctttcccccaaaatccttctcagcttcttcgcccatccccatggacgacctcactgcccgtcctctccttgactcggtggtcgtctcagccactggcgagattgagaggcgcagagaacgtttctctgctcgctccttagttgcctggcaagttggggctctgggtgacaaagttgagcttaatgtcttcgctgacgatgttcgttctgctttccacattagaagagctgacatccaattcaccaaattccaccccgaagatttctttgttacctgctccaaccaaagtgatcgcgatgccatcctccgccaaccaaggcttgctacggcctctggccgagtcttcctctttcgtccttgggatgaaagtctccatggtgtcccagttcgctatcgctaccgtgctcgcctctgtatcgaaggtgtgccaatgcatgcccgtactgatgaaacggcggcaaaggtgatcggtcgcaagtgttctatccactatgtggaggagtactccaggcgtggcaattacaaccgcacatatgacatgtgggtttggacagatgagccgagagccatccctcggggtggttcctttgccatcacgtctgctgacaaggaaggcctccccactgacatccccctccccgagctggagccactccgcaatcctcctccttctgagccaaagaagggctggtcctacgacgtcctcattcatgtggacaccctcgaagatcttcacgctcgcaaagcctgggcgtacaagtgggactataaagtccaggacgacggcatcaacttcagagagtacccgcttccctgcagggctgagccggacccagctcgtggcccggatgatgaagacgaagatggaaacgatccttccaggggtcggtatagaagccgctccctctgggatcggctgagcgggcgctcccacagccgaagcagagatccgaaccggcgagacacccagcgacgtgaccaagaaaggaggggcagatcgcgggacagagagcgctctgatcacagataccgaggtcatcgttcccgcgagccaagcgaggtgagacctcccctgcctgcccagactgatcctcagctccctcccctaatcccctcttctgctgctgctttccccctgcaagttgttgtcccctcttcgaaacctgggttcagatgatgatgcggcttctcccttggtctgcacttctgtcgcagccgttgaaatccttcagcctgatgaaccactcttttcgcaggggcgtgtggacatcctcgacattttggagagccatctcgacccaatgcttcatgaagcagccgtgcatcattccatctattctccagatacttcctcccctcgtgtctcttcccctgtttttgtgcctacttctacaggacatgcaggagcagacacaccttctgcgtgcaaggcaatgaagattgacagcttcatcaacggccttgcaactccagtccagccgcctctcctgccagcccccgacgtcaatgcacggaagccttcccgtgcaaaggtgaaaatccctgctttagtttcggcgcaacgacacagcgagcgtctgctttgcaagcgtcgtgctggcgcgaagcttgaaaactttgcccaagaaatcctctcaaagaaatttggtatcattgatgaatctgcttcttttgatgataacattaaaaagttgtatttacagcggtacaagaagcctctctcgccagcatcactgaagataatcgccgacttggttgaaaagggagggtgcaagacgatcgggatgaagaatttgaagaaaaatgcggcagtggcgcccctgtgactgcctccgaccggcttacagttcaagcgaagcagattttgtctccaatgattccactgccaaggccgatgtcccccgagtgtagctgccatgtctttcgatgtactctgtttcgtctgcttgttagtgatcctgaaatgtgtatctgtcacctatcggagccccgtttcggctctgtctcacccggccttttaaagcatatccacctcaatgctagctgtgtttcttccagtttacctggttgtgtttctgctatgcggagtgtgtttagatgctttttagattatgtcacaagataatgtagccctgttcaattggaatgtgagaggtatgaatgccaaggccaagcaagactctgtcaatttctgcattcaacaacatgctgcttctattgtttgtcttcaagaaaccaagattgctgttgtatctgaccaaatcattctaaactctctaggtcagcgttttgttcgtcaatatgcagctttgccagctgatggcaccaagggtggcataatccttgcctgtgatgaaaacttcttctccctctctgatgttcggctgggaaattactcaatttctgctactgtaaccatgcgagaggaaagagttcaatggtccatcacagtagtctatggaccacagattgaggccgacaaaattgccttccttgcaaaattagaagatcttcatctcgaaatgaaacctgcttggtttattgtcggagacttcaatctcatttataaagccgcggataaaaataacgaccgtctaaatagaagaatgatgcaacgttttaaaggtctcattgataaattacaagtaaaagaactgcatcttccaggtcgccgttttacctgggtgggagacggatctaacccaactcaaactaaaattgatcgtgctttttcaacctcggattgggacctgcttttccccaatttgtgcctcttcccgctgtcgtcgacttgttctgatcatgcccctattttcttcgttggaaatgaaaagcttagcaaattcccaaacttcaagtttgaatcttactggttgcatgtgcccggtttcttggacgtggtgcaaaattcttggcagaaaacgattcttgccacaaataagcttgccatttttcgtttaaagctccgtcgtttagctcgtgatcttagaagatggagccgctaccaaataggagacatcaagctgcaacttgcaattgcgtccgaagtaattcttcaactcgagattgcacaggaatctagaatcctctctgttgatgaacaaaatctcttgaccaacctcaaatcgaaattcctcggactagctgtgttaaacaagctcaagattagacagagatcgagaatgacttggctcaaagaaggggatgtaaattcgaaatttttccacattaaggcaaattccaggaaaagaaaaaatttcattcacactctacacacccctacaggtatagccatctcggcaaagacaaagaggaagaattatacaggtatttcagagaaagattgggtacaagtttcaaaggacttcaagccttaactggcgtttgctaaacctcccctcccttgatctctctgagcttgaagaagatgtttcagaagaggaactaaaagccacgatttttgctcttccccctgagaaggcgccgggcccggacggtttcatcggagcccttttcaaagttgcatggaatatcatcaaggaggacctgctggcagcgatttcttcgttcttgaaccataacacctctcagctagcagaacttaactcggcttatatttgcctcattccaaagaaagacgatgcccttggcgcagaccactttcgccccattagtctcattcatagttttgctaagatcatcgccaaaatcatggcaaacaggctagctccgcggttaaatgatttggtttctcataaccaaagtgcctttgtccgcaaaagggcgatccatgacaacttcctttatgtccaaaacatggtaaagcttttccacatatcgaaaaagcaatgtcttttcttcaaaatagacatagcaaaagccttcgacacagtaaattggccatatcttttggaggttctcaagcaatatggatttggaaatcgttggctaaattggatttccaaccttttcgcctcatcttcgtcccaggtgctgctaaacggctccccaggccgacaaatcattcacactagaggactccggcagggcgacccgctaccccgatgctttttattctagctatggaaccttttcatcaaattattagagctgcggaatctgccaacgccctaaccccgcttggtataaggaatggccgcttcagatgttctctttatgcggatgacgttgctttgttcgcaattccaaccttggacgacacgacggccctttctcagattgtgaccctctttgcgaaaatctctggcctacacacaaatgtaaacaaaactgaaatcttccctatcagctgcgaaggagtcgacctccagcatgtcattgctagttggccaggacagatcaaaaacttcccatgccactatcttggtctcccacttcattttaggaaattgaggaaagtcgactttctccctttgattaataagattggctcgagattacctggctggaaagggcgttttttcacttcagcaggacgacaaactctggtctcctccgttcttagtgccatgccgactcatcatctaactgcccttcaagctccgaaatgagtttttaaaagaattgaccgtttcaggagatcctttctttggaagggagaagaccctgatcactcgaaccctggagacagtctgataaattggcaaactgtttgtagacaaaaaagtttgggtggggctggtctcttagatttggaaagattttcgagagctcttcgcatacgttggttgtggttaaaatggaaagatgataccaaaccctgggtgggtatggatttgccctgtgatgagatagattggagactgttccaagcagccacgatcatctcggtgggcaatggcgccaaaacaagtttctggcatgacaattggctgcaaaatcaatgcctaaaagatgtgtttccaaactgttttagattagcaaaaaggaaacagagatctgtccaagtcgaattaactaacaacaaatggctgttttcgttcaggcaattcacatcaatagaagagcttcatgatctcattcagcttggaggtttactccaatcagtctcgttctcccaatttccagatgacataagctggaattggacaagttcggggtcgtatacctcaaagagtgcatatctcggtcaatttcaaggttctgttgtttacaatgatttcaactccctctggtcggctccggcggaaccaaaaatgagatttttcggttggttggtgctccatcaaaaaaccctaaccgcacagaatctactccgaagacactagccatgcaattggatttgctgcctttgcacttatgcttttgaagatacaaatcatcttttcaatgaatgcccttttatcaggcgtgtgtggcagctagtgtgcaggtttcaaactatggcgctgatggctcctctcttttcccagatatttcaacctggtgggctaatcttaatttagtgggaagcaagaggcaaagaacgacgatcagaggtatacttttgactgcatggtggaatatttggctagaacgaacagaaaaatctttcaaaactcagcttgttcagaacttgcagtagctcttcagataaagcaggacttagacctgcgtagctcggtttttaagccaccttgatttaatatttttgtaaaaaggtgtaatttcctatctccccaaacctgccatgtaatcttacctctttgctgttttcatctattaaatttccggcagatctcctgccgtcgttttcctcaaaaaaaataaaatattgatgttaatgaatctaaatagatatatatgtctagattcattaacatcaatatgaatgtgagaaatgctagaatgacttacattataaaacggagggagtattggattggttataggtgaattagagctagtagtagactatactattgaacttgctctaatagtctgctattgtaccttctctaaatgattttctttttcgtgtgagggtgtgtgtttgcaagagtaagttcccaacactcccctctcgttttccgcgtgcacgtttttcaatctgttaaatggtgtgttttttgcaaaaaatttctatacaaaagttgttaaaaaaaattatattgatccattttttaaaaaaaaattagctaatatttaattaatcacgtattaatggaccgctctattttcagtgtatgggagatggttgccaacactcacctacctcatctctagtcgttgtggcggcggcaaactccttgtaagccggtcgaatccatctgtaatggggatcgagaaatataaaccctagttctagtctcgttcttgtctcgcggcgcccttaaattttctttagatcttttgctttatcttgttataaattttgcctgtaggttccaggtaggtagccactcagctcaaatctctgaatctctcaggaatccgggagaaattggcccttgcatcctgacagagccgaagcaaagcggtcgccggcggcggtcatggacgacgaccggcgatgcccttccttgggttgcgacctcccgcgcgtcggaatcggtaacgcccggattcagtcattcagttccctgcgattctgttgacggttgctcattcgatttattctggaaattctcaggtatcggttctaggttccgcgtccgttgcgcggtatatttgtgtttcagtgctttctaggtgctcatccttcttgcatgttcatctggttgcaaattcggcacatgaaaaacaaagtaatgcagcaatgcatcagttcaggttgccacggcatacagtgggtgagaatttcttcggttaaacaatagcagtaaattacgaccaagtctaaggactgcatcatctgatttagatattttctctaagatttgggaatgcaatcttgctcatataggcatatacatatgagtagcagaatgcaccctgaagacaataaattagtgctatgggaatatgggactattctgctacacattcctctcaaaattgtaaagaaaggaaaaaatttatcatatggaatactggcgtataaaggttgaaggaactgggaggtgaattacagttacatcattattagcaaatgcagttcaaaagtaaaaggacacggttccttgtccttagatgagaatcactatctgaagcacccaaaacaacagaacaaattacaggtcccgatggataagaaagccaatgtttcaggtagtgctaccaacagctccataactaagaactatgaagagataaatgcagatgcaccaaccaagatcattgcataaggaaaaaagaaacactgcactcctacatgagtagctctggaacatgctgcattttctgcagcatttctctctcaatccagtcagcttt
